United States Patent Application Publication US 2004/0214272 A1 - sequence listing, part 4

SEQ ID NO: 13208 - DNA, 272 bp, Zea mays
  Clone ID: MRT4577_112039C.1
agcataccgttattgacagtgacccagttctggaccttagtgatgagaaaatcaccatgggcgagacgctctataggcttttaaacgacaagtcatctatattcatacagctagcatcggaatactccactcactcccgctgtatatatagaggcttagggggcgactgcataaccattaaaagacaatgctgcccatgaggaaacaaaataagaagattaggtgattgccaagcccttgtccactgtggcacttgaaaagtcactcgaggg

SEQ ID NO: 13209 - DNA, 819 bp, Zea mays
  unsure (1)..(819): unsure at all n locations
  Clone ID: MRT4577_11203C.1
ccggcccgttccaaacctccgtagccgccgccgccaccccggcgaccgaagatgatctccccggacgcagcccgcaacgtagtcggcatcatcggcaatgtcatctccttcggcctcttcctgtccccagtgctgacgttctggcggatctacaaggccaaggacgtggaggagttcgagccggacccttacctggcgacgctgctcaactgcatgctctgggtgttctatggcatccccgtcgtccaccccaacagcattctcgtcgtcaccatcaacggcatcggcctcgtcatcgaggccgtctacctcactatcttcttcctctattccgacagccagaagcgcgtgagtgtcgtgccatgttgttcgcccgatccatgatctgtccctgctgttgtttccctccacgtgtagtgtatctcntcatctggtgggtggtttttgagcttaatgcagaagaaggcgttcgcgatcctggccgtggagattctgttcatggtcgccgtggtggctcggtgtgatcctcggcgcgcacactcacgagaaacgttccatgatcgtcggcatcctctgcgtcatcttcggctcgatgatgtacgcctcaccactcactatcatngagtcgagtggatcaagaccaagagcgttgagtacatgcccttcnctcctgtcgctggtgagcttcctcaacggcttgctgctggacggnctacgcgctcatccgctttcgacctctacgtcacgatcccgaacgncctgggcgcattctttcgcctcgtccagctgatcctctacttttgctactacagtcgaccc

SEQ ID NO: 13210 - DNA, 236 bp, Zea mays
  unsure (1)..(236): unsure at all n locations
  Clone ID: MRT4577_112040C.1
gcgcccgggggggtggggtgctcataccagggcactatnacgaattcccgtttttggaagatctccccatctgtctttgctttccagccaacacccacacttaatgcttggcctgttcccttctctcttacttttcctntccccccccatgcacttctctctttggcgggggctctgttttttttcttttcactctcacatcatcatttctcctncacatcctccctttttttctt

SEQ ID NO: 13211 - DNA, 561 bp, Zea mays
  Clone ID: MRT4577_112041C.1
cctaacctaggcagccgccgtttgttgtcgcgagcgcgttcctgccccgccacagccgaagctcccagcgtcctcctgcaggccgagctgaaggttcagcgcgccggtggagttcgacgatgaaactccgtcacgtcatacctctccacctcccgtcttccagacgtctccaatcgagggtgccagcgtctcggagaagaggagcagcacggcacggcggctgtggcgaggaaggctcctgtcccatcccaacccagttagcagccgtccaaggaggaggagatccaatcggcgtgcgggcgtccgcggtccatccatcgatccaattccaatctgcagatacgcggtctgggactgatacttggaactgaatttgtcgacaacaaatctccaaatgatccatttccagctgaatggggtgttggttcgatatttggcacggagtgcgagaagcgtgggatgctcatcagggtggctggggacaacatcatgctgtcacccccgctgatcatgactcccaatgaagtcgaagaaatcataagcaaattcggcgatgctctg

SEQ ID NO: 13212 - DNA, 798 bp, Zea mays
  Clone ID: MRT4577_112042C.1
agccgccgtttgttgtcgcgagcgcgttcctgccccgccacagccgaagctcccagcgtcctcctgcaggccgagctgaaggttcagcgcgccggtggagttcgacgatgaaactccgtcacgtcatacctctccacctcccgtcttccagacgtctccaatcgaggctcccagcgtctcggagaagaggagcagcacggcagggcggctgtggcgaggaaggctcctgtcccatcccaacccagttagcagccgtccaaggaggaggagatccaatcggcgtgcgggcgtccgcggtccatccatcgatccaattccaatctgcagggaaaggaatattgtagaacacgttaacaaaattgctccaaggttccaggagggaatcaaggccttcttaggcagcccaattgttggggagatacgcggtctgggactgatacttggaactgaatttgtcgacaacaaatctccaaatgatccatttccagctgaatggggtggttggttcgatatttggcacggagtgcgagaagcgtgggatgctcatcagggtggctggggacaacatcatgctgtcacccccgctgatcatgactcccaatgaagtcgaagaaatcataagcaaattcggcgatgctctgaaggctacagaggaacggattggagaactgaaatccaggaagaattagccgatgctactggttgtaacgacgacatgcaattgaaaatgacaattgatcttttttatgggcgaaggtttgaagatggctttggtgaaggaaatgtcttgttagcatc

SEQ ID NO: 13213 - DNA, 1571 bp, Zea mays
  Clone ID: MRT4577_112043C.1
cattgggtacctcgaggccggccggggccgtaatactgacgcgagcgcgttcctgccccgcctcagccgaagctcccagcgtcctcctgcaggccgagctgaaggttcagcgcgccggtggagttcgacgacgaaactccgtcacgtcatacctctccgcctcccgtcttccagacgtctccaatcagggctcccagcgtctcggagaagaggagcagcacggcacggcggctgtggcgaggaaggctcctgtcccatcccaacccagttagcagccgcccaaggaggaggagattcaatcggcgtgcgggcgtccgcggtccatccatcgatccaattccaatctgcaggtctctgcgtcacggcttgttcgtggaggagaggtcgagaatttactaagtcaacatcttgttttaggtcattactgcatttggaagactagggacaatgtttggatgtgatatgtataatattaaaccagatcttgtttccatagccaaggctctttcttctgcatatatgccaattggagcaattctcgttagcccagaaataacggatgtaatttattctcagagcaataaacttgggaaaggaatattgtagaacacgttaacaaaattgctccaaggttccaggagggaatcaaggccttctcaggcagcccaattgttggggagatacgcggtctgggactgatacttggaactgaatttgtcgacaacaaatctccaaatgatccatttccagctgaatggggttcattgttttattgatctcatgtccccttttcaaacatttcagaagtaatccaactttaaggcggcccaaaattgttctctgaagagttaacttaatgttatgaattagcgtagcatgtcgaggcaaaattcgtcactatccccagagttagaagaaaccttgccgagttgattaatggtgacagtatattgattttattacgactggtaactccaggtgttggttcgatatttggcacggagtgcgagaagcgtgggatgctcatcagggtggctggggacagcatcatgctgtcacccccgctgatcatgactcccaatgaagtcgaagaaatcataagcaaattcggcgatgctctaaaggctacagaggaacggattggagaactgaaatccaggaagaattagccgatgctgctggttgtaacgacgacatgcaattgaaaatgataattgatcttttttatgggcgaagtgttgaagatggctttggtgaaggaaatgtcttgttagcatcaagtaagtggcgacatcacaacccctacaagcttgtgccttaaaacaagaggatacaagaagttggagtgcttttgtgaaggcttttgcgaatcacttaaagcgttagtacttttgtgaatgattttgtaaagtgtttgcaaatatgtgcaaaacataataacatgtgtaggttttgtgaatgattttgttgtggtgtctgttgatggtttatgtatgtggatctatcattgtgcaatactaattaaatttgtatatctatgtgattatgtgtataaaaattggtgatttggt

SEQ ID NO: 13214 - DNA, 220 bp, Zea mays
  Clone ID: MRT4577_112044C.1
tggtctcagtctgttgtaatcctcaagacctgcatgctcactttactacaccgcagaacacctgtcccacgactatgttccgacggcggttgacaactatccgctaacgtcgtggtcgtggtgacactgtcaacctcggcctctggacactgcggtcagaggattacaacagactgagaccactgagctatcgtggagctgctgtccttcttccggctgt

SEQ ID NO: 13215 - DNA, 1078 bp, Zea mays
  Clone ID: MRT4577_112045C.1
ggtaccccctcgagccggcgggacaaaaattgtaacaaactacatatactaaagtttagtacattgagagcttgtctagctagtccatggccactcaaagtccccatgttctcgttgtggatcattcccgtgttgattgccttgttgcatcgattgtcctcaatagtttcaacattcgagtaactgttgcgggaggtgccatggaagcattggaattcttagatgcgaacaacagtcatgtggaccttattttgactgactactgcatgcctgatatgactggctatgatttgcttagggaagtgaaggaatcgccaagactaaagcacattccagtggtgattacatgcactgatgtcataccagaaagaatcattgagtgctttgaaggaggagcagaggaatacatgataaagcctctcaaggtttctgacgtgcctcgtattcttagctacatgtgatgcacttgagggagaaaacgaataaaaaggaaatgcaagcataaacagtctttgggttatagttctctatcaatcatgcttaagtgtgaccatatatggtctttttattatgtcacctgttgttttgaataatttgtagccaatgcaagcctaatcagtatttggcttatagttctctatcaatcatgcttatgtgtggccatctatggtacttttaatgtcatccattatttttttaaaaaaaaaaaaaaaaaaaaaaaaaaaaaaaaaaaaaaaaaaaaaaaaaaaaaaaaaaaaaaaaaaaaaaaaaaaaaaaaaaaaaaaaaaaaaaaaaaaaaaaaaaaaaaaaaaaaaaaaaaaaaaaaaaaaaaaaaaaaaaaaaaaaaagggggggccccttttaaaagaaaaaaatttttggccccgggtatggaaaaaaaatttttttttttaggggccccaaaaaaaaaaaaacgggcccggttttaaaaaccgtgggaggtgaaaaacccggggggaacccaaataaaaaccgtttgaaaaaaacccctttttccaaagtgggaaaaaaaaaaaaaggccccccccaaagccccttccaaaaaattgccccccct

SEQ ID NO: 13216 - DNA, 309 bp, Zea mays
  Clone ID: MRT4577_112046C.1
aaccctattcaaaaggcccaaaccctttaaattccggaccattcttcttctcttttcattacaatcgcctattcaggccacttgttcacactcacactgacacccatggtgatgcggcacccattattactaaaccatccccgttaaatgactcacctagctagctagccagcggctatactacaacacataattaccttcagtggcgtaccccgccccctgaaccttagggccactgcttcggctcttgtaggcccaacatatcccccagttgctgcgctatttgcgccgccaacagccccgtgacct

SEQ ID NO: 13217 - DNA, 805 bp, Zea mays
  Clone ID: MRT4577_112047C.1
attgggtacctcgaggccggccgggtgctgttctcgtggccggccgggtacaccgcgccgtcccgcgggccgcggggacaccagcctctccactgcgctctgcgctccaggcccctctctggcctctgcgaaatgccgctcttcccctccaccgccgtggcgctgccccgcctcagcatcccattcccattccctctccaccacagccccatcccccttcccctcctgctccgccgccaccactcctcgccccacccgcgccttctccccttggcggcgtccctcccgcccccacctcccgaggagctgctccacagtcaggccacgggtctcgtcgctgcctcacaggccaacttcatgcgcgtcatcgtggacgccacggccccggggctggaccaccaccgcggctccgacctgctctgcgtcgtccgcgcgctgctcaagaagatccgccgccgcgtgctcgtcggtgaccgcgtcctcgtcggggcggtcgactggaccgatcgccgcgggatgatcgaggatgtcttcgagcggagatccgaggttgtcgacccgcctgtcgccaacgtcgaccgccttgtcgtgctcttctcgctcgaccagccgaagcccgagccggccacgctcacccggttcctcgtcgaggccgagtcttcaggaattccgtttgtgctcgtcttcaacaaggtcgagctcgtcgacgagcagacaatagcatactgggaagataggttgaggagttggggctatgatccactgtttctaagtgttgataagcaatcaggatttactgctcttg

SEQ ID NO: 13218 - DNA, 177 bp, Zea mays
  Clone ID: MRT4577_112048C.1
ccctcggggttgggcgggactaatccttactcgttcgtgtctcgggctgtccctttgcagtgatggcgagccgtgtggtgaacccaggaacctggatcccgtcgagggcctggcgggcagatcccggcgtccgacggcgatgggcgaggaggacgcgagcgccgggggtgatccgca

SEQ ID NO: 13219 - DNA, 254 bp, Zea mays
  Clone ID: MRT4577_112049C.1
aacaaccaaaagttctaacaccttttttcgtgtaacaaaaccgatcgaagggggaactagcaggccgtttcagaggagcgccccaaggggcgcgccagaagagcacgaataccgatccgacctacgacggctgacgggggaaacggacgcccccgggcttagaccgacggcgcgggccacaacggaccacgccccgagccgatcggcggaccagtaggagccgttccacatacggccggtgcgcgtcgccagcc

SEQ ID NO: 13220 - DNA, 2390 bp, Zea mays
  Clone ID: MRT4577_11204C.1
gggtacctcgaggccggccgggccgggaggacgacccaagcaagcaagctcgatctactactactactagctggtacacatactagccagcctgccagccagcttgccatggcgcccaccgtgatgatggcctcgtcggcaaccgccgtcgccccgttccagggtctcaagtccgccgccagcctccccgtcgcccgccgcagcaccaggagcctcggcaacgtcagcaacggcggaaggatccggtgcatgcaggtgtggccggcctacggcaacaagaagttcgagacgctgtcgtacctgccgccgctgtcgacggacgacctgctgaagcaggtggactacctgctgcgcaacggctggataccctgcctcgagttcagcaagctcgggttcgtgtaccgcgagaactccacctccccgtgctactacgacggccgctactggaccatgtggaagctgcccatgttcggctgcaccgacgccacgcaggtgtacaaggagctgcaggaggccatcgccgcgtacccggacgccttccaccgcgtcatcggcttcgacaacgtcaggcagacgcagtgcgtcagcttcatcgcctacaagccccccggcagcgagtagagaccgtggctagatcgacccatggccatgcctctgcctgttgatcggatcaccttcttgcattggttcctctctctctctccctccttttttttccctttatctcatcatttcttttctcctgcatgcaatggttccttttgcttccaacaattctcctgctgatgtatccagcatggcatcatccatctacaattacgtacgtagtgcaacgactgtcgattcgttgggtgaggaacatatatgtgaatgcaagctccggctaccatacatgtgtaatgtgtaatagatatatatacaaaactgccgaggcgccgacaatactttaataactggtccttttatatatcgtcatctgtctatcataacttgctcagcacaaatagaccgaaaacgtgtgttccattgttattcgaaggtagctcttctcggatgatcgtttaagtgagtgttagttagttttgccctgcgtgtgatgtcaggaacaattaatatatccatgtggctgtgtttgccattctagataattaagaacaatcgtatctgattgctaccaaaaaaaaaaaaaaaaaaaaaaaaaaaaaaaaaaaaaaagattgccctcgaggcccggccggggcccccagccgcaaccgcaaccaccttcccaaatctcagtagtcgcctctcgtcgtcttcgtctagcccggcccgttccaaaacctccgtagccgccgccgccaccccggcgaccgaagatgatctccccggacgcagcccgcaacgtagtcggcatcatcggcaatgtcatctccttcggcctcttcctgtccccagtgctgacgttctggcggatctacaaggccaaggacgtggaggagttcaagccggacccttacctggcgacgctgctcaactgcatgctctgggtgttctatggcatccccgtcgtccaccccaacagcattctcgtcgtcaccatcaacggcatcggcctcgtcatcgaggccgtctacctcactatcttcttcctctattccgacagccagaagcgcaagaaggcgttcgcgatcctggccgtggagattctgttcatggtcgccgtggtgctcggtgtgatcctcggcgcgcacactcacgagaaacgttccatgatcgtcggcatcctctgcgtcatcttcggctcgatgatgtacgcctcaccactcactatcatgagtcgagtgatcaagaccaagagcgttgagtacatgcccttcctcctgtcgctggtgagcttcctcaacggctgctgcaggaggccatcgccgcgtacccggacgccttccaccgcgtcatcggcttcgacaacgtcaggcagacgcagtgcgtcagcttcatcgcctacaagccccccggcagcgagtagagaccgtggctagatcgacccatggccatgcctctgcctgttgatcggatcaccttcttgcattggttcctctctctctctccctccttttttggccctttatctcatcatttcttttctcctgcatgcaatggttccttttgcttccaacaattctcctgctgatgtatccagcatggcatcatccatctacaattacgtacgtagtgcaacgactgtcgattcgttgggtgaggaacatatatgtgaatgcaagctccggctaccatacatgtgtaatgtgtaatagatatatatacaaaactgccgaggcgccgacaatactttaaaaaaaaaaaaaaaaaaaaaaaaaaaaaataaaaaaaaaaaaaaaaaagcggcc

SEQ ID NO: 13221 - DNA, 423 bp, Zea mays
  unsure (1)..(423): unsure at all n locations
  Clone ID: MRT4577_112050C.1
cggnccgaattaccggggcgacggcgcgtccggcgagcgccacctncacgcatacaagcggccgatgagggtgccagccaccgtcgccggttcagatgccgccggcggtgcatgtgccacctgctgctcacctgccatctccagagcgtttaccagcgtcggtagacttgccttcttccgtcgaccttttaacaacgggngcattgggcatgtgaaaacccaattcttcaaccctacaggattcaacatggtaatcgagctggcatcttacctttatcacccttgttccttcaacaatcatcaagcctattacagcagttaccctttgtgcatttactggcgcaaaacatcagggcacaacaactaccacaacttgtgcttgcaaacctttgtggctactctcaggaacagcagtttttttca

SEQ ID NO: 13222 - DNA, 438 bp, Zea mays
  Clone ID: MRT4577_112051C.1
atcccgcagagggctcttttttccaggaaagaaaaaaaaaaagggggtgctcttgcccgggcgacgaacaaaagcaagccccgaaccgagcggccggcgacattaaattatttattcatttcttttctccgccccaaccggagagaagcaaactcggcttggggtcccacgccgaaccgaaaaaaaagacaccggccacccccctatggggccggcgcctccgggcccctgctctggcaaaagtttgggaaaacctgccacagccgtcggggacgacggggccctggcccatgccgggaccaaatcctccaccgaccctgacccaattcatgcaccccggatggcacccgctggcccacacctcattgcgcaggccctccggcgggtgttttttgttgcaaacaccccatttgtggcaatagggccaggacaacaagc

SEQ ID NO: 13223 - DNA, 569 bp, Zea mays
  Clone ID: MRT4577_112052C.1
gggcttccccgacaaaggcagccgcgtcgcatccccttcgcctagttccttgctcggggcgccccaacttcgctgccggccgccgccgcattcccctcggctactcgctcctcgccgctccccggcgatgtctggcgggaacgcgaggtcgccactgccttcgcacggatagggatccgagactagcggcatggcgaatcgcgccgacgagcgggggggggggaccaacagcgatggcggcggcggcggcagcaaggacgctggcagcttcaagtgcaacatctgcctggacctggcacaggaccccgtcatcaccctatgcggccacctcttcagctggccctacctctacgagaggctccacgctcacgcacactataaagagtgtgccgtcagcaagggcgacgtccaggaggggaaactagcccacctgtacggacggaccggaagctgcgccgtaccccgcgcaaggtcaggggccacagtggaaatcccaatcaggccaaccgagcagagcgcctccactgccctgctgccggaccacaacaaccattaccctcaccagaacc

SEQ ID NO: 13224 - DNA, 194 bp, Zea mays
  Clone ID: MRT4577_112053C.1
ggaagaagaggggaggcgcgacaaaaagggcgccgcgccacgcatcgtccccgactcctggatcgtgtagcctcgctctccttctcccgatctgatccgaagcgctgctgtgactacgacgacctaagggcacgatgcatttgaccaacctgctgctggaggagcccatccggatggcctgcatcctggagcca

SEQ ID NO: 13225 - DNA, 2784 bp, Zea mays
  Clone ID: MRT4577_112054C.1
ctcgagcatggccgggccgggactctcattcttctcccctttcctttattttgaaccagcgaacggacgctcctcggggcccaaacccggctggtctctctcctctgagttgcccttgccccacattacaccacaccacccccctcccactccatgctgtcaggagcggaaggccgaagcgccaccgcgcccaccctgatctgcccgcccacctaacgtcggccgtcaatcggccgccgccgcgatggggtttgacgggctggtcgtggtgtcagatccttacctgcagcgccgcttcacgcaggccgaacttcgcgcgctccaggcccagtatgcggcgctgcgggacgcgtcgcctaacgggaggctgcggatgcgggacctccccgccgccatctctggcgtccgcggtgcggccaagagcagggacgccgagaaggagaatagcgcgccggagccaggcccctgccatggcctcactgacgaggagtgggcctccgtgcttaaggccgtcgcgcgtgctgacgagaagccgcaccaggacgcgagcttcgagctcttcctccgcgtctacgctgagatgcagctgcgactcaaggcagtaagcgtctgctccggccgcgccggaggaatcgtgcgctcctcctcctcctctgctgttgccttcctcacggcggccaccaccacactgcttcacaccatcagcgagtccgagaaggcgtcctatgttggccacatcaacgcttatctcgcggatgatccgtccctgaagagcgccctccccatcgatccggcgaccgatcacatcttccatatcaccaaggacggcgtgctcctatgcaaactcatcaacttggctgtaccgggcaccatcgatgagcgagccatcaataccaagagggtccttaatctttgggagaagaacgagaaccacacgctttgcctcaattctgccaaagcgatcggctgcactgtcgtcaacatcggcacacaagacctcgccgaagggaggcctcatctggtcctgggcttaatatctcaaataatcaagatacaactgttggcaaatgttaatctgaaaagcacacctcaattagttgaattggttgaggacagtaaggagatggaggagcttatgagtttatctcctgaaaagattctactaaggtggatgaactttcaactgaagaaagcaggtttccagaaaagagtaacaaatttttcatcagatataaaagatagtgaagcctatgcttgtctattgaatgtcctagcacctgaatgcagtgcaaaaccatctgcgatgtctgtaaaagatctacttcatagagcaaggttaattcttgagcatgcagataggatgggctgcaaaaggtacctgactccaaaagacatagttgatggtttacccaatctaaatcttgccttcgtggctcatattttccaaaaaagaaatgggttgtccaaacaaatgaaacaagtttcctttgtggatggactctctgatgatgctcaagtttccagggaagaaaggtcattccggctgtggattaacagccttggaatttcaacttacatcaacaatgtgtttgaagaccttagaaatggatgggttctccttgaggtgattgacaagattgctccaggctcagttaattggaagatggcaaatcgcccaccaatcaaattaccattcaggaaagttgaaaactgcaatcaagttttgaagattggaaaagaactaaaattttctttggtgaatattgctggaaatgatattgttcaagggaacaaaaaactgatattagcttttctatggcaattgatgcggtacaacattctacaactgctgaagaatcttagatttcactcaaatggaaaagagatcacagataatgacatattggcatgggccaataagaaagtaaaagattctggaaagcaccactcttatatgcaaagtttcaaggataaaagcctttcaagtggcacctttttccttgacttactaagtgctgtggagcctcgagttgtgaattggagccttgtgaccaaaggggaaaaagacgaagagaagcaaatgaatgcttcatacatcatttctgtggctaggaagcttggttgctccatttttttgttaccagaagatatattggaggtgaaccagaagatgatgctaactctgacagcaagcattatgtactggtatttgaaaaggccaacatcacaatcattggactctgaaaacgggagttcatgtgaaacaacctccatcacaacttcagatgattctgcatctgaatcatcgattgatgacaatacaactagataaaagagcagggtcatgaaaataattgatatgacctgtcattttgaaaacttgggattgattgtttgctgtaattttaagggcaaatacattcaagaccgaggcaagggaaatggttaagggctttgggtgtttttttgaggtttaatagtgtgattgggtgaaagatgtttgacatcctgtaaatatatctataactagtgacaataggttgtccaaaatccactatttgagttagaacaatttgagttacaatgtacaataaattagtgtcctatccgttaaagcttttaggcgcatgttgtcatatgcttatggaataactacaacattttccttgaaatatgcttaaattaacacgagcttaaatcgcttgtgataaaaaaaaaaaaaaaaaaaaagcaaaaaaaaaaaaaaaaacggacgcgtgggcggacgcgtgggcggacgcgtgg

SEQ ID NO: 13226 - DNA, 305 bp, Zea mays
  unsure (1)..(305): unsure at all n locations
  Clone ID: MRT4577_112055C.1
cccacgcgtccggagaagaggataagaggaagcgagtggtggaactatccgtgagtgtggaataaggatggtgnggcgatttcntnncnnaatggtngtggtgatggagcctgtcccgcggcggttgtgctggtggctgcggccgtggcggcgctgctgggcgcctgggtggcggcggcggcggcggcgaccaagttcgacgacgtggtacagcccagcttggccatcgaccacgttgtgtacgacggcgaccttcttaagctcccgctcgactccaactccggcggagggttcgtgtcaaggac

SEQ ID NO: 13227 - DNA, 543 bp, Zea mays
  Clone ID: MRT4577_112056C.1
tctgggggggacacgcggcccccccgcgagttttttttttctttttttttttttttttttgtgggaggggtaattttttgcatttaggtgggaaaggttaatttgttaagacatttttgagcggctttcctacgccgggggggagggaaccacgaaaaaacacgaccgcagaaaaaaggggttacccacaacaaacaggaattcctctgccaccggctgtaaactgaaagacctggcaacccaagggtccaaataaatctcgggtgtgggggttcacgaaaaacctcacccgaacgtgcaggaaactctcttcgtatccgaatgcccagggagctcacgggccaaacacttctgcccacggcagggggcctttaccaatcggctgggggtctgaagatgcaaaaacccaatgcccggggggcttgggggattcaccacacccatacgcatgggggcccgcccgctggggtgaggtaataaaaccactctccctgagaccattttgcttggaggacccaacggatccgtatgataggggaccat

SEQ ID NO: 13228 - DNA, 425 bp, Zea mays
  Clone ID: MRT4577_112057C.1
cagcgatccagacccacccgagccaacaacccatggccgccgcggtgccgcgtctcctgctcgcggccgcgggcctcctcaccctggccgtgctcgccgccgcggtctcgccgactctctaaccggggccggccgtgctgcagagacccaggcggagctcgtgcgccttgacaaggagccagacttcgcggactgtatggtcggggagcggaggtggatccaccagaacccggaactgggatacgaggcgttccagatcagtgagctggtgcgccgggagcttgacgccatggtgatcctctacaagcaacccttcgccgaaaccggcgtggttgcaacagtcggtaccggctgtccgcccttctttgctttgcgcgcggacatggacgcgctgtccttgcaggaaagcgatgagagggaacaca

SEQ ID NO: 13229 - DNA, 425 bp, Zea mays
  Clone ID: MRT4577_112058C.1
gtcgactctagaggatcgttggcataatttcccaccccaatgctgggaacttcctggctataaattggttgggatgctacctgaccctggggtaaaatatccctttatgtaataacttgctgaccttttaagcgcctactttcacgatggtagggatggagagcaaaggcggtggaaatatctccagtttgtggaaaaactcctgcggctaattctaagacttctgaatgatgcttttggaggtaataggcgcaggcatagctatattgataagctccctttatacaggtttgcttttgcttttcaccgcccaaacaacgggctaaatctttgccataatcatttgcgcgcgatcggtcaatcaatcatataatgctcagtcggtaactgtgcataggttaaaaaatcttcttctccatagttct

SEQ ID NO: 13230 - DNA, 805 bp, Zea mays
  Clone ID: MRT4577_112059C.1
ccttccgtctacccgagtcgcccgaaaagccagcactttcttcccttccgatttcgcacgatggcgactctcctccgccgatccgccgcccccgcgcggcagcttctcctccttccccgccagctcggcgccgcccgctccatgtcccgctactacgcccgtgacgaggtttcacggttcgacgcgctgagcacgccggtgaactggggcgtgagcatcgtgccggagaagaaggccttcgtgattgagcgcttcggcaagtacctcaagacgctcgactccgggatccacgggctcgtccccctcgtcgaccgcatcgcctacgtgcactctctcaaggaggaagccatccccatccccgaccagtccgctatcaccaaggataacgtggtcatccagatcgacggcgtcctctacgtcaagattgttgatccctaccgtgcttcatatggcgtggagaatcccatttttgcagtcattcaacttgcgcagacaactatgagaagtgagcttggaaagataaccttggacaagacttttgaagagagagacacattgaatgagaagattgtgaggtccataaatgaggcttcgacagactggggcttgaagtgtcttcgttatgagatcagggacatttctcctccaccgggcgtgaagaatgctatggagatgcaagcagaggcagaaaggagaaagcgtgctcaaattctccagtcagaaggggctatgttggatcaggcaaaccgcgcaaaaggtgaggctgaagcgattctttccagtccaagctaccgccgaagggatt

SEQ ID NO: 13231 - DNA, 247 bp, Zea mays
  Clone ID: MRT4577_11205C.1
gaaaaaaaaggttaatggaggttttttatatcaaaacacattaccacgctttaaataaaaatatacaaccagtactttaacttaagacaaccttgctttattaggggtctaatacattaagatcacattttcacaagtgttttttactacaactaccttcttttttattggatccagcttaaaaattgcaaagtaagaactatcaccctggttatcacaaaaaaatggtcttggaggcattttgatt

SEQ ID NO: 13232 - DNA, 203 bp, Zea mays
  unsure (1)..(203): unsure at all n locations
  Clone ID: MRT4577_112060C.1
ctcttctagcttttttcttttgtgggcttacaaagaatctgtgagggcaanccccncaactacaagggccatggacataacaacagggtggcaccacaggacattgggcctataaaagttcccttccttgatcacccattaaagatcaccaaaattcccagcaacccctattacttattttgcaaaaagcgggacttaccacc

SEQ ID NO: 13233 - DNA, 279 bp, Zea mays
  Clone ID: MRT4577_112061C.1
gtgcttggttttttgttttttttaattgtgtttagtttaatatctttacatgacactgtgatcttcattgagtttaaagatccacagacattagactgatggaacaccctgaaagtcctacgaaagaaggggggatgagcctaccacggactgaatgacgttaagcccgggcccataatacatcgggggggctctgtactgaccccacagaattgagaggaactccaggggggcccacggccagtattcggcggggagcggggcaacacgaagaaccac

SEQ ID NO: 13234 - DNA, 145 bp, Zea mays
  Clone ID: MRT4577_112062C.1
cccacgcgtccgcctacgcttgggcacgtccattttacaagcgcttggtcataatcatccgagcgtggatattctagctagctacgggcatatattttgctgtgtatatctgtatgtgtatcgacggtctcatcacctacctcta

SEQ ID NO: 13235 - DNA, 218 bp, Zea mays
  Clone ID: MRT4577_112063C.1
tttctttatactgactttattattaattttgtaataaacgcatttaatctggcatcattagactttctctttgatgaactggactcgttttgtcctgtttatgatttatgttgtcttgcgtcttatatcatatgttcatatcatttttcgttgccttaaacaaaaggtgtttttttaactgttttaatttactcacaaattgtatcaaattttgtaca

SEQ ID NO: 13236 - DNA, 344 bp, Zea mays
  Clone ID: MRT4577_112064C.1
cgttctttttttttttttttttttttttttttggtttttggtttttttcttttgtgttttttccaacaaaaaaaaaccttttcattggcccaaaactgtttttctcaagggccttaaactcgacagagggggaaaaaaagggggggggggggggggctttattcactggggcaaaacccccaggacaaattggtcctccttcacatttaggggtcttcttaccagggggcatcatttttaacttcctcggccaaaagcccgcgggagatggtgatcccatatgggcccccttttgagaagagaaaccgatttcttctccagggcctttcttttgaaaccggttt

SEQ ID NO: 13237 - DNA, 1260 bp, Zea mays
  Clone ID: MRT4577_112065C.1
gtgtagggggcttttttttttttttttttgtatcaagaagacgcgtgttatcgttgcttcttcgccatccaaacggcacaaagctcagctgtttgtgtttgttccctccaaaagggtgtgaacaccaccacgattgctttcccttccctgtgggttactacttcgctacctacagctacaacgcacgctcttggatcttcacagatgatgaggcgtggcgaccggcttcattcacatccccatcacaggacccggggcagggcgagggccgcctccactgtctgacatcatgacgttatgcagcagctggtggagccatagcctcgctgtgagatcgacctcgattaagccgttgaatgtcccgtccctcaacgcgatggggaggtagtcacgtaacgcttggcaggcccttcgatcatctgtcagcctgaggtagcagcggattgtgttcttaagcgtcctcggggaaggctgttcagcaagtgcttcgaccatctgagctagcacattggcaacagcgcagaaacgttcagaagaagcgcatacgtacgcaagccctgtgtcgtcaagcataatcttttggagaataaaagtggccaccttttttgaaagttctctgcgcatctcaatagcacgcagacacaaaggaactatttcagaacacagcaaattcacaatgacttcatgatcatcggacttcacaagagcaccgatcacgctcaggctactaatcctcaagaactcatattctcttgttttgtaggtagtgttcaagaaagggtacaggtacagtggaaactgtgcatttaaaaatggcatcctagtatcagggtgtgatgccacacacttaaggagtacaagcacattgcagactcgagttgattggtcaaaagataattgtgggggtgaaagtaatcgataaattgacacaatttcctggagtagtgcagccattgtaccaaaagagtgccatagtagtagagcaagatcttcacatttttctcgcttcttggaaaggatgatgatggccttctcgcggagctccgggatgcagaggttgagcacgagctgcgccacgtcctgatcctccttcgccgcgtcctgatgctgcgctgccggcgcgggcgccgagtacggaccggcggaggacggtggagggttctccattgcgattggtgatagtggtgttgcggcggttcgccgcgtgatcggggatagattagttggcgacggctccggccggcctcgaggtacccaatg

SEQ ID NO: 13238 - DNA, 353 bp, Zea mays
  Clone ID: MRT4577_112066C.1
tcggctcggtcactccctccccctcgctccggccgccacaccacgcgggcacgtcaatggcgcgcatcgtgtcacgagcgctcccgttcgcctcgcgctcgtccctccgcctcccgctcccaccgcccttccccggcgcggcgctggtccgttccgccgctgcgggttcgcccctgcccccagctgccgaggctgcactcgcggcctcgctgctctcctggcgcgggcacacggccacccccgagccctcggtagcggcgccgccgccgtttgcagggtttctcgctggaatccgcaggttccgcaagggacggcgcggacaggcgtcggcgaagcggtcgcagcctcaagac

SEQ ID NO: 13239 - DNA, 406 bp, Zea mays
  Clone ID: MRT4577_112067C.1
acccttccttccaaacccacggcgcggactcgatagggggagttcataaaaacgagttggcgctggcagccggctggactcagtccgcacatcctcaagtgaggagaagctcgcccacacacgcacaggaccacctacgttgcgagatccaggccccccacgaactcgaagaaggcgaccaaaaagcccagagagacccaagcgccgacaaagcaccgaggggcgctcacaaaatccacagaaaactggtgcaaacacaaagcatcaggagaagccatacaccctaaatcaagagcacaaggagctggaactcacaaaggacaaggccttaaaacggcaagcagaacacttaacacccaggccggaagaaccccaagcacaccaaatggtgaggccacccccaccc

SEQ ID NO: 13240 - DNA, 233 bp, Zea mays
  Clone ID: MRT4577_112068C.1
ctgtcctaacaaaaaaatcgggtttaaagcgcagggggtccccccggaaatcccggaccggaacccggaggggtcccattttcccctataggggacccctattaatgcttggaaaacaaaggccaaaacggtcccccgggggaaattgttatccggtcaaaattccaaaaaaaaaacaacttggaaccaaaaagggtgcccccgggggggccttaaagggggcccaccccaaa

SEQ ID NO: 13241 - DNA, 1914 bp, Zea mays
  Clone ID: MRT4577_112069C.1
cattgggtacctcgaggccggccgggagaagtgatgaagtcataacataggaaatatctgcattcactgtgatgatcacatcatgcactaccatctgatctcaaaaaaaaaaaaaaaaaagtctccctctccactctgcggcccggtcgatccccattccgatccatcgcacgggcagcgcccagtccggttcactcatggagtctctagtggctgcgctccccgcgggcggcgctgcggcggcggcggccttcggtgggctggtggccgctgccgcgctcgccggaaaggtcggccttgtcgggtccaagaaacacctcaacgcgcccccagctgtctctggtttacccctgattgggaatcttcatcagttgaaagagaagaaacctcaccagacctttacaaagtgggcagaaatttatgggccaatttacactataaggaccggttcttctactgtagttgtgctcaattcagcccaagtagccaaggaggcaatgattgcaaaattctcatcaatatctactcgaaagctatcgaaggcattgtcagcgctcacccgtgacaaaactatggttgctacaagtgactatggtgacttccacaaaatgattaagcgttatatcatgacattcatgttgggtacttctggccagaaacaatttagggacacaagaaacatgatggttgacaacatgttgaacactttccatacattgttgatggatgatccaaattctcctctgaacttccgggaagttttcaagaatgaattatttcgcttatccctggttcaggctttaggcgaggatgtgagttcaatctatgtggaagagtatggaaaggttatatcaaaggaggaaatctacaaggccactgtggttgacatgatgatgtgtgcaattgaggtcgactggagggatttcttcccgtacctcagctggattccaaataggaccttcgaaacaagagtactgactaccgaagcgaggagaactaccgtgatgcaagccttgatcaagcagcaaaaggaaagaattgcacgtggggagactaggatatcctacctggacttcctgctggcagagaatacactgactgatgaacaattactaatgctggtgtgggaagcagtcatagaagctgctgatactactttggtcacgaccgagtgggctatgtatgagattgcgaagcacccagaaaaacaggaatacctttatcaagaaatccaaaaagtctgcggcaataagacagttaccgaggatcacctgccagagttaccgtacttgaacgcggtgttccatgagaccatgaggcggcattctccagttccattagtgcctccaagattggtccatgagaataccaacttggctggctatgaggttccagccggcacagagataatcatcaatctgtacgggtgcaacatgaacaaaaacgactgggccgagcctgaggaatggaagccagagaggtttctggacgggaggtttgaagcagtggatatgcacaagaccatggcctttggcgcaggaaggagggcctgtgctggcagcatgcaggcgatgaacatctcgtgcaccgccatcggcaggtttgtgcaagagtttgcctggaggctcgaggaaggcgacgaggacaaggttgacaccatccagcttacaaccaacaggctttacccactgcatgtgtacctcgcacctagaggaaggaaatgagcctctactgtaaacgggtttcactgtactaatttaaaaaaataatttgctgttgcctgtgtatgacttttggatgatctctatgctgtgaagttgttggtctgaaattgggttaacaatacgaagtgcatatcatacaggacatgaacaaaaaaaaaaaaaaaaaaaaaaaaactcgagagggggccgg

SEQ ID NO: 13242 - DNA, 317 bp, Zea mays
  Clone ID: MRT4577_11206C.1
attcggctcgagctcgagccgcttcggtagcttcctcggctgggtgtggccggctcgcttagcctctacctctcttctacggtgctcctgcagatctctaagaccaggagccgggcgaatccaccgcgcccgcactgatgacggtgagcagcaccccggtctacgcctcgagggagccgatcctgacttcggccgcgctgatggacgcatcaaagcgcatctgagtcccgtgccgcacggagaacggatccttcacttaactgcacgaagaaggacactaaccccgagaactgcctcctgaagggccttcaggtgac

SEQ ID NO: 13243 - DNA, 339 bp, Zea mays
  Clone ID: MRT4577_112070C.1
gtatgcatgaactgatagactcgagtgagcaaccagaagtccaggaaaaaattctttataaataaaggggatggggccaaggaaatagaccacaaagaaacactaatagtcattcatgggcaaaaagaatatcttaatggagacacctgtgctgtgacttggcgagtactcaatccaaggggcataaaactagtacgaaatttggtatcactaatatatgcaggcaggaacgctacttgaaacagaatgtgggaagctgagcaccgtttacgcgaaatcaccttgagcttgggatcactgcttaacattaaaagggtttgttagaggatgctacctagt

SEQ ID NO: 13244 - DNA, 366 bp, Zea mays
  Clone ID: MRT4577_112071C.1
ggggtggggtttttttgtttttgggttttttttttttttttttacgggcccaaacccaacatttacatccattatttgggggtcctgggtcctgaacatttgcatactggataccaaaccttggtaacatacccggaactgggccaacgcattcaagggcccttgacagaaacaaacaaggacccgacatataaacaaaatttccatggggaaaccttccaatttttggcccacggcgcattaaaaaacccccgttttttttttttgtacggggtttatacaaggggcggggacctcccggttgattttcaagacgctttttttgggcaaaaaaccccttccctaattttttgggggtgggggggg

SEQ ID NO: 13245 - DNA, 611 bp, Zea mays
  Clone ID: MRT4577_112072C.1
gaacgactttcaaattaaatctaatttatagttctaacttgcgctttataaatacacgttaatttgcttaatgccaactcagatattttaaattaatactcgcttagtgtatgtgtgacatctatttaagtatttctcgtatgtagcgcatactgttccgcgcgtgatggcgtgctagatcgcgtgtcattcgcgtgctgttttgtgctcgtcaccacacgtcgtctccgcgtgtcgcgtgtgtagatcgtgtgcatcgccgcacgttgtccgcgcgtcgtcgggcattgttcacgtttgttgcgctgtttgcgcggtgccgcgcacgttgtttcacgtttcattctcgcgctgtttctgcgtcgtcgtcgttcgtttgcgcgttcgcgccacgcatctggttcgcgtgttgtcacatgctgtttgtgcgtcgtttgcgcgtcgtccgtgcgctgagtcgagagtgaccgcgtgtcgtttggacgtgctcttcgctcattgtcacgtgtcgcgcgttgtccgcgcgcgatattaaatcattcacttataatcactcaggtcagttaattaattattgggttaatctttctttattaaaaaagtaatttagt

SEQ ID NO: 13246 - DNA, 379 bp, Zea mays
  Clone ID: MRT4577_112073C.1
gtaaattgctcatagtgccttcttttaacattcatggtaaagcgctcatgctgctttctttgcttcagcgatcaacatgaagccactggagcattcatcgtcaattagcagtacgacaccgtctgcaatgcctatcaagccgattagtgacaacgagttcgagaacaaactaaactattcgaggcggagcacagatccagtcaaccttgttgcttattcatcatcagacctccaagcagccactggaagcttccatagtagcaggttactaggtcaggggacaatcggtggtgtttacaaggcaaaatatgctgatggaacggtgctggccgttaagaagtttgatccattgagcttctcgggaagcagcgacttcatg

SEQ ID NO: 13247 - DNA, 443 bp, Zea mays
  Clone ID: MRT4577_112074C.1
ccgggttgtacccacgcggcccaactcccagcatactcccaaaatccaaattccaagcctcggagaagtcccagactagaatttggtggagcttccaataggcttgttgcagtggcactgagcgaactgaagcagctaagcctgagcaagaaccgagcagggcaagcagttccaagaagctgactaatgcaagctaacaagtagtaggtagtttgaagcgcatgcatgggagtatgtgatagatagaatgaacactttgaatcccttgtaatgtttgccataacccatagggcgagagaggtgtagcattttgctgtatgtttgtagaaagatcgatgatgtctgcagaatttcgtgggatgaaatcatgacggaccgcctacctagccacctaggtataggtaacaaatttctcaaatcaagcaccccttttagcttgtcct

SEQ ID NO: 13248 - DNA, 1269 bp, Zea mays
  Clone ID: MRT4577_112076C.1
caaagcctcgagccggccgggagggcgctaactgtctggctgaggctgccgtgttgtctgtgcactccgcattcccgtgtcatttcactcctcgcctcggctttgttggaacgtaaaaaaaaatggcagctccctcgtcgtccctcaccccgccgccgccggcagcggctgtggcctccacaacgctgtccgggaacttcacggcctcctcgctcctgtctattacgcgaccgcgactgcgcctcgccgcctcgcaccgccgggcggtcgtggccgcagccgcgtcgccccgtcccccgccgacaccggagggcgacggcgacgagcaggaggtggagagggcgatggggatggacggtggcatccccgggacctcgggggagtttctgcgccgcgtctcctcccgcgcttacggcatgcggcgccacctcatggagtcgctcgactccctcgcctacgacgtactggagacaaacccatggagagaagattccaagccagtctatgtgctggccacaagcgataaccacctatggacaatgaaaactcgcaggagccgcaatgaagtcgaaagggaacttggaaagcttttctcaaacggagggggttctggagttggaactaaatcgaagtactctggcaccaagtttaacatggttgtcgaagatatcagagagggagtactggtatttgaggatgaggatgatgctgtaaaatactgcaaccttctgcagggcggtggccaagggtgcgagggaattgcggagatagaagcatcatcagttttcagcatgtgccgtaaaatgaaagcccttgctgttcttttccgccgcggaaagactcctccattgcctcaaagcctcgagcgcgacttgagggcgagaaagaggtcactggaggactagttctgtctgtttacgctgcatagaagtgttaattgtattcatctagctgttggaagcatgggccctaggccttgtattcatcatagtagtacatagcagtccctagctgaactggaaccgagcctgacagaaaacacagacataattgctcgaggccagaaatctctttgaaattggatggatgttcttgtaattatgagcaacatgtttacaatgaataaaatgtgatacatcaagttaaaaacattaaaaataaaaaaaaaattaaaccataaaaaaaaaaaaaaatttaaaatattataaaaataataaattcccaaaaactaaaatatcattttttcaagggggggccgttttgaaggat

SEQ ID NO: 13249 - DNA, 172 bp, Zea mays
  Clone ID: MRT4577_112077C.1
atatgatacttcacttgaatacaaatatcatatggaaacccgcatcgtccattttggatgcaaacgctgagtaaagtgagaaagggctcattagagaccgactccttttgtctaacgggtcatctttttttaactgaatcatctcatcaaaacgcctttcttttctggtttt

SEQ ID NO: 13250 - DNA, 261 bp, Zea mays
  unsure (1)..(261): unsure at all n locations
  Clone ID: MRT4577_112078C.1
gtagggtgcgcgtgctggtgctggctacggccatggcgacgcccaccagcaccgtcacccgcngcggcaacngncattggcattgtacccaagtncttccactgctgttgctagtnccactatgcttcnnncttctngttnanancngcggcatccccacgacgctggacggnccgtntccnccgnccacncgcncnttcnancgcncgctgcggcnngncagcnacgacgtcccgctcacggntccgcnccttnctncca

SEQ ID NO: 13251 - DNA, 253 bp, Zea mays
  Clone ID: MRT4577_112079C.1
gctacaacaatggccacggtgccttgccggccttcacgttcccggcagcagctggcgaaaccctatactagcaggaggaggaggaggcgttttgatcgaccagctgaactaatcatctaatttagttggatggtgatagatttgtaacacgcgcgcatgccatgttgttgttaactttcttttaacgtttttttgtccaatatgtgcatgcatgagagaccatccatcttatgaaatggagtatttcatcatc

SEQ ID NO: 13252 - DNA, 631 bp, Zea mays
  unsure (1)..(631): unsure at all n locations
  Clone ID: MRT4577_11207C.1
gcaaaccaggaattgggggaattttggcgtgctttgaagtgttccaaagctgggttggactgaaatttcgtcatagactctagagcctacttggcgtagcattcggggttttaaatctgacacatgggcacactatatatattagatgttttgtccccatcccttgtgagatcggctagctttattatactgacttactctgtacttctctgctcgccatctttttctctttcctttccctgtggctctgcttaggcttgtttactgttgacccttggattttcttagacccaaagtgatacaaaacaaacttaggtcggatgacccactaatatgtaccgatagaggtggctttctgttctcatttcatattgggcatgtctgtccttgtcgtcgacgtcttctattgttaagtatagccttacagtcaagtatatatttgtttgaccctttaattgtaacctaaccccacatgaccaaacagactcagcagtctaagtacacacgatcttgctttctcagagatctactgactgatgtgcgcacaaagactgataaatgtgtgttagctttcactgtgactgttatttattagagctcaaagttgaataacctctncaatgtattattt

SEQ ID NO: 13253 - DNA, 301 bp, Zea mays
  Clone ID: MRT4577_112080C.1
attcggctcgagctcacaaagaacaaagtggcaacagccttgccaaccagagccatgtggggcatttctaagccagtgtggcatgttgacaagcagtcgaacttggatgagtgcaagtgcagcatggaccaggatagctatgtacgctgccgagcaaaagctctatgcatcaacgctgacgcagtctgtaagtcgataactcccttatgttagtagcagaaggcaaccaactcatacatgagattccatctataatgagatcaccggaacaaatgttgatcagagcgcgtgaattcatgat

SEQ ID NO: 13254 - DNA, 659 bp, Zea mays
  Clone ID: MRT4577_112081C.1
gccggccgggccgggatccgcgatctctctactccaacctctccgcacggatcgtaccttacccatccttcttcctcgctaccgtttcgtcatgccggggcggttccacgtgctcctcgaatacccacgggcgcccactaccacccacttatgtcgacccatatcgaactggggaatcatcctggcgatggtgactgagactgaatggtctcctgagatgatatccggcaacatgaacatgagcggtgtgcgagcactctgcactcttcactcaggttcgcgagatatggtgcgacctcggaactatttcctcatgccaacccacatctgttaccagcgcgtctcagctgctaccagactgtcgagatgcgatatatggaatcgactccttgacagcaaagaataggagaggccccagagctcaatattgaccgactggccgccactctcatcaccactaggctgaccagaacaaacgatgctacctgcttctcaacgcacgatactacagatgtgactctcaatgtaccacaaaggtgatatcctgatgcatgtacgtaagcgagatcaaagcctcatgatatacatggatgcaggtacattctgcggcatactgcatctatgagtttcctgagcataaagtatcgatctccactact

SEQ ID NO: 13255 - DNA, 339 bp, Zea mays
  Clone ID: MRT4577_112082C.1
gccggcctgttcaagacgccaaactcagcaagctccatctatctgcatcaagctggctaattaactagctagctagcagcatttcagcttggcaaaagctatagctgctagtgcacacgtcgatcgatataataatcagcgatagctagctagcatcatgtccagggatccgcttgtggtgggaagcatcgtgggcgacgtcgtggactacttctcggcgtcggcgctgctccgagtgatgtacggcgggcgcgagatgacctgcgggtcggagctcaggccgtcccaagtggcgagcgagccgacggtgcacatcaccgggggcccgcgacgggaggc

SEQ ID NO: 13256 - DNA, 301 bp, Zea mays
  Clone ID: MRT4577_112083C.1
aattgttgcataaaatatttggttgaataggtggtacgttacacgtattgctgcgcattgtgacacctaacaaattatttggatacatcattagaaatcatggctatctcatcgccaagccagtctttcgaaccactcgacggagaatctatagctacaaatctaggaatgatggtactgctacacttacccacatctcaagtggaagttcaacattgcttcctccacgactgaattggtatacagggcaatggtaaccaattcagtatatcctaaaagatagattgggcttcaattttca

SEQ ID NO: 13257 - DNA, 500 bp, Zea mays
  Clone ID: MRT4577_112084C.1
gaggctggccgggattacactttcgttttctccgcgtctggagcgtagtccacccgtcgaactacgagatgctgtactctccagaagccatgatccatgagtaagaaccggaatgaattccttcacgcaaaggcatcgccacgcgtggcgcccagggtcgccgctcctagcgaggatgtcgagcatcgcgcaagtgacgacctgttaatcaccaaggactacatgacctacatggtcaagcaccacaccgcgcacggccactgtaagcactagtgacatgacactcaaggactccaagaccattgtgttccggacaagccgctcagcgtatttggcatcaggaaccctgaggaacaacaagaaagtgaggctatcgcttagtatgtcgaggagttcaacgtggtgttcactgacaaggacaacgctgctgcacatctcaagggtgccgccaagaaggttgctatctatgacacatgcaaagatgcacccatgtttgttcg

SEQ ID NO: 13258 - DNA, 744 bp, Zea mays
  Clone ID: MRT4577_112085C.1
ctcgaggccggccgggccgaaaaaaaaaatgagcctctggatcgccggcacaggcgcgatgctcgccgcctctgcctcgtccggtcagatggccggcctctgcgtcccgcgccgctcgcccactcctccgctcctcgcccgccgcggccgcggccgcggccgattgcttcctcgtcgcccggccacgctactccgccgcgacctccgccccgccgccgccgcgtctccgccgcccccgtccaccggctccgcgctagaacatcgagtacgtaaaaagtgctcacctctactggagagtgctctgctgcctggtggaagtgattcgactctgcatgaatggaaggctgttccagatatttggaggacagccgcagaaaaatatgctgacctcgtagctgtggtagatccttaccatgaaccgccaacggaatggacgtatacacagcttgagcaagaaatattggatttttctcaaggtctaagggccattggagttgctccggatgaaaagctagcactttttgctgataactcatgtcgttggctagttgcagatcaaggaatcatggcaaccggtgctatcaatgttgttaggggaacaagatcatctgatgaagaattgtttcaaatatacactcattcagaaagcattgcacttgttgtggacagtcctcaattctttaaccggcttgcagagtctttcatgtcaaggattaatacaagattcattgttcttctttgggg

SEQ ID NO: 13259 - DNA, 426 bp, Zea mays
  Clone ID: MRT4577_112086C.1
ccgggtcgacccaacgtccttcgagatcggcgcccacagcagcggggggggcagggtgatccacacactcaaccgcgtgtgggagcccgtgcccggggccgtgctcctcgccgggctcctacatactgcgccctcaacttcctcctcctgcgcctcaaggtgggcatgctgttccagctgctcttcatgttccacggggggggggggggcaacgtacgatacaacccacaattccgccccaagaagcgaggcgaggaaccaaacgaagagcctggtgaacatgctcgacctggtaccctgatctgtactctaatctgggctccaagctgtcggtcgagcaggcacagggcgacgccctgggcgggaccctggccaacgacctcgaggtgctcctgctggaccagccgaccaacgagctgaacccca

SEQ ID NO: 13260 - DNA, 841 bp, Zea mays
  Clone ID: MRT4577_112087C.1
cccacgcgtccgctcggccttcagtggccacctccggacggcggcatctgtcatgtagggcgcgacgaggcgccggcgcgcggcttcgacgtgaaccgggcgccgtcggtggcggggagcgccctggcgctggaggatgacgaggaggagccgggcgccgcggcactgtcgtcgtcgcccaacgacagcgcgggctccttcccgctggacctgggaggcccacgcgcccacgccgagggcgccgcggcgcgggccggcggcgagcggtcctcgtctcgcgccagcgatgaggacgagggcgcgtccgcgcgcaagaagctgcgcctctccaaggagcagtctgcgttcctggaggagagcttcaaggagcacagcaccctcaaccctaagcagaaggcggcgctggcgaagcagctcaacctccggccgcgacaggtagaagtctggttccagaaccgccgagccaggacgaagctgaagcagacggaggtggactgcgagtacctgaagcgctgctgcgagacgctgacggaggagaaccggcggctgcacaaggagctcgcggagctgcgcgcgctcaagacggcgccgcccttcttcatgcgcctcccggccaccaccctctccatgtgcccctcctgcgagcgcgtcgcctccggccccagccctgcctccacctcggcacctgcgtcgtccacgccgcctgccacagccgccaccaccgccatctcgtacgctgcagcagccgccgcacccgtgcgagccgaccaccggccctcgtcgttcgccgcgctgttcgcggcgacccgcagcttcccgctggcgtcccagccgcggccgc

SEQ ID NO: 13261 - DNA, 1312 bp, Zea mays
  Clone ID: MRT4577_112088C.1
agcaggggtaacaacgcagagtacttttttttttttttttttttttttttttgatcattttttctttttttggcgtatcccctcgaaaaaaaaaaaaaaatacctcgaggccggccggggttcccacacccctcaccgcgtccgcctcccctaccatctagggtttctagggttttcgaggaggaggaaatggcgtctgatagggtgctcgggactgtgaagtggttcaacggaaccaagggcttcggtttcatcacccccgacgacggtagcgaggacctattcgtccaccagtcctccatcaagtccgacggctaccgcagtcttaacgacggcgatgccgtcgaatacaccgtcggcagcggcaacgacggccgcgccaaggccctcgatgtcaccgcgcccggcggcggcccgcttgccggcggggaacgtcccgacggcggcaacggcggtgggcgaggcggatacggcggcggcgaccgcggttacggcggcggcggtgaccgcggctacgggggaggaggcgaccgtggctacggcggcggcgaccgtggttacggtggaggtggcgaccgcggctacggcggcgaccgtggctacgggggaggcggcggctatggcggtgggtacggtggaggcggcggtggaggcggccgcggctgcttcaagtgcggcgaggagggccacatggcaagggactgctcccagggcggcggctacggagggggaggcggcggcggccgcggcagcgagtgctacaactgcggccaggagggccacatctcccgcgactgccccaacaaaaggcgttaggcgcggcgccaccgtcgcgtcggatccggcggagtcccatgtcgcctctcgccgcttccctacccctccaaaggtatcgctcggctgactcttgcgtgaagtcgtcggagcaaactatctatcagtagtactagcagtgtcgtttcgttttggtctgtcgtggcgtggtagtaagaaatgcaagtgagcagcaccagtatctttccgtttgaatcagttgtaaggcagtcatggtcatggttggctctgccggatctatctgtcatgaactatctatattatatcattatcaatgttatgcaatgagtctttggcattgagttaaggtaaaaaaaaaaaaaaaaaaaaaaaaaggcaaaaaaaaaaaaaaaaaaaaagcggaggaccatgtgctggaagatggtcaacaagactaaggataagttaaccaaggggtgcctctgggggttcctccttacggcgccggccccccccatttttggagggggggccaaag

SEQ ID NO: 13262 - DNA, 248 bp, Zea mays
  unsure (1)..(248): unsure at all n locations
  Clone ID: MRT4577_112089C.1
gacacgctgttaaagaagmtccacmccaasggsccacggcgcyacmacgatgggccacctcaacgctcgactcaaagttcsctcggcctgctcgagcagcgagagctaagtcaagatcctyccttgtgtatgtatgcatccactgcatgcascccagccacctgaagagaavgacstcgttgtacaacasgcgtggccttatttgagatgaataaaargmacacnatgtagggtctttgaaagtgtgg

SEQ ID NO: 13263 - DNA, 300 bp, Zea mays
  Clone ID: MRT4577_11208C.1
caaaacgatattgaagctcaaaaaacccacgcgcgggggtcaaaactattttggagagactaaaacacttcaaaaggaaccgacccaaatgacaagactcacgagatcgcagatagcacaagctataaagacacaggcatcataaaaaggcgcaacgacaaagagcacacaaaatccaagaatgaactaaatagaaccatcattataccacggcaacgctgaaccacatggaaaccccttaaggtctgtatgacatgacaatcaacaggatccacaaaaagtcattaacactgacacaaa

SEQ ID NO: 13264 - DNA, 344 bp, Zea mays
  Clone ID: MRT4577_112090C.1
tatcgaaacagctctctagctagcgtgctcggcgtataacctggcttacaggagggcttcacagcagagcggcagcgttgacctgcttcagtggcaatagcgctctcgaattcccacaccgcgaatccgccctgaacatggacggcccgctgtgtcgaacggcgtaccccacctggtacgggccccccaacggcgctgtatacaacggtggggccagggggtaccacagtgccggcaaacaacctcccttctcgccaatgaacaccagcgggcggcaatccgtcttccaggacgggaagggctgggcgcacctactaccacggggaaggggccacagacgaagc

SEQ ID NO: 13265 - DNA, 661 bp, Zea mays
  Clone ID: MRT4577_112091C.1
cccggcacatgatacatatatttatacctaacaattttttaatacttcaatctttcagtttcgactcgtcaatttctttactttcattaggacagttgttactgatggtgcattttccaccattatgcccttcatattccatcaacgtgagataagtttcattaaaattaagcaatggtgtcgagaaaggccatttaggctctaaacagtcgcagcgatatactctttcttcatacactgactttgacgtggcgagatagtgggatatttggggccaaaattagggtgaacggttgtagacagtctcaataaatggttataagatgaaacattcaagccataaaaatcagatagcctttccttgatccttccatcctctatggtgcatttcaaatcaaataacctgatgactgctatagaaattaatctgcaacttagtgttgttttttgacaatactctgacaagatagtggtaaaaatgtccactatgtaaaaaatttgctcaaatgttctggccaccatgcactccatatccaaatgcctaagttggagtgttgaacatcccattttttttcttcatattaacatttggctttgtcgtggaaatagatttgcaaaagcaacaaactgacttggttattgaaatagaactcttttatac

SEQ ID NO: 13266 - DNA, 412 bp, Zea mays
  Clone ID: MRT4577_112092C.1
gcgggaatctccggcaagccagtggcacaggctcaaccgcgtgctctaccttgggcaccactgtatcgacgacgccccctaacctactcgtgacacggcgtagattctccgaggcgactactgcatgaggacaccacaggactatcggtaaacccggatacgttcaccaagaaccgaaagctgaaggtcatccactcctgttgggccatgctaagcgcgttgtgctgctgtgttcccggaacctgataaggactaaacggagacaagttcggcgaggtacgtgtggttaaaggaacgtgacgcacatcttcagcgagggtggtctacaactacctaggtaacccaagtctgatccacgcacacagcatactacgacatctgagcctgaccagcttgtgctcatgctcgccat

SEQ ID NO: 13267 - DNA, 230 bp, Zea mays
  Clone ID: MRT4577_112093C.1
gcactactgaccgttgtactgtcctggctctactccaccggtccaaccagcaaccagccccgacgaatttcaaggtttcccggtgcggagcgagcgggcgggacgtgccgggacggtggttgggttggattggattggatcggattggagcctaccgacggccagctcgtttacccgacatggccaagggcggtttgtgcgttcgcagcccgaggggccaggcgattggc

SEQ ID NO: 13268 - DNA, 469 bp, Zea mays
  Clone ID: MRT4577_112094C.1
aaccggaaaaattaagggttggcaggagccgggaaaaaattgaaccgaccgatttttacgggggccaaaaaaataacccccaaaaaaggtccaaccaaccaaaaataaagtttaagggggaacaccggaccaattggggaaaatttttgggagaaaatggggcagccagaaattgggggaaatttaaaaatggaaaaaaaccggttagtccaccttcttaattttgggggcagggcccccctttccggaaggggggttttttttaatggcggcagggccgcccatgtttttacccgggccctggtaaattttggaaaaaaaggggttgaaaaggttttccaactttttaattttggcctaaaaattgtccgccttggggaggtggttggggtccaaccaactgaggggcgggttaaaggggtcctcaattttttttttgtaatcgggcgggaatttggaaacaaatttt

SEQ ID NO: 13269 - DNA, 246 bp, Zea mays
  Clone ID: MRT4577_112095C.1
agaaaaaaaaaaaaaaaaaaaaaaaaaaaaaaaaaaaaaaaaaaaaaaaaaaaaaaaaaaaaaaaaaaaaaaaaatgggaggcccatcaaagggaatacaaccttccttaagcgtgaaagcaacgatctttaattcttcgtcagtggcacttaattttcagttgactggccgtggttttaccctgtccttgccggggtaaaccctgttgttacccaccttacttgccttgcatcagatcccccttt

SEQ ID NO: 13270 - DNA, 299 bp, Zea mays
  Clone ID: MRT4577_112096C.1
agcaaagttaaatctatcagtgccgtcgatccagtccaaatgacatactacatatctgacatattggacgctggacagaacggaccactttttgtggtgactgaagaaaactgtcctggcgaaattctcatacacatcttttctaccaagggctggaacatggctctgtgaaaggctcaatctggaaataaggaggctactcaataagggaagagctaacctttctacactacagcctacagggatcagttgattggccattaaatgtttggcgttgtaacaccagcaataattccacg

SEQ ID NO: 13271 - DNA, 236 bp, Zea mays
  Clone ID: MRT4577_112097C.1
ggaggactaggcatatgctgcaggcgagctcggagcgggcagcgggcctgccgtgggtgcccgggatgagcccgtgtccgccgtcggagagggcgcaagagatcgcgcggcggcgggaggagatgctggggatgctgcacgacctccccgagtccgagtacgagctctcgctcaccgacctcgtcgagaaggccgcggacgggggcgactgtggcgaaacctcgctcgcgcccatg

SEQ ID NO: 13272 - DNA, 2090 bp, Zea mays
  Clone ID: MRT4577_112098C.1
tgaacaggtattttcggactcgagtcgatatgacagtgggagaagcccaaaataatacgaaggttgatacaacgccgaagatgtgagcgggaaagcttcggcgtggtagcagaaaaggaaaccgacttaaagagttggtgcgccataaccccctgggtccctcgcgaccggccgggccaaaaagggtagcggattgggctttcccctccgcctccctcccctcacaaaaaggcggcagcacagcgccacccctcctgtcccgccgagttcggagcgcagcgcaaggcggggggaggagcaagaagccgccggcctccctcctccggctcaccaccaggcttactccgcaccgcgctgccacgggtaggagcggcgtcaaattcgggattcccaagcggcttcagcccggaggttgagccaaagctattttctaagaaaaatggcggcaatgatggtggcgatgactgcgaggagcaagaacagcatattacccatggagaagaagcagggctggtctattcagctaccagagctccggttcccttgggattcacatgaagacaagggtttctctctgagtctgcaaggatctggaccttctcatggcggcctgtttgctagcgtgggtcttaaagtgtcgacaggtgccccagcagtggcgcccggaccgggtgacaaggatattaagattccattcactgatcattgtatgaagtacgtgtctgaggcagttgggtaccaggttattagcactgaagcggagtcagtggaggaggtggtggatgctaaggcaaagaaggcagccaagaaacgtgggctgcagctgaaaattaagattgggaacccacatttgaggaggctggttagtggagctattgcaggtgctgtttccaggacttgtgtggcaccactggagacgatcaggactcacttgatggttgggagcaacggtgactccatgacagaggtgttccagtcaatcatgaacactgaggggtggactgggcttttccgtgggaatcttgtcaatgttatccgagttgcgccaagcaaagcaattgagctttttgcttttgatactgccaagaaattcttgactccaaaggctgatgagtctccaaagaccttcctacctccatcacttattgctggagcacttgcaggagtcagctcaaccctgtgcacatatcctttggagttgattaagaccagattgacgatagagaaagatgtctataacaacttcctccatgctttcgtcaagattttacgagaagaaggtccatcagagctctaccgtggtctgacaccaagtctgataggagtggtgccatatgccgcgactaattactacgcctatgacaccctaaagaagctctataggaagacgttcaagcaggaggagatcagcaacatcgcaactctcctaattggttcagccgctggtgccatctccagcactgccaccttccctcttgaggtggcccgcaagcaaatgcaggtaggagcagtaggagggaggcaggtctacaagaatgtgttccatgcgctctactgcataatggagaaggaaggggttggcggcctgtacaaggggctcggaccgagctgcatcaagttgatgcctgcagcaggcatctcgttcatgtgctacgaggcctgtaagaagatcctggtcgaagacaatgaggatagtgagtgaagctgaagcatgtatgcccctgaggaggggtatgactgatgtgccaggctagaagaggtttgggttgggttgggggagtataccctagtattatcaactgatgaaaatgtagatccaagatatttgaacgccctttagatcataatttggttcagttttgtgttgaaatccataaacaatacacttacttgatggtgcatgttgcggggggcaattttgtcatgtggccatgtctgggtctgtcgaagggctcgtaacttctgtcgctacctttgttaaaactcattttgtaacctattcgatcagtcctgaaaccagtgacgaaagcatttagattttgtgcgttccctaaaaaaaaaaaaaaaaaaaaaaaaaacccccccccccc

SEQ ID NO: 13273 - DNA, 452 bp, Zea mays
  Clone ID: MRT4577_112099C.1
cacacgcgtacgacaacacatgcgcgcactcttcctgagatgattcaatacctacagctgtaagccaagcatgagctgatgcttgacaacaggcatggcgcacggtcatgatctatttctgtacgaatggaagacgcatactgattagttccttcaggatcctattcggggcatcagagataaaatgctggtagagatcgcaacatgtgatacacagtgaggattcagacgctgatgcccattaactagacatagtgcctgctgcaaggcgccttgtacccgaattcatgatgtaccctgctggaatagtgagccctttttgaaagtgcttttaagtatgaatgccaccacgactgactagtatttgtgaatgatctttgtgtatctcacgacatacatggactttcatgttcttgcgatctaagaaagtactcataattttctagaagatt

SEQ ID NO: 13274 - DNA, 840 bp, Zea mays
  unsure (1)..(840): unsure at all n locations
  Clone ID: MRT4577_11209C.1
gatatgttcccacgccagattactttcccagctcgattccgatctggattctgttgctgagtcttgtgtgaagcccctgatcttatgcccgctccttctcccaacaactcgcgcgcactcctcccatgcggacctgcctcgtcgagtctatcttctcctcctacatcgttctgttgtgtttcagttgcgtagaagccgggcaggactcgctcgtctgggcttccttgcatagcgtggatatatatgcatgcccatgacgagaagccaagcacaaccaccacatattagtcaagatacaagagagaaggggggaactcgccgagctactggatgaagacggggggttgtcgccgggccgcctgtgcccacgcaccactgtagtcgccgtcatcgtgcctaggcagcctcgccgtccatgttttgccatggggctgtgcggcgcgccgtcatgcagagcaggaaagagacgagcgcctattcgtgcatgggattcaaagcgagtccacggttcggagctggggaattaccgtcgggccgcctgcatcgtggccagtggtctatgtcgcgtccataccgcgcgaggttacgagtcacctgaagatcatcctggtacctggaatctcaagtcccaggtcaagaacaggtaccacaggatgaggcgcatggaggatgctgcgatgtgttcgtgagaggtataggccgtcgtatcccagtcaactttgggttgctggaccgttgtctccttataatggtattacttatttattntgtataanactcctattatantagtaagatgtgacattcgacccaaaaaaaaaaaaaaaaggccctagggcc

SEQ ID NO: 13275 - DNA, 340 bp, Zea mays
  unsure (1)..(340): unsure at all n locations
  Clone ID: MRT4577_1120C.1
gtcggggtccgggcggagcanncagttcgacgacttgacgtcgccgtgcgccaggccgtgcgccgtgtgcaggtgtgccacgccgngcgcggngcacagcgcggnacgcacccgcgcgttccattccatggncgtccgcccggtgccgtgggtggggggggggcgcncnnanaggctnncnncnnnnaagtanttgaggacgggcggtttctcgtncttggagtagtagtacccgtgcaggggngctaggttggggtggcccttggngggtccggncgngggctggacgcgggcgccgagtgctgggggggcgggcggggggtgtgtggggggtgggggt

SEQ ID NO: 13276 - DNA, 616 bp, Zea mays
  unsure (1)..(616): unsure at all n locations
  Clone ID: MRT4577_112100C.1
actgtatcctaagatgcacaagcactctctccttgagcccttcattacccgcgcgccaacaggcagtctagtctcttcaccctatgtctgaggcatcacactgtccacctgcgcaaactagctgacacctgtggactactgaactgaatcggacgagaatatgaaccactatgctgatattctccaacttcaagaacttcctgtgtgagaggacgtgaccgttgtgaactgatgaatgcacctagtggatccgcgngctcgctcccactctcataggaccaatagctccttatcttgatcgaaaaaacacccgtcgcctgtacgaccagaaacagagtagtccccacttgtcagtngaagatccgaggtcatcaccaagatctgtcctggaacctgatcagctcatagtcctcatgcaagtagcttgacatcgcacctatgagcgcttcttgctactgtcggtgtgaaccagatcgcgacaagcttaggacgacggctgactatcaacgntatcttgctgaatcgattactgataggagagaggaatgaatctgctgagagtacaacgccggctattaaggatgcacgtgacattgctctgtgtgacatgtgccta

SEQ ID NO: 13277 - DNA, 2206 bp, Zea mays
  unsure (1)..(2206): unsure at all n locations
  Clone ID: MRT4577_112101C.1
cccggtcgaccccgcgtccggttccggaccccgtgagtcgctgccacgatcgaggcagggcgccaattgcggtggccaccacttccaatccactccccgcgttcgcctcgccgagctgttcttgctctgtcctctctccaactccacgatttgttccacacccggttcccgagcctccgcagcgcttcttgctgaaaaagggaactccgagttctccagctctggatcggcagagagcggtggttccttttgcggactctgagtcgggctgcaggcttagagctggaaggaataatttgactagagaaatggggcagtgttgcagcagagctacggccccggactctggacggggaggtgccaatggttatggctattctaaccaggcaaagccggcgcaagcacctccgagttacaaccctcctcagcaggcggccgaggtgaggtacacaccatcggcgacgaactcttcggcagtcccacccgtggctgtgccgccgaagccaacggcggacacgattcttggcaagcagtacgaggacgtgcgctctgtctactccctcgggaaggagcttggccggggccagttcggggtgacatacctctgcacagagattgcctctggtaggcagtacgcctgcaagtccatctccaagcgcaagctcgtcagcaaggcagacagggaggacattcgaagggagatccagatcatgcagcacctgtctgggcagccaaacattgtcgagttccggggagcatacgaggacaagagcaatgtccatgtggtgatggagctctgcgcaggtggggagctcttcgatcgcatcattgcaaaggggcactacacagaacgtgcggctgctacaatctgcagagcagttgtgaatgttgtcaacatttgccacttcatgggtgtgatgcatcgtgatctgaaacccgagaacttcttgcttgcgaccaaggaggagaatgcaatgctcaaggccactgattttgggctttctgtcttcattgaagaaggaaagatgtacagggacattgttggaagtgcttactatgttgctcctgaagtccttaggcggagctatggaaaagagatagatgtttggagtgcaggtgttattttgtacattcttctcagtggcgtgcctccattttgggctgaaactgaaaaggggatatttgatgctattctgcatgaggagattgactttgaaagtcaaccttggccatcaatttctgagagtgctaaagacttggtgagaaagatgttgacacgagatccaaagaaaagactgacttcagcccaagttcttcaacatcagtggctcagagaaggtggggaggcatctgataagcctatcgacagtgctgttctttctagaatgaagcaattcagagcaatgaataagctgaaaaagatggccctaaaggttattgcttcaaaccttaacgaggaagagatcaaggggctaaagcaaatgttcatgaacatggacacagacaatagtggcacaatcacatacgaagaactcaaagcaggattagccaaacttggatcaaagctgtcagaagctgaagtaaagcagttgatggaggctgctgatgttgatgggaatggatctattgactatgtggagttcatcactgccacaatgcatagacacaagctcgaaagggacgagcatttgttcaaggcattccagtactttgacaaagataacagcggcttcatcacaagggatgaactggaatctgctttgattgagcatgagatgggcgacacgagtacaataaaggagatcatatcagaagttgacacagataatgatgggaggattaactatgaggagttttgtgcaatgatgagaggagggatgcagcagccaatgaggctcaagtagcctgttcccttaatagaaacggtgtaccactagttactgttcactttttttcttcatgtttggtacttggtagtcggataaagcttacaatgggtgttgcttttgtattgttgagagatgattgtctatacctttttttccctttttgctcgtgcttgttgcattgtagtatcttgaacgtcccttcctttttttaagtttgtttatgcaagtacatctaatacaaagtgcattttgaaaaaaaaaaaaaaaaaaaaaaaaaaaaaaaaaaaaaaaaaaaaaaaaaatagtnctagatcgca

SEQ ID NO: 13278 - DNA, 787 bp, Zea mays
  Clone ID: MRT4577_112102C.1
caagcttgaggggcttttctcaaaacgcgccgtcgccgtttcttccccctttttctttgagaaaattcgcccgcgagatctttagtttcagaccccgtgtggattagtcgctgtcacgatcgaggcggggcgccaattgcggtggccaccacctccaatccactccccgcggtggcctcgccgagctgttcttgctccgtcctccctccaactccaagatttgtttcgcacccgattcctgagcttccgcggcgcttcttgctgaaaagaaagctccgagttcttcagttctggatcgatagagaggcggttcctttgcgggctctgagatccagtgtcgaataccgtgtcttgaatcatggccttgtgaattccaatataaacgttcctgcttggcttgctttgttttgacacaagcgttgtactccttggggttttccctccaggttcagctctcgctcttgatttgtctcatcgacgcatcagttgggctgcaggcttagagctggaaggaataatttgactagagaaatggggcagtgttgtagcagagctcccgccccggactctggacggggaggcaccaatggttatggctattctaaccaggcaaagccagcgcaaacaccttcgagttacaaccctcctcagcagccggccgaggtgaggtacacgccgccggcgacgaaccctccggtagtcccacctgtgcctgtgcctgccaccgaagcccacggcggacacgattcttggcaaacagtacgaggacgtacgctctgtctactcc

SEQ ID NO: 13279 - DNA, 2399 bp, Zea mays
  Clone ID: MRT4577_112103C.1
tgggcccacgcgtccggccacgcgtccgcgccggtcgcccggagctgacagcaaagcaaagcttgagaggcttttctcaaaaacgcgccgtcgccgtttcttccccctttttctttgagaaaattcgcccgcgagatctttagtttcagaccccgtgtggattagtcgctgtcacgatcgaggcggggcgccaattgcggtggccaccacctccaatccactccccgcggtggcctcgccgagctgttcttgctccgtcctccctccaactccaagatttgtttcgcacccgattcctgagcttccgcggcgcttcttgctgaaaagaaagctccgagttcttcagttctggatcgatagagaggcggttcctttgcgggctctgaggttcagctctcgctcttgatttgtctcatcgacgcatcagttgggctgcaggcttagagctggaaggaataatttgactagagaaatggggcagtgttgtagcagagctcccgccccggactctggacggggaggcaccaatggttatggctattctaaccaggcaaagccagcgcaaacaccttcgagttacaaccctcctcagcagccggccgaggtgaggtacacgccgccggcgacgaaccctccggtagtcccacctgtgcctgtgccgaccgaagcccacggcggacacgattcttggcaagcagtacgaggacgtgcgctctgtctactccctcgggaaggagcttggccggggccagttcggggtgacatacctctgcacagagattgcctctggtaggcagtacgcctgcaagtccatctccaagcgcaagctcatcagcaaggcagacagggaggacattcgaagggagatccagatcatgcagcacctgtctgggcagccaaacattgttgagttccggggagcatacgaggacaagagcaatgtccatgtggtgatggagctctgcgcaggtggggagctcttcgatcgcatcattgccaaggggcactacacagagcgtgcggctgctacaatctgcagagcagttgtgaatgttgtcaacatttgccacttcatgggtgtgatgcaccgtgatctgaaacccgagaacttcttgcttgcgaccaaggaggagaatgcaatgctcaaggccactgattttgggctttctgtcttcattgaagaaggaaagatgtacagggacatcgttggaagtgcttactatgttgcgcctgaagtccttaagcggagctatggaaaagagatagatgtttggagcgcaggtgttattttgtacattcttctcagtggtgtgcctccattttgggctgaaactgaaaaggggatatttgatgctattctgcatgaggagattgactttgaaagtcaaccttggccatcaatttctgagagtgctaaagacttggttagaaagatgttgacacgagatccaaagaaaagactgacttcagctcaagttcttcaacattcatggctcagagaaggtggaggtgcatctgataagcctatcgacagtgctgttctttctagaatgaagcagttcagagcaatgaataagctgaaaaagatggccctaaaggttattgcctcaaaccttaacgaggaagagatcaaggggctaaagcaaatgttcatgaacatggacacagacaatagtggcacaatcacgtatgaagaactcaaagcaggactagccaaacttggatcaaagctgtcggaagctgaagtaaagcagttgatggaggctgctgatgttgatgggaatggatccattgactatgttgagttcatcactgccacaatgcatagacacaagctcgaaagggacgagcatttgttcaaggcattccagtactttgacaaagataacagcggcttcatcacaagggatgaactggaatctgctttgattgagcatgagatgggcgacacgagtacaataaaggagatcatatcagaagttgacacagataatgatgggaggattaactatgaggagttttgtgcaatgatgagaggagggatgcagcagccaatgaggctcaagtagcctgttcccttaatagaaacggtgtaccactagttactgttcacttttttttcttcatgtttggtacttggtagtcggataaagcttacaatgggtgttgcttttgtattgttgagagatgattgtctatacctttttttccctttttgctcgtgtttgttgcattgtagtatcttgaacgtcccttcctttttttaagtttgtttatgcaagtacatccaatagaaagtgcaatttgtgtctcactctgtactagttgtgtaattggtgataggaaaaaggtctatttttaattacggaaaaaaaaaaaaaaaaaaggcccctagggcc

SEQ ID NO: 13280 - DNA, 942 bp, Zea mays
  unsure (1)..(942): unsure at all n locations
  Clone ID: MRT4577_112104C.1
attgggtacctcgaggccggccggggtgaaggagtgcccctctcgacaggctaagcttttactcaaaaacgcgctgtcgccgttgctccccctgtcaaccttttttctttgagaaaactcggcccccccgcaggatcttttgttccggaccccgtgagtcgctgccacgatcgaggcagggcgccaattgcggtggccaccacttccaatccactccccgcgttcgcctcgccgagctgttcttgctctgtcctctctccaactccacgatttgttccacacccggttcccgagcctccgcagcgcttcttgctgaaaaagggaactccgagttctccagctctggatcggcagagagcggtggttccttttgcggactctgaggtccagttcttgcttttgatttgtctcaccaacccaccagtcgggctgcaggcttagagctggaaggaataatttgactagagaaatggggcagtgttgcagcagagctacggccccggactctggacggggaggtgccaatggttatggctattctaaccaggcaaagccggcgcaagcacctccgagttacaaccctcctcagcaggcggccgaggtgaggtacacaccatcggcgacgaactcttcggcagtcccacccgtggctgtgccgccgaagccaacggcggacacgattcttggcaagcagtacgaggacgtgcgctctgtctactccctcgggaaggagcttggccggggccagttcggggtgacatacctctgcacagagattgcctctggtaggcagtacgcctgcaagtccatctccaagcgcaagctcgtcagcaaggcagacagggaggacattcgaagggagatccagatcatgcagcacctgtctgggcagncaacattgtcgagttccggggagcatacgaggacaagagcaatgtccat

SEQ ID NO: 13281 - DNA, 393 bp, Zea mays
  Clone ID: MRT4577_112105C.1
gagctcactatgtcggcggccgcccttcctttttttttttttttttgacatacagtttaatattgtttaatttggaactggatgcatcaaatcatatgggacaattatcaaaagggcccccagagaaccaccctccgctatggcctggctgaaaacagtccgacccttcctgaaggtgcggatcaggctcctgcgaggggcagctattcggaacccaaaccacgcacaggtgcaagcccagtttaagctgtcgcgcgcggtacaaagaaacacactgacttgggcacttctactggcaccacaccctctattttaccctacgatcagagaaatgctgctcgtaactcgttgagggcaaaccaccccttgcaatagaaagtggcctccactgga

SEQ ID NO: 13282 - DNA, 2451 bp, Zea mays
  Clone ID: MRT4577_112106C.1
ccggccgggagtttcagaccccgtgtggattagtcgctgtcacgatcgaggcggggcgccaattgcggtggccaccacctccaatccactccccgcggtggcctcgccgagctgttcttgctccgtcctccctccaactccaagatttgtttcgcacccgattcctgagcttccgcggcgcttcttgctgaaaagaaagctccgagttcttcagttctggatcgatagagaggcggttcctttgcgggctctgaggttggaaccttattcttctttcactatacagcgtctcttccttcctggatccgaggcatgttatgatgtggctctgtttggggattagagttgtttctttcgtcctgttgtctgaattttgcttgcagatccagtgtcgaataccgtgtcttgaatcatggccttgtgaattccaatataaacgttcctgcttggcttgctttgttttgacacaagcgttgtactccttggggttttccctccaggttcagctctcgctcttgatttgtctcatcgacgcatcagttgggctgcaggcttagagctggaaggaataatttgactagagaaatggggcagtgttgtagcagagctcccgccccggactctggacggggaggcaccaatggttatggctattctaaccaggcaaagccagcgcaaacaccttcgagttacaaccctcctcagcagccggccgaggtgaggtacacgccgccggcgacgaaccctccggtagtcccacctgtgcctgtgccaccgaagcccacggcggacacgattcttggcaaacagtacgaggacgtgcgctctgtctactccctcggaaaggagcttggccggggccagttcggggtgacatacctctgcacagaggttgcctctggtaagcagtacgcctgcaagtccatctccaagcgcaagcttaccagcaaggcagacagggaggacattcgaagagagatccagatcatgcagcatctgtctggacagccaaacattgttgagttccggggagcatacgaggacaagagcaatgtccatgtggtgatggagctctgcgcaggtggggagctcttcgatcgcatcattgccaaggggcactacacagagcgtgcagctgctacaatctgcagagcagttgtgaatgttgtcaacatttgccacttcatgggtgtgatgcaccgtgacctgaaaccggagaacttcttgcttgcgagcaaggaggagaatgcaatgctcaaggccactgattttgggctttccgtcttcatcgaagaagtggcgattcatatatctgaggaaagatgtacagggacatcgttggaagtgcttattatgttgcgcctgaagtccttaagcggagctatggaaaagagatagatgtttggagcgcaggtgttattttgtacattcttctcagtggtgtgcctccattttgggctgaaactgaaaaggggatatttgatgctattctgcatgaggagattgactttgaaagtcaaccttggccatcaatttctgagagtgctaaagacttggttagaaagatgttgacacgagatccaaagaaaagactgacttcagctcaagttcttcaacattcatggctcagagaaggtggaggtgcatctgataagcctatcgacagtgctgttctttctagaatgaagcagttcagagcaatgaataagctgaaaaagatggccctaaaggttattgcctcaaaccttaacgaggaagagatcaaggggctaaagcaaatgttcatgaacatggacacagacaatagtggcacaatcacgtatgaagaactcaaagcaggactagccaaacttggatcaaagctgtcggaagctgaagtaaagcagttgatggaggctgctgatgttgatgggaatggatccatcgactatgttgagttcatcactgccacaatgcatagacacaagctcgaaagagacgagtatttgtttaaggcattccagtacttcgataaagataacagcggtttcatcacaagagatgagctggagtctgctttgatcgagcatgagatgggtgacacgagtacaataaaggagatcatatcagaagtggacacagacaatgatgggaggattaactatgaggagttctgcgcaatgatgagaggagggatgcagcagccaatgaggctcaagtagcctgttcccttagtagaaatggtgtaccgttagttactgttcttcactctttttcccccttcgtatttggtactcttggtagccggattaagcttacaatgggcgtcgctcttttgcattgtcaagagatgattgtgtatatctttttcttttgctcgtgtttgttgcattgtagtatcctgaacgtcccttccttttgtaagtttgtttatacacaagcacatccaatagaaagtgcaatttgtgtccc

SEQ ID NO: 13283 - DNA, 448 bp, Zea mays
  unsure (1)..(448): unsure at all n locations
  Clone ID: MRT4577_112107C.1
acgcgaacgaaaacaaggagccactagagcggccgcccnnattattnnnnnnnnnaaaaaaannnnaaaggccgcccaagcggaaggaaaaaccccccacaaaccaannaaaaaaggaaccagaggacaaaaaaanncgaaaacaaaggnaggacgcaacaaaaaaaaancnnnaaaagggacaaccccaaagaaacacccnnnaaacgggacacaaccaaannncccaaacaaaagggcnnaaaccaaaccggaggaaaccgaanaaaaaaggccaaagggcaccccaaagggaccaacgggcccgaaaaagcaagggagggaaacagcancgggggacaacaacacgcnaaaaagggccaaaggaagcgaaccgaaagggggaacggcaaacaaccaanggaacangcccccccaaacaaaaggggcagaaaaaaaaccggcccca

SEQ ID NO: 13284 - DNA, 232 bp, Zea mays
  Clone ID: MRT4577_112108C.1
tttttgtttgttttttatttaatgtttgtgtggtttaaaaaaaatcttgatccacaatgattacggggcatatgaaggaaacacaaattttccaattatgtgacaccgggcttgacaactcccaattttccccaacgtgggacgggtggcaggtacaacaaacactttttgaccagcgcgggatctggatttttactccctacttgtgcccacaagtggagcattaagcaac

SEQ ID NO: 13285 - DNA, 176 bp, Zea mays
  Clone ID: MRT4577_112109C.1
cacgcgtcgtaagctgatccttaaccccatctttcaggctgcaagactgtgggtatcggggaaggggtccctcacaagttctctactacattgaactaaagagcacaaacccaatcaccacccaggacatacatacgtcagccaagcctaacaccgtacaccttcttatactatag

SEQ ID NO: 13286 - DNA, 389 bp, Zea mays
  Clone ID: MRT4577_11210C.1
tcagtgaaaatgtttgaaagagtattgtgaaatgcctgagaaaattgattattcctctgcttctagggagcaatcatcttcatttacgaaagaggagaaagttttgcatcctcaaacatctggtcaaccgtcacctcctgtgagtgctttcaattcaactgagtcacatgagcctttgagctccacatacctaccaatcacagtcagctcctacccagaagttggtgccacacaagggatgctgcaacaggtatgaactttgcattgctctaagtgaagcacaaagccacacacttcattggattattccatttgttacagttttatccgttctattttacagatattgttaaacgttccgttctattttacagatattgttaaacgtt

SEQ ID NO: 13287 - DNA, 1713 bp, Zea mays
  Clone ID: MRT4577_112110C.1
ttgggtacctcgaggccggccgggccggatcacatttaatgaaagttgtccttgtcccctcgaacgcgcactgttcaaacaaaccctccactgccctccccactctccccttcaccgcgccgcactcccaagtcccaacaggcctaaatggcggcggccggaacaattcccggcgccgccgcagccattggcgcttctgtgtcccaacgccaacgtcgcgtcggcgctccttctttcgtagctgcctacgtctccgagggcacccgcctcgtctgccggaggcagctccgtccggctccggtcctcgcttcttccttcatctccctttctcatccagcgaggcggcggttcctctgcgatgctgcggccggagcctcctcaggtcccgctggagaagccaagccccagggatttgcagagagatacccagctcttgtcacaggtttcttcttcttcttgtggtattttctgaatgtaatatttaacatcctcaacaagaagatcttcgactacttcccctatccatattttgtgtcagtgagccatctttttattggagtactatactgccttattggctggagcttcggcatcccaaagcgcgcgccaatcaactcaacacttctgaagcagcttgttccagttgcggtttgccatgccattggccatgtaacaagcactgtgtcatttgctgctgtagctgtgtcatttgcccacactattaaagctctcgagccattcttcaatgcggctgcttcccagtttatccttggacaaccagttccattgacactctggctgtctcttgttccagtggtgattggtgtctcggtagcatccctcactgaactctcatttaattggactggcttcattaatgccatgatctcaaatatttctttcacctaccgaagcatctattctaagaaggctatgactgacatggatagtaccaacttgtatgcatacatatcaataattgctctctttgtctgcatcccccctgcaattattattgaaggacctcaattagtgcagcatggttttaaagatgcaattgccaaagttggattaacaaagttgatttctaatttttttgtggtgggcttattctatcacctttataaccaggttgctacaaacacattggagcgggtagcccctttaacacatgccatcggcaatgtgttgaaacgtgttttcgtcattggcttttccatcatcgcattcggcaacaagatcaccacacagactggaattggcacttccattgctgtttctggtgttgccctctactcatttataaaggctaagattgaggagaaaaagcaaataaagagtgcataaggtgttggctgatgtggatgcggttggtttgtcgctttgatggacctctattctctcggtgaacgaacaaacttgcaagatggataaaatcttgctatctcctagtacatttgattgttattcccagtctggtactgaggtgtgcggttgttgttggctaacttgtttatttgaagcaaatttgagcaatgctcagtggcatggaatttccatttctgttttccttcgctcatttattctgacttgacatggtgctattgtaatcttaagcagtagtgtctctagaatgttttccccaaggagatttcagtaccaaatttgaacaatcctcaaactagaaattttgatttccatgcaccactgctt

SEQ ID NO: 13288 - DNA, 350 bp, Zea mays
  Clone ID: MRT4577_112111C.1
ccgcacgcaaggcaagcctggccgtcctccggtccgcccgcgtggcgtggcggcataacccgcaacgccgcttttcaaccttatgccgctctcgacgctgagcctgacctgacccctcactgtcgctcgcacactcctgccccgcggcgcggaccactctctcgcgggcgaacttgactctcgtcgatctcgatgccgccccgagcgactgtacacggcctccctcccgacggaccccaacacctaacgaagtgatattcgtctcaccgcgagggctgacacacactccggtgccgccgctgtgctctaagcgcgagagaccgccgagcgacactgtgacagtacagaca

SEQ ID NO: 13289 - DNA, 198 bp, Zea mays
  Clone ID: MRT4577_112112C.1
tttattttcttccccatcaataattcaggggagagtccccagcttaagggggagggacaccatgggcaattagaactaccccatcaccaaccctgttattggccatgtccattccttcaagtccaccacaacttgatagcttatgtacaactctggataaataaacaagcgggtgatcctaatgcccacgaactatgt

SEQ ID NO: 13290 - DNA, 305 bp, Zea mays
  unsure (1)..(305): unsure at all n locations
  Clone ID: MRT4577_112113C.1
aaaaaaaaaataaatggcccaaaacttttaaatcccaataaaaagtacctcctccaactttaactagggggtgttggggggcattgtccccttttaacttactaaaataaacaattccaacttccaaaatatataaacactttttttaactaaaccccctttaccctttaataaaacatccccccnttaattacttaataaaanccaaccccacaaaccccaacattnaaaaaccccccttccaaaacttnnntttttcctttataaacnccccctttcttnccttnnccctttccccccttaac

SEQ ID NO: 13291 - DNA, 589 bp, Zea mays
  Clone ID: MRT4577_112114C.1
acttcctccttcgactactctatatctcgctctaagcaggcacggcggtctcgagtcgatcgagctcatccaccttcatctactctgcattgttcgctttgatccgatgggcaagaaaggtgccctcacctccatcttctccaggtcctccagcctcgctagcgactcctccacggcggccgtgataccctggccgtggccatcctgccgggacccgcagaccgactccttccgtgccggcgaggagccctgcgccacggctgctgatggcagcaggtgcggccctgtcgccgcgaggcactgcaagctggtgggtggccccgccgagatgtacaagacggtcaactcggtctacatcgaccccgacgacggcgagtcattctcttgcctcagcgccgaggaggaggaaacggttgtagtggaggacgacggcttcttgacgcccactgcgtccgaggagtggtcagaggctgtgatccgcagcctcagccggacgacctcgtccaccggccgcttcttcttcgaccaggggccagcgaccaactccatcctgtctgcggcggcgggctcgacaaccgggaggacacca

SEQ ID NO: 13292 - DNA, 332 bp, Zea mays
  unsure (1)..(332): unsure at all n locations
  Clone ID: MRT4577_112115C.1
gccacaggacgacgccncctttggccncgacgccgggcggcgcgccgccgcgcacgacangcnccaggccgaggggcgccggcaccacaaggaccacaccgcgccagcagcaaagaaggaccccgacggaacaggcaccgacccgccccccgacgaaccgacacggaacccagacgaagacgagcacaagcacagccggggggcgggaccgcctttttttttttggccggcaggaccacngcaacacggcgaagggggacgcgcgaggggaaaccccccgcgccagacaacgagcgcaaggacgngaagacccgaaggagacggggggggac

SEQ ID NO: 13293 - DNA, 290 bp, Zea mays
  Clone ID: MRT4577_112116C.1
acaggggctggcgacgcactaagtaggatcttgatgcagatcagaacagggtataggagattgctgaccttctatgctgggagaagttcgcagagaaggtcgagatggcggtatggaggaaaagggtgaataccgagtctgtcgcttctaggcaagaaggatcagcttggcaggtgtatgaatcagcgaacccagatgatgtctggtacgagaagatggaggcctgttttacaccccttccagatgtgaaaggtgagaacggacgagcttggaggtgcaatcaaaccctt

SEQ ID NO: 13294 - DNA, 489 bp, Zea mays
  unsure (1)..(489): unsure at all n locations
  Clone ID: MRT4577_112117C.1
cccacgcgtccggaaaaagcttcttcctggatccagccatttggttggtttttggcttttaggggggcaaaagccaaagccaaaattcaaaccaaacacacccagtcattttggcttttctatatacaatgctttaactatgtatttagatatagtgtatatttaagtgcactataaaagatgccccctccatcccaaaataaaatgtgttttacctttttagttgatacatgcaataatgaatatatttgtcttacatatgtgtctagattcatcatcatccatttgaacatagacataaaatcaagtattaaaatgactaatattttgggattgagggagtatgtatgtagaaaagctaaacatcttataatctggaatgaagggtgtggatcctagatttctaatgtccatctttcactnggaggttccactccagaaactatggggaccgaaaaaagttgctcccaanatttgggggggaacttt

SEQ ID NO: 13295 - DNA, 391 bp, Zea mays
  Clone ID: MRT4577_112118C.1
aacttactgttgtaatttctttttcttccaaatttctttgattttcttcttatttgtatttatacgtcagcctgttttatgattgtaggtcgtgtcaggcatatgttaacaatttgagaccagcaaaattctgcctgctatgtcatgtcacatgtatttgtgttcttctataggcaatatatgagagctaagatccatagagcgacagccatggtatatcctcgtctgtctttggtaaacgtttatatgataatcaattatccagttagatgagagctaagatccatatagcgacagccatggtatatcctcttctgtctttggtaaacatttgtatcataatcagttgtccagttagatgggagttaagatccatagagtgacagcctct

SEQ ID NO: 13296 - DNA, 564 bp, Zea mays
  Clone ID: MRT4577_112119C.1
gccggccgggtcgggaaattacacctccatttctcatatgatcactcgccgccgctgttgctcgtacctctccccatcctcatagcctggatcacggcgttgaaggtggggggcaacactcctggtctctgcaacgggacgtgacggagcttgaagccgaagcttctcccatggctactcgtcaacctcggacgccgagagaggagtcccatcgagatgcgtcgctcaacgacgatatgggctcctccatcgatggagatcgctgagcaggtgctcccatacgcagagatgaaaccatgccggacctgcacttataatatgaatatggtcacgtgcgaactccaaaccaatgataaccgtgacaacagtaggcgcactgcactccgaacctgctctcctgtgaagaccattagatgaaatgagcgcgccaactgtgtccccatgaggatagacgctatcttggactaaatctgcgcgagaacattgatcctgtcaagacttgctcacatatgtactcgtatatagacaggatctatctccttcctagtactaatgtagctgatc

SEQ ID NO: 13297 - DNA, 316 bp, Zea mays
  Clone ID: MRT4577_11211C.1
ggaaaaatgggggggcaaaatttttttttcccaaaaaaaaacccaaaataagcgcaaaggttgggcattggaatttaaaacaaaaaatgaccgggtttaaaaaatccttgtaaaatttaaatttggcgggtttttaaaacagttttaaacccatagcttccacccaactttggaaggggggatgaaaaacttaaaaaagaaatgttccttgggcctttttgttcccaccaaataaaaaaggctggccccttttatttgcttccaaaaagagttgcttgcacctccgggggtggatgaaaaaaaagattttattggg

SEQ ID NO: 13298 - DNA, 162 bp, Zea mays
  Clone ID: MRT4577_112120C.1
ggcactggggattggttcattggtcaaaccttgagagccctggtgcagccatcacagtcgccacaaggtggcgatggacggcggcggggtcgatacggtcacaacggctgactggatggaaaagcaccggcagatgtacgacagggccacccgttatttgtt

SEQ ID NO: 13299 - DNA, 648 bp, Zea mays
  unsure (1)..(648): unsure at all n locations
  Clone ID: MRT4577_112121C.1
gaatcatcaattaccaattcatttgctcggaattgttcaattaattttctgcaatgaaaggaacacgtgtgaagaagggaatcacgacaaagttgagcgtttcttgggcccctgatgtatacgaccctcctattacttctgactcgcacacggtgaaagggcaccatacgagttcaactaagggtaactacaaatacaagacctccaagagcagcagtaccactagaaggaaaaaggacaagaagcattctaggcacagtagtagcaatggaggtggtagcaaaagagacaagaagcattcttaccgcagtagtgccagcagcagcagagctattaccagtggttctcaatattgtgacgcatacagtggtggtggcatcaacagcagaactgttcctgaatctgccaagatatctccattggtggtagctgaaaatgtcacaccgcaagagatggttcctgtactgaagacactggaaccaatcaaatgtactaccagctgcggcaaagagaagccatttgccttgctgtcgcgccagttttcccctgcaaggtacaaggnngatgttcaccttttggaaccaaaaccaactggcttcttgacaatttgctatgcggaagctcacctganagttccttgccaaggct

SEQ ID NO: 13300 - DNA, 330 bp, Zea mays
  Clone ID: MRT4577_112122C.1
tgagggaacaacaggcgggctgatagaagagtttaaggtgttacaatcgcagatcagactcagctcatgtctgcgacgtacaaatagagcctgctattggagtttggtcctaacaacgactctgtactatagacgcttcatataattgctaccctacttctataattaacctcacaaaatgaagtgaccacgaatatcctctgcaagtatcgaaagtgaaagcgcagccactgggctcactggaaacttcactgttagatcttacaattcgcgcagagcataatccttgtgccccaataacatactgcttcaacagttgggaccgactaa

SEQ ID NO: 13301 - DNA, 196 bp, Zea mays
  unsure (1)..(196): unsure at all n locations
  Clone ID: MRT4577_112123C.1
ccggngtcgaccccacgcgtccgcataggtgcggcgagcagaagtcgtgctccggtgacgggcttgggttggtgcggttccctctcgccgtctcgctgctgagtcctccccctgttcccttggttctaatgctcggaacgcgggtactctctgtggggcctgctgccttgtgtgctgttttttctcgtgggcctat

SEQ ID NO: 13302 - DNA, 1734 bp, Zea mays
  Clone ID: MRT4577_112124C.1
cctcgaggccggccgggagggccaagactagtagcatcttgtatcgtcatcgccgtgatcccatggcacctcttcccttcgcactccgtgcccggccgccgtcctgcccatacggctaatgccataccccatcacaacggtccgtctatcccttcccttgaaaacgtccacgcatcctccgtctccgtccccatctcgcgaagctagcgggaataacaagcaacgatacctacgacgacctacccccctttccctgctctctccttccaactcttgtttctgcaacgccagggcgcaaccatgggtcagcagcagcaagggccggcggccaggcggatggccacgctcgcctcccacctgcgccatccctccgtctctcaccctcagatggaagatgttcccctcttgaggggatccaattgccgtgcaaaaggtgcggcgccaggcttcaaagtcgcgatcttgggtgcagcaggtgggattgggcagccacttgcgctattgatgaagatgaaccctcttgtttcggtgctccatctatacgatgtcgtcaacgcacctggtgtcacagccgacatcagccacatgaacactggtgctgtggtacgtggcttcttgggccagccacagttggaaaatgccctggctggaatggatcttgtaataattcctgctggtgtccctcggaaacctgggatgacaagggatgatttgttcaacataaatgctggaatagtccgtaccctgtgtgaaggaattgcaaaatgctgccctaatgcaattgtgaatgtgatcagtaatcctgtcaactctaccgtcccaattgctgctgaagttttcaagaaagctggaacttatgaccctaagcggcttttaggtgtgaccacacttgacgtagtgagagcaaatacgtttgtgggagaggttcttggacttgaccccagagaggtaaatgttccagtcattggtgggcatgcaggaattacgatactaccactcctttcacaggtgaatccttcctgctcattcacctcggaagaggttaaatacctcacttctcgcatacagaatggtgggacagaagtagtcgaggctaaagctggagcaggatcagcaactctttcaatggcctatgcagctgccaaatttgcagatgcttgcctgagaggattgcgtggtgatgctgggataatagagtgctcttatgtggcttctcaggtcacagagttgcctttctttgcatccaaagtgcggctagggcgatgtggcattgaggagatcctaccacttggaccattaaatgagttcgagagatctggtctggagaaggcaaagaaagagctggcggagagtatccagaagggcgtctctttcatcaagtgaggccggcgacggccagcccaacatagaaatagatgtggcgtgtttctgcttcttgagaactcatcttgttatctctctgtaagactgagtgcatgacacgaataatccacgtacacggctgtactaaaaagatgatgaatctgtggtggctaaaaaaagggaaatagaaaagtctggtaataaaagttgtttctgaacaaatgggtttctgaagtcatatactggtatgcaacaactgaagaacacgatataatacggttgcatgcatgtatggtgaacgatgatgatctgcatatcttcagtcgtcattttggcttgctataccaaccaaagccatatgttgcgcgtttt

SEQ ID NO: 13303 - DNA, 338 bp, Zea mays
  unsure (1)..(338): unsure at all n locations
  Clone ID: MRT4577_112125C.1
tgtgcgtgttgtgggattattcgtcgttaatcctcgcgtcgtcagctcgacgtnagcttcgagttcgcctctagagatgttcgccggcgtcgacgcctacggctacttctgcgtcgggttcgaggacttcaagatgatgatgtgcccccagccgcaagccgaagccggcgccgtcgttcgggacaaggacaaggccgtggccaaggaggagtgataaaaaaattctagtatttgctggtgtggcaggatccaacggacatggaactgaaatctagctgtaggggacggagggatactgttaaacctctacgggttttacaaaataaaatcaaagatat

SEQ ID NO: 13304 - DNA, 134 bp, Zea mays
  unsure (1)..(134): unsure at all n locations
  Clone ID: MRT4577_112126C.1
gagcgcaccaggcggcggccgcgcgagaggaaccaagcgaacggacgcgagcaagcgacgccagggcacggcgatagaggcacctaaaagcaaaacacaggcagacgncgaacaacgacgagacagggaaaacc

SEQ ID NO: 13305 - DNA, 281 bp, Zea mays
  unsure (1)..(281): unsure at all n locations
  Clone ID: MRT4577_112127C.1
tcgcgatctagaactagtctgcatgatccagcaataatacttccatgcagctggacctggttagtcactagtaagttgtcaggaaacttagtactgccatgtgaactgatcagattggtgtattagagcacactagggttngtgtgatagcacggaagttcggactactgagtatgtgtagagtatggnattataatgccagcattaggngatcaggctnntnctggncattaggactgctgcatgatccaggaataattcttgcatgctgttggtcctgt

SEQ ID NO: 13306 - DNA, 1391 bp, Zea mays
  Clone ID: MRT4577_112128C.1
tgggaccctcgaggccggccgggccgggacatcccaaagagagaaagtagcagtatcagcgtatcatatggagctcagccccaacaacagcacggaccagagcttgctcgatgcgcagctcgagctctggcacaccaccttcgcgttcatgaagtccatggcgctcaagtccgcaatacacctccgaattgccgatgccatccacctccatggcggtgccgccagcctatcccagatactaagcaaggtccatctccacccgtccagagtttccagcctccgtcgcctgatgcgcgtgctaacaaccaccaatgtcttcggcacccagcagccggctggtggcagtgacgacgacagtgagcccgtctacactctcactccagtgtctcgcctcctcatcggctcacagtcgtcgcagctggcccagactccgttggcggccatggtgctcgatccaaccatcgtctcccccttcttcgagctcgccgcgtggttccagcacgagctcccagacccgtgcatcttcaagcacacgcacggccgaggcatatgggagttgaccaaagatgacgcgaccttcgacgccctagtcaacgacgggttggcttccgacagccagctcatcgtcgacgttgccatcaagcagagcgcagaggtcttccaggggataagctcgctcgtcgacgtcggtgggggcatcggtgcggcggcccaagccatctcaaaggcgttcccgcacgtcaagtgtagcgtgctggaccttgcccacgtcgttgcgaaggctccaactcacacggacgtgcaatttatcgctggcgacatgtttgagagcattccaccagcagacgccgtactgttgaagtcggtcttgcatgattgggaccatgacgactgcgtgaagatactgaagaattgcaaaaaggctattcctccaagagaagccggtggaaaggtgataataataaacatggtagttggagctgggccatctgacatgaagcacaaagagatgcaggccatattcgatgtctatatcatgttcatcaatggcatggaacgagacgagcaggagtggagcaagattttctccgaagctggatatagcgattacagaataataccggtcttaggtgttcgctctataatcgaggtctatccataaccatttgtgtaagatggttcatatatagtggcatggatcggagcttgtgtggtgtggacatgtaatcttaataagtgggtaccccgctgtgatgctgatctatattgtgctctctgtcaagatatctattcagtaaacgtatattctatatgcacctatatgaagccgtgtactttataaacaaatgttctatggtttgtttctcaaaaaaaaaaaaaaaaaaaaaaaa

SEQ ID NO: 13307 - DNA, 186 bp, Zea mays
  Clone ID: MRT4577_112129C.1
ggttccccacttaatcagaagagatggcctcttgggggtcgggggaaaccttaaaaaaaaggctgatagggcagaaagaatacgaaagcaaaataaaggttgataattaatcgaaacacagggtgggtcccgggagaaattagaaacacatgagaaatggccctagagggaaaaaaaagcaaggtt

SEQ ID NO: 13308 - DNA, 198 bp, Zea mays
  Clone ID: MRT4577_11212C.1
ggaacaatacttttttcttttcatttaaaatggtcattcagggcattggtcacactgacactgccacccatggtgatgcgggacacattattactcaattattgccgtttaatgacctaactagcttgctagccaggggcttttctacagcacatagttttttcagtgggggacaaccccggcagcaacgtatgggca

SEQ ID NO: 13309 - DNA, 473 bp, Zea mays
  Clone ID: MRT4577_112130C.1
caggtcgactctagagaaaaatcttgtaatatcgttgtaaaaatatttgtaatttaagaatcaaatactaattttgtaaatttgtgcataccttgtaatatatttttaccttttcatccatgttcgaactgctttgctgtggacgaaactagtattttttgagccgaaggcgaaaaacaccttcccttcttttcatacacaacgaagcatgaaactgcttctttttcttttttgccagagccttatctttatagccgaagcatctgcctgtgtctgtatgttatgatgatgatgatcctatgtatgtctaaatgaatgtttatgaatgcaaatgtatgatgtaatgtgtcgtgcaaatgaatgtccaaacacacgcatacgaagccacaaccataggctttattcccttgggaatgagcgaagtctctttgccgcttatttttcggcttcaccgcttattttttcggtgtatc

SEQ ID NO: 13310 - DNA, 188 bp, Zea mays
  Clone ID: MRT4577_112131C.1
cctcgagccggcgggatccatcaaacccagattcatctcagatcctatagagaagacgtccccgttgttgctaacactataacaacgtgcctggtatcctgcccgactaatatgacctgtgcacatgacaaactccacgcccagggcgcaagatactacggggtccctatccgtcctacgtgtccttc

SEQ ID NO: 13311 - DNA, 237 bp, Zea mays
  Clone ID: MRT4577_112132C.1
accagattgcaaatatcacttgacgttctcagagtacatgttccttctcagggttctacaacggtagaggttgttggaaccaacaatttggcttttattcactcgaatgaaccccccacccccccaaaaaaaaaaggcgtgacactaaaacgataagtaccacggtatggaaaatattttcgctggacgttaagtaggggtagcccttctggaacatgccttttttcgcctagtggt

SEQ ID NO: 13312 - DNA, 511 bp, Zea mays
  Clone ID: MRT4577_112133C.1
agcagaaacgacaaagtacacccagaagatgtactcgatcgatctacggttgccaatttgggcatcataaggggcttggttggccttataaactcatgcatgcacacaagtcaatcacactgatagcctatttgtatacacacgtgcacggggcttaatacgcagttgcggcagcgaaacgcctaaacagtttgaggttgcctctggtgacgtcatgcagacttgaccaagctctttgcttggatggcccattttgctcatcattatagccgctctaggttggcggatatcacttttccgtgtggccataggtgtgacctgcatgtcacatgttgcatgttgagcacacggagtttcagaaagagctatgcggtcgatgaggtttcctttgccctgcgcctactacaacacctccttggtgggccgttgtcggctccaggagggacttctccagtcgtgggaggagtagacttcgacccattgccactgctgatgacatggactcaaacgg

SEQ ID NO: 13313 - DNA, 465 bp, Zea mays
  Clone ID: MRT4577_112134C.1
cccacgcgtccgtaaagaactgattaagtacaaaggttttcagattgcacctgccgagctggaagggctacttctgtctcatccagaaattctggatgctgttgttatcccgttccccgatgctgaagctggtgaagttcctattgcttacgtcgtaaggtcctctgagagttctttgactgaagttgatgtccagaaatttattgaaaagcaggtcgcatactacaaaaaattgaggagggtgacctttgtggacagcgtaccaaaatctgcttcagggaagatcttgagaagagaactcatctctaaagtcagatcatccaagctatagcaagccggcttctgtgttcagaagctagaacgacttccaatttgaaaatttgtcagattgagcgtaaaggtttacatgttactgagcggagcttatcaagcaatacattcagcttgacacaatttgggggacat

SEQ ID NO: 13314 - DNA, 329 bp, Zea mays
  unsure (1)..(329): unsure at all n locations
  Clone ID: MRT4577_112135C.1
ggaattccaggcacgccccactccatatcctatgcacgacttatataaagacttcattcttacccagcgcctcatacagtgtagtgtctggatcaatggtaaaacccttacattcacaaaaatcactataagtgcctatcacccgcgaaatgcattgtttacaccaattctcaaccgtcgtacttcttgcncctatcacgattttgtaccatttacactatatgctctctcatatgcttcctctccactgacacatactcactactaatattttccctcttctcgcatgatactgtaacaatcatgaagccctgttatataaatcctca

SEQ ID NO: 13315 - DNA, 598 bp, Zea mays
  Clone ID: MRT4577_112136C.1
ccgacacaggcctctccctcaacgacctcctcttccgccgcgccgacgtgtgcccctccgctctcgcgctggtcgactccgccaccggccagtgccgccgcctccaagcctcagggagccagcgtgacgctttactcagacctcgtttccggggcgcgggagacggagtaccgccgcccgccgacgaagcagagcgacacgaccgcgctgatgtactcgtccggcacgacgggggcgagcaagggcgtaatcctgacacaccgcaacttcatctcggcggcggccatgatgacagcggaccaggacgcgctcggagaggggcccaacgtcttcctctgcttcctgcccatgttccacatcttcggcttgtccgtcatcacgttcgcgcagatgcagcgtggcaattccgtcgtcgtgatgtcgcggtttgacatggactctgtgatggccgcggtgcagcggcaccgtgtcactcacctcttctgcgtgccgccggtcatgatagcgctcgccaagctcgggagcgttgggaaatatgacctcagctcgctcaggttcatcggctctggcgcagcaccgctcggcaaggacgtgatgg

SEQ ID NO: 13316 - DNA, 2738 bp, Zea mays
  Clone ID: MRT4577_112137C.1
ccggccgggacacggtgcactgaagaagttggaaagttttgtgtgacaagtaaatttgagggaggaaagtctttagatgcgaggcacgaagaatatggggaaagaagagggaagtgttggagagcttaaaaagtatttttttactaaaagcgtttttttgggttattagaatgttttcttggagatgctcggtaggatgggagggagagtgcgagacagagcggattacgcacctccacggctccccagtccccacgcaggccgctctgttctgccagcagttggcacaagcagcttgggcgcaaaagaacaactgcgatcgagcaagggacaatggcccgcaccgcggcgccggccgcgggctacggagaggacggagtgtaccgctccccgcgcccggccgtgcgcatcgagtccgacacaggcctctccctcaacgacctcctcttccgccgcgccgacgtgtgcccctccgctctcgcgctggtcgactccgccaccggccaatccctcaccttcgccgcctttcgctccgccgtcctcaccacggccgtcgccctctcctcgcgcgcgggcgtccggcgcggcgacgtcgtcctcttcttcgcccccaactgcttcctctaccccgtctgcttcttcgccgtcaccgccctcggcgccgtcgctaccacggccaaccccctctacacccctcgggaggtcgctaaacaggccaccgactcgcgggccaagctcgcaatcacggtctctgaactccttcccaaaatcgtggacctcggcttccccaccatcctgctcgacggcggcggcgacggcgacgcggccagtgccgccgcctccaagcctcagggagccagcgtgacgctttactcagacctcgtttccggggcgcgggagacggagtaccgccgcccgccgacgaagcagagcgacacgaccgcgctgatgtactcgtccggcacgacgggggcgagcaagggcgtaatcctgacacaccgcaacttcatctcggcggcggccatgatgacagcggaccaggacgcgctcggagaggggcccaacgtcttcctctgcttcctgcccatgttccacatcttcggcttgtccgtcatcacgttcgcgcagatgcagcgtggcaattccgtcgtcgtgatgtcgcggtttgacatggactctgtgatggccgcggtgcagcggcaccgtgtcactcacctcttctgcgtgccgccggtcatgatagcgctcgccaagctcgggagcgttgggaaatatgacctcagctcgctcaggttcatcggctctggcgcagcaccgctcggcaaggacgtgatggagggagtggccaagaattttccagaagctgtgattgcccagggttacggaatgactgaaacttgtgggatcatatctttagagtacccagaaaaaggacaaattcgtcaatttggttcaactggagcacttgtctcaggagttgaagcaaaaattgttgatgtagaaacattgatatgtctgccaccaaatcaactaggagaaatttgtgttcgaggaccgaacataatgcaagggtatttcaacaatgtgcaagctactgaatttacaatcaagcaagggtggttgcatactggtgatattggatactttgatgagggaggtcagcttttcgtagttgatagacttaaagaactgattaagtacaaaggttttcaggtaagattctcatttttttgtaaacaaatgtttagtttctgcaaacttttatttataattatgtaggtggtgaaaattagtaatctgaacagtgcttactgaaaggagactttgtccagcctcatttgggtcctttctgcagctaacgtttgcagttctactaagcatttatattcatacaaaatattattcagtagattgatattctttgcttactattcgatctaactatcataaaatggattatccttcacatatgttattttaccttttgaatcttatatcatgtgttttttttctttagtcgaatttcatatttttcttcggcagattgcacctgccgagcttgaagggctacttctgtctcatccagaaattctggatgctgttgttatcccgttccccgatgctgaagctggtgaagttcctattgcttacgtcgtaaggtcctctgagagttctttgactgaagttgatgtccagaaatttattgaaaagcaggtcgcatactacaaaaaattgaggagggtgacctttgtggacagcgtaccaaaatctgcttcagggaagatcttgagaagagaactcatctctaaagtcagatcatccaagctatagcaagccggcttctgtgttcgtaatactgcttgcctcctatctactcccctcagtctaaattataagtcatagatcatagatgtatatcatatctaaatacatcgtatgcagagaagctagaacgacttccaatttgaaaatttgtcagattgagcgtaaaggtttacatgttactgagcggagcttatcaagcaatacattcagcttgacacagtttgtgggacatgtatacatggtggtgtcggatgacttgtatcgaatattgggcctgatttacattcactattcgaaaatagtacagatatgtaatatggctctgctgcgtgtacatcttacagacagttgtacgaagaaatattgtccgacagtttgtgcaaccagcgcattatctgtgggactgttatagc

SEQ ID NO: 13317 - DNA, 395 bp, Zea mays
  Clone ID: MRT4577_112138C.1
aaaaaaaaaccgcccctaggattgggattaaaacaattggggggacaatacgggccccgattggttctcatttttagcccctcccaaaaacaggtaggggggcccgaaaaaaaaacccttggtttttttaatggggaaaacccccgggggggggcccccagataagatccccggaaacaaggggtcccccatttgtttttggggggaacccccccccccttgggaccccaccgccgggagggtataccccccaaaacgcttttgggccgttttttcagccccaaggggttgggccccaattaaccccatccccaagggccacacaaaccacctttttccccggttttttggggggggggatcagcacacgggaccaccgtccgagcacagggggg

SEQ ID NO: 13318 - DNA, 374 bp, Zea mays
  Clone ID: MRT4577_112139C.1
accggtccggattcccggctcgacccttgcgacccaccttacaaggtggaatccagtatcatccatagagcaacaatggctaccaaaatattgtccctccttatgctccttgctctctctgcatgtgctgctaacgcgacaattttccctcaatgctcacaagctcctataactatccttcttaccccataccttacatcaacgatagcttcagtatgtgaaaacccatctcttcaaccctataggctacaacaagcaatcgcagcaagcaacataccttgatcacccttgtttcaacaatcgccagccctatctttggcgcaatcattggtacacaccatcaaggctcagcatctgcaacaacttgtgctacc

SEQ ID NO: 13319 - DNA, 243 bp, Zea mays
  Clone ID: MRT4577_11213C.1
ggacgcgttgattgtggtgacccagtgcttttctttatactcataactatcataccatgtgattggttctgacgtcatagttgtatgtgaattcttaaacctactacttgattgaaggaatattgtaagtttgattgtattattcacctccacgcaaacatgttatatatcaaagacaacaaacaaatcaacatctacaaaaatgacagacacctttcttctcttttcctactaaagccctaa

SEQ ID NO: 13320 - DNA, 408 bp, Zea mays
  Clone ID: MRT4577_112140C.1
gacacggctactggtgcggtgaacagcgctgatactcccatcactggtcgacggaggtggtcccgccgccgccagcagccgcgtgcccgctcaacgatgcgggcctggtgcctatcatcgagcaatccggtcttaggacttttgacacgagctcgaggctggatcgacgtcttgtcgaccccagccgggtcatgaagggacattaggtgacgctcagacgggcatgtagtattcttcacgcccacaaggatgactacattgcacggagaattctatgcctaagcgggggccattcccacaggaattgcaaccgaatggtgagacacttgcttattgattgccagattttcggcattttggatttgaagaaggaggacctaggccaagcatagtcgggatatacgggat

SEQ ID NO: 13321 - DNA, 199 bp, Zea mays
  Clone ID: MRT4577_112141C.1
ggcccttcgacaacctgctgcagcacctgtctgacccatggtacaacaccatcatccagaccttcttgggttgagtcgaggtcgaggaggattaccattcatcgctggtgagctgatgtggactgtaagacaaacattgaaacctgaagttactttgtggttcaagtacgccgaggtgatctatctggtgggtactgat

SEQ ID NO: 13322 - DNA, 604 bp, Zea mays
  Clone ID: MRT4577_112142C.1
ggccgggccggggaccattcctcgagcacgctaccgcgctcttgactgccctcgctcgcgccttctagaccccgtggggctggtcgccgcccagcgtgtgcacgtgcataatgctcgcggggagctcccatgtcaaaacacgtctgcggctcatcctacgactccaactcctcctacccggtcgcaggctacgacggcttcgcccgcgcccggcactgcagtcgccgtcgaggacgggttgcttgctctggacacatgggatcctgatggctactgcgggagagggaaccatgaagctacatgcgaccgaaggagcagacagtcgtatgctaatgtaaggcggcgcttctataaaaacggaagtgaatctgcacgagtgctgtgcaccacctgctcctcaaggaaggctcacatatacggaggatatcacttttcaaccgatgtggaccaggacatccggaaatggggtgaacaagcgcgggctggctttaaattaggcctgagcatgatgggcctagaatgggcccatcccgaacctacatacgtcagctaatgatgtcctcgccgatcgcaatgccttccagtgtattgtccctaatgctct

SEQ ID NO: 13323 - DNA, 2490 bp, Zea mays
  Clone ID: MRT4577_112143C.1
atggcttcattcaacaaccaagctgaagcatcttcggctacgaagccggtgtttccgataacaggcgactcaagttcagagccggttaacaagaagcagaagaaggaagcacagagaagggtgcaacatgttggggtacagggacccttcataaagtcaaaatggtcccacatcccaatcaccttctcccaggaggaccttcagctcaaatattaccctcataatgatgctatggtcatatcttgtgtcattaagggatttctagtccacaatgttctggttgatataggcagtgcagcggatatcatatttgctaaggcctttagacagatgcaagagccagaagataagattcatgatgctacacatcctctatgtggcttcggaggaaggaatattgtagcactcggcaaaatcacaatgccagttgtctttgacattgctgacatggagtatccctataatgcaatcattggtcatgggacgctcaatgctttcgaagcaatacttcatctagcatatctatgcatgaagataccttcggaacaagggccaattgctgttcatgggagtcaagaagctgccaggaaggccgaaggaaactggacagattcaaaggcaatccataacatagatggagccaaagcctgtgagcagtatcgatacaaaagagagaaggttgcttcggcggatcagccgaagccaatgcttctatgtgaagatatagcagaacaaaaggtactgctggggtcccagttatctgaagagcaggaaaagaatttgctaagatttctatttaataacaaagatgtctttgcttggtcagccaatgatctttgcggtgtcaacagagatgtcattgagcattcactcaatgtggatccatctttcaggccaagaaagcaaaggcttcggaaaatgtttgatgacaaagttgaaggtgctcggaacgaagtgaagaggcttcttagtgctggagttatcagagaagtcaaatacccagagtggctagctaatactgtcatggtgaagaaggccaatggtaaatggagaatgtgcattgattttacagatcttaacaaggcttgtccaaaggatgagttcccactgccaagaatagattctctagtagatgcagcagcttcgtcagagctcatgagtctactagattgttactcaggctaccaccaaatttggatgaagaaggaagatgagccgaagactagcttcataacccccagtggcacatattgctatcttcggaggcttgaggggcttaaaaatgctggaggaagcttcagcagaatgacagccagagtccttcattctcaaataggcaggaatgtgctgacttatgttgatgatatcatagttaaaagcacgaagcaagaaaatcacattgctgatttgcaagagacatttgccaacttcaggcaagctggtttgaagttaaatccagaaaaatatgtttttggggtaatgaagggcaagttccttggctgtctagtatcaacgaagggaattgaagctaacccaagcaagattaaagctatcctttgtatggaactgccaagcacaaagaaaggagctcaacgtctggcagcttcacattctgcagtaagtgcggcacttgtacaggagaagctagatggccaagtcaaaaagcaagctccagtatacttcgtctctgaagttttgagtccgtcaaagaaaaattacacagaattggaaaaggtgctatatgctgtgctaatggcgtccagaaagcttcaacattattttcaagcctatcacataattattccttcgtcacagccactgaaggacattatgaggaatagagaagctactggaaggattgggaaatgggctgcagaacttaatgaattcaccattgactatgtgcatagatcctcaattcagtcccaagcattagcagacttcatcactgattggacgccaggggctcacgaagaagaggtaaacaaagatgccgaagcttggatagtgttctgtgatggttcctggggaaccttcggtgcaggagcggctgcgatcctagtggcaccttcaaaagtcaaaacatgttatgcagccaagcttgatttcagttgcacaaataatattgctgaatacgaagcacttctgtttgggcttcggaagttaagggcaatgggaacaagaagggccatcctgaaaactgattctcaagttatttctggccatgtggacaaaagtagcaaggcaagagatccgaagcttgaaagatatctggatacagttcaaaggttggaggcttctttcgaaggtttttctgtcaagaatattccaagaggtgaaaatgagcatgcagatttgctagccaaatcaatggcccaggggcttcctctaccttcggaagtgttttttgaaacaataaaggcaccttcggtcgaactcatggagagagcagtgcttactatttctccagtacatagattggaggactga

SEQ ID NO: 13324 - DNA, 359 bp, Zea mays
  Clone ID: MRT4577_112144C.1
aaaaggggaacaaaactttttttttttcatttaaatggggcattcaggggattggtcacccgggccctgccccccagggggaggcgggacacatttttaccaaatcatcgccggaaaaagacccaactaggtggctggcccgggggtttaccacaacaaaaattttcttcagggggggaccccccccgcaccaccgtaggggcatggaatcggttgttgaaggcccaacatccccgaaagggggggcgcttttggcccccccaaaacccccggaaccgggcccttttggggttgctgttccaggatggactgggggaccaacccgaaaatcgcctggggcccgggggctgggggccccc

SEQ ID NO: 13325 - DNA, 290 bp, Zea mays
  Clone ID: MRT4577_112145C.1
aattacttttcttttgtttattttttttttggtggtggtttttttgttcatttttttttatggtctttttcctagagaaacaacggccccgaagggtctttttttttttagccggacggacacgattttattagggggggccagcagcataggggggcagacaaaaatcatggggaggggaaacgccccatcaccgggggaaaacaaaatttaagggtaaggaggagagggagtaaagcctccaaacagcacgcccaaaaagggggagggctcaagccagtcaacaaggg

SEQ ID NO: 13326 - DNA, 2622 bp, Zea mays
  Clone ID: MRT4577_112146C.1
atggcttcattcagcaaccaagccgaagcatcttcggctacgaagctggtgcttccgataacatgcggctcaggttcagagccggctaacaagaagcagaagaaggaagcacagagaagggtgcatcatgttgggttgcagggacccttcgtcaagtcaaaatggtctcacatcccaatcaccttctcccaggaggaccttcagctcaaaaattacccacataatgatgctatggtcatatcttgtgtcattaagggatttctggtccataatgttctggttgatacaggcagtgcaacgaatatcatatttgctaaggccttcagaaagatgcaagagcaagaagataagattcatgatgctacacatcccttatgtggcttcggaggaaggaaaattgtagcacttggcaaaatcacaatgccagtaaccttcggctttgttcacaatacaaggactgagcaggttgtgtttgacattgttgacatggagtacccctacaatgcaatcattggtcgtgggacacttaatgcttttgaagcaatacttcatccagcatatctatgcatgaagataccttcggaacaagggcccattgatgttcatggcaatcaagaagctgccaggaaggccgaaggaaactggacagattcaaaggcaatccataacatagatggagctgaagcctatgagcagtatcgatacaaaagagagaaggctacttcggtgaaccagccaaagcctatgcttttatgtgaagatatagcagaacaaagtgtcaacagagatgtcattgagcattcactcaatgtggatccatcctttaggccaagaaagcaaaggcttcggaaaatgtctgatgacaaagctaaaggtgctcgaaacaaagtgaagaggcttcttagcactggagttatcagagaggtcaaatacccagagtggctagccaatactgttatggtgaagaaggccaatggtaaatggagaatgtgcattgattttacagatcttaacaaggcttgtccaaaggatgagttcccattgccaagaatagattctctagtagatgcagcagcttcatcagaactcatgagtctactagattgttactcaagttaccaccaaatttggatgaagaaggaagatgagccgaagaccagcttcataacccccagtggcacatattgctatcttcggatgcctgaggggcttaaaaatgctggaggaggcttcagcagaatgacagctagagtccttcattctcaaataggcaggaatgtgttgacttatgttgataatatcatagccaaaagcacgaagcaagaaaaccacattgctgatttgcaagagacatttgccaacttcaggcaagctggtttgaagttaaatctagaaaattgtgtttttggggtaaagaagggcaagttccttggttgtctagtatcaacgaagggaattgaagctaatccaagcaagattgaagctatccttcgtatggaaccgccaggcacaaagaaaggagctcaacgactggcaggtagattagcatcattgaacagatttatatccagatcagcagaaagaaatctgcctttcttcgagatactaaactcagccgatgtcttccaatggggtccggctcagaaaaaggccttcgaagagctgaagcaatatttgattgatttaacaacgttaactccacctttgtcaggggctccattgctcttgtatgttgcagcttcacattctgcagtaagtgcggcacttgtacaggagaagctagatggccaagtcaaaaagcaagctccagtgtacttcatctccgaagttttgagtccatcaaagaaaaattacacagaattggaaaaggtgctatatgctgtgttaatggcttccagaaagcttcggcattactttcaagcatatcacataattattccttcgtcacagcctctgaagaatattatgaggaacagagaagctactggaaggattgggaagtgggctgcagaactcaatgaattcaccattgactatgtgcatagatcctcaatccagtcccaagcgttaacaaacttcatcgctgattggacgccagggctcacgaagaagaaacatccagagtcaaatggacttgttgaaagagcaatgcccagaggaaagtggccagatgagttgattaaagtagtgtggagccacaatacgaccgtatcaagatcaacaggctttatgccattcaagttattatttggtgacgaagctataaccccagaagaagctaaagcggggtcaataagaacaacagcttcggcagaagacgaagctgattatcacgtggcaaaagacactatagaagggactagacttcaggctgtggaaaatatcaataaatatcaagccgaaacaataaaatggcgcgacagaaaagtccggctaaaaaatatcaagccatggcatttcgtgcttcgaagagtggctaatccggacacagtaggcaaactacagctgaagtgggaagaaccttttctggtggtatcttcgtcaaggcctggttcttacagattgaaggatatggacggcaacgacattcctagatcttggaatgcggatgagcttcgatga

SEQ ID NO: 13327 - DNA, 273 bp, Zea mays
  Clone ID: MRT4577_112147C.1
agacacatataagaaacgggttcttttataatttattggtggccgtttgttctctaacttatttaataatctagaggagggtaaacaatactagggggaaaagtctatttttatcaaaacactaccgcctgaaaatggtccccgttaaaccataaaaatcagatacattcaaggggcgctatgcagcaacagggggcaagccgttttgtttatgaagtgaaacaagccaaggctcccgtcctcgcaatgaaacgaacacctgaagtggggact

SEQ ID NO: 13328 - DNA, 220 bp, Zea mays
  Clone ID: MRT4577_112148C.1
cggacgcgtgggcggacttttgggcccggatcacttttgcacgcaacctcatctcgtcctccagatctattatgggcgtccggcttgacaccttgcctccccgagtgctcatcatgagctactttgtttctatttatcatgaaatccgtttgcttcatgttgtgcattcttatatttgattgctagattcttcataccctctttggatcctgtattgtgt

SEQ ID NO: 13329 - DNA, 119 bp, Zea mays
  Clone ID: MRT4577_112149C.1
cggtcccaccagcgctgcaagaggtgattctctgtagtcctctctcgattttagtttttttcattcaccatgagcttactgaacctagtcactatttctgaatggcagccattactata

SEQ ID NO: 13330 - DNA, 520 bp, Zea mays
  Clone ID: MRT4577_11214C.1
cattggtacctcgagccggcgggatctcagctccataataagcgctactactcagcacctccgcggtcaacctttcccccttctgcacttccttccgtcggccgccgctcccccctgaccacgacaccatgaggaagtgcatttcgacccacatcatgcacatctgtatccacttatgaaacgagatgctgcaagctgaactgccttgaccatagccttctggctgacctccagatgcgccagcgacagagactcattgtcccaggggaatggatgactctcaataccttctatcagctacagtggagatgggaagcacgagctctcctggatgatttcgtggacgcttgaacccactgtcttctatgacgaaaacatagtggcagctaccagtcaagtgctgtccaccctgattattctcaaccaggaaaggaggatgacagccaacaactttagtcacgagcgcactacagccattgttagagcgtagattcgaagcacctgagtcttgatcacatca

SEQ ID NO: 13331 - DNA, 2071 bp, Zea mays
  unsure (1)..(2071): unsure at all n locations
  Clone ID: MRT4577_112150C.1
ggccgggtcagcccgctccctctccaaagcggcagcctcacgcagtcacgcgctccaccacgccacctccctccacccctcactatatactcactcctgctgttttccgtccatccgcccaccggttcgcagcccgcgcctcaaaaccctagccccgggcggatcgcggggcgcctccgcggtgccagcgacgcggctcgtttgatccgattgttggtcgagccccgccctcgctgccgcgcttcgctccggctgtgcagcggcgtgagcaccgagcacactcgcgaatggggaactgctggggtgcgcggatcaaggatgggagccctcaccctggcgcctcaggaatgttctcaaagagtagtggtaaggatgggagtaggcttagcggctgtagtagtcgagcctcttcagcttctatgccaccaagtgcgaagactgaatgtgaaatcctgcgatcagccaatgttaagatcttcaccttcaataatctcaaggcagccacaaggaatttccgtcctgatagtgttctaggtgaaggagggtttggatctgtctataaaggatggatcgatgagaacacattatcaccttgcaggcctggcactgggattgctgttgctgtgaaaagactcaaccatgagggtttgcaagggcaccgagagtggttggcggaagttaattacctaggtcagttctgtcatcccaaccttgtcaagctgattggatactgcttagaggatgagcaccgactgctagtatacgagttcatgccccgtgggaacatggaaaaccatctgtttaggagaggctcatacttccaacctctgtcatggaaccttagaatgaaggttgcactgggagcagcaaaaggactagcttaccttcatagtgcagaggcaaaagttatttaccgagattttaagacttcgaacattctccttgacacagattattctgcgaagctttctgattttggattggctaaggatggtcctgtcggtgagaagagccatgtgtccacaagagttatgggaacatatggttatgcagctcctgagtatctttcaacaggtcacctaactgcaaagagcgacatctatagctttggggtagtgcttctggagatgctgtcaggccgccgcgccatcgacaagaaccgcccccagggtgagcacaatctcgtggagtgggctcggccttacctcacacataagcgcaagatattccggatcctggatacgaggctggaaggtcaatacaatctgaacggtgcacaaacaattgctgcccttgctctcgaatgcctatcctacgaagctaagatgaggccgactatggacgctgtggttgctattctagaagagctccagggctctggtgaagccgagaagaagcttcaagaacccaaggccggaaccaaacaggcacctgctgctgtgagtgctagcatgagcagcagccgcaagcctcgccggaaaagtctgggagacacaaaggagactgttggtggtccagatcccaaaccattggcccattctcgttagcaaggaaaagcattgcctggtcaagtcgttagctagactgtagctcgcttgtgaatatgctatggtctgtgtatgtatgttcagagggtaatcgggcttttggcaacagtcttttcgtctttatcatgagctgctcggttcagcctgactggaacctgtatgccgaaacccatggcatcagagagagggggagagagctcatgttccgagtctttaacttaaaaaaaaaaaaaaaaaaaacctcgtgcgcgggacaaggttaggaataaggaagggattatanaattaaggaatcagataaaaaaatgacaaggaggtagacaagatccaaacattattgttaatgaccaagagtgaaataagataaccactaactggtgaagcgaggataaattatacaaccaaggatatgagaaagttttttttaaggatacaaaatatataaaggcgttatcaaggagagtagagagacaagggttcgatatattgaggtaaatattgtccaaagatgacaatacaatggc

SEQ ID NO: 13332 - DNA, 908 bp, Zea mays
  unsure (1)..(908): unsure at all n locations
  Clone ID: MRT4577_112151C.1
attgggacctcgagccggccgggaggcacacaccacaaccataaccacgaactacctgaacggctgaacaattcccttcgtcccatcttcttcctctcgtctcttccaccccccgacccgaccgggcggcctcctccccgaaccctagcccccctacaaccaccgcgtcctgcctcctctgggcggctccgccccagatccagcacagcaggttaaaaagggggcgggcaggcgttggatggacgggccgaagcggtcgcagctgcgggtgcgcctccgcgtcacggcgcgccggcgtggtgccgatggcgacggcgccgggggcgctgccgggcatggggggcgtaagcgccggatggaggcccccgtccgcaactccgtcgccaagctgcagcgccgcgagatcgggggccgccagctcgccgcgcgcggcggcggccccgccgccgccgtgcccgagcgcttccggaacatgcagctccaggaggagttcgatacatatgatgaaaatgctcacctatttgtgaagctgcagtttcttaaaagaagatccaaaattattgagattgttgcagcaaaggatatcgtatttgcccttgctaattctgggctttgtgctgcttttgaccgagtaacaaacaagcgcatagccttcttgaatttgagcccagatgaagtgattcggagcttgttttacaacaagaacaatgattctcttattactgtttcagtttatgcggctgacaaattcagcacattgaagtgcagaacaaccccgattgagtatattanaaggaatcagttagatgcagggtttcctctatttgaatcagagtctctgaaatggcctggnatttgtggagtttgatgatgtgaatggaaaagtactcacatattcagcgcaggat

SEQ ID NO: 13333 - DNA, 342 bp, Zea mays
  Clone ID: MRT4577_112152C.1
gcggatggttgtgttttttcttgattattttttagggaatgcacaattgccgttggctgcggaaaacaagcataccgtcttattcggtctgtcgctgggggccattggctagccataagcaggtaaaatggggccttatagaactctaaggcctggggggtgacaacatgtaggaaacaagcattgtaattggacatagcaaccctaccacagggggtgtgctctattacaattaactaaggtcttgatggggtccacctccaatgatagatgcacggcaccaacggaagagagttacccctggggtccctgggggccacccttactttacggacccatgcc

SEQ ID NO: 13334 - DNA, 1063 bp, Zea mays
  Clone ID: MRT4577_112153C.1
aattcggcacgaggcacagcttcgcagcccgcgcccctaaaaccctagccccggcggatcacggggcgcctctggtgccagcgacgcggctcgtttgatccgattggttggtcgggccccgccctcgctgccgcgcttcgctccggcggtgtggcggggagagcaccgagcacgcgggaatggggaactgctggggcgcgcggatcaaggacgggagcgctggcgcctcaggaatgttctcaaagagtggtggtaaggatgggagtaggcttagcggctgtagtagtcgagcctcttcagcttccatgcctccaagtgtgaagactgaatgtgaaatcctgcaatccgccaatgttaagatcttcaccttcaataatctcaaggcagccacaaggaatttccgtcctgatagtgttctaggtgaaggagggttcggctctgtctataaaggatgggtcgatgagaacacattatcaccttgcaggcctggcactggaattgctgttgctgtgaaaagactaaatcatgagggtttgcaagggcaccgagagtggtgggcggaagttaattacctaggtcagttctgtcatcccaaccttgtcaagctgattggatactgcttagaggatgagcaccgactgctagtgtacgagttcatgcccccgcgggagcttggaaaatcatcaccatctgtttagaagaggcttcgagcctctgtcatggaaccttagaatgaaggttttactgggagcagcaaaaggactagcttaccttcatagtgcagaggcccaagttatttaccgagattttaagacttccaacatcctccttgacagagattatactgcgaagctttctgattttggattggctaaggatggtcctgtcagtgagaagagccatgtgtccacaagagttatgggaacattaggttatgcagctcctgaatatattgcaacaggtcacctaactgcaaagagcgacatctatagctttggagtagtgcttctggagatgctgtcaggcctccgtgtcatcgacaagaaccgcccccaggatcagt

SEQ ID NO: 13335 - DNA, 174 bp, Zea mays
  Clone ID: MRT4577_112154C.1
catatactacggcggaacgggacggttgtttgccgcggccgtcggtccttgaaaaggtgggggcttttttggtcaatgggatcggttcccttggcattggtcttggagtccatgcttcccttaatggcaacccgccaagggggaaaaaacccacctaaccctttgggaaaattg

SEQ ID NO: 13336 - DNA, 373 bp, Zea mays
  Clone ID: MRT4577_112155C.1
ctgcatccccgtccgcgaggcgtacacgaactacactcgtccatgcgtcgaatggcggcgacgaggagcctgcttctgagggacccccgcttggctgaggccccgttagcggggatcgccacgtccatcggggccatgcctgaggtcctgaggcggcaatcgtggatgacttcataagaaggcaagggctctttcccggagaagagcgaggtcacttaacgcatctttaaggaccgcaagaaggttcccgaagatcgatgacccctcccaggtgagaccataaggccatttctagaaggaccccggtctagtaaagcttgatgcaaagaatggtgtctttgcccttgcagaggaattcccattcgagatacct

SEQ ID NO: 13337 - DNA, 251 bp, Zea mays
  Clone ID: MRT4577_112156C.1
agctgggacaaacgcaaacggtgagggtttgattaacggcagatgtgctcacaaaacgaaccaaagcaggggggacaaatggatcgcaagataccgcaacggtgatagcggggccaatagacgcagaagaaaaactgtgcgttttgtctggtggacctgagctcatgggttgacacactctactcaaggcgccatagatggtgagctacatacagtggcggacctgatgaaacccattggcactaacacat

SEQ ID NO: 13338 - DNA, 509 bp, Zea mays
  Clone ID: MRT4577_112157C.1
gattatgcagggtgagtaccgcacgatgatttgtagatcaccgcgagaacgattgctttctctattgactgaacctcattccgacgccgacggccgtctgtggagacgccggggcttccgcagacaacaacatcccgagtgaaagaggagagaattgcatacctcaatcagtgggcgagattccggcgctcaggagactactggattcagcacagcctactcggtgcgccctggaagccacgggcacgacctcatcctctgggccgccgactacaatatggacgtcgagagagcgcgcaagggatgtccccaaaggataccgacgacgattgcgtgaaaggttggatggagacgaaatcgagatcattgtcctcactgcaataaatgatcaagtggatgctgttaggcctgcaactgctgtacgacatgtaagatacgccatgatcaagatgtgccctgctaccatgcggtttgcactaggacaagtgaaacaattgatgaagctgatg

SEQ ID NO: 13339 - DNA, 2863 bp, Zea mays
  Clone ID: MRT4577_112158C.1
gacttgcatctaggcttctagatgtactcctcggccggtcggtcccacccatggacagtgacaatgattgcggctccgacgccggcgccgagtgggtctgggtacgccgtccgtcggaggttggggccgctgccgcggcggccggatggctggcggatgaagaggcgcggccgctcaaggtggttttcggctccccggctaagtacttcaccgacgcagcgccgatcgggaacggccgcctaggcgccatggtctggggctgcgtcgaatctgagaggctccagcttaaccatgacactctatggacaggtggacctggtaattatacaaatcccaatgcacctgctgttctttctaaagtaaggagccttgttgagaacggaaagtaccctgaagccacatctgctgcatatgatctatctggtgaccaaacacaggtctttcaacctcttggggatattgatctggtctttggtgaggacatcaagtacacaaattacagacgagagctagatcttcacactgcaacagtcaccgtcacatatactgttggggatatagtctacacaagggaacatttctcctcaaacccacatcaagtcattgtgactaagatctctgcaaataaaccaggaaatgtctctttcacagtgtctttaactagtccactagaccacaagattcgtgtaacacatgcaaatgaaataatcatggagggtagctgtccaggccaaaggcctgaagagatcaagactgctgctgatcaacctattggaattaaattttctgcgattctttatctgcagataaatggtgccaatagcacagtggaagtattgaatgataacatgctgaaacttgattgtgccgactctgttgttttacttcttgcagccaccacttcatttcaaagtgcattcatcaaaccttcagaatctaaactggatccaacagtgtctgcttttacgacattaagtattgctaggagaacgtcatattcacaactaaaagcctaccacattgatgattaccagactcttttccagcgtgtttccttgcaactatcacaaggctctaattatgatcttcggaggagtaggctagttcagtcagcagagactagttctcagggtgctaatgtatcggattatggttttcaaatatctggctgcaccagattgacatcccttaatagttttgtgaagcctacggtagaaagaattgtaactttcaaagacaatgaagacccttctcttgtggaacttctgtttcagtttggtcgttatctactcatttcgtgctcaaggcctggaacccaaatttccaatctacaagggatatggagcaatgacacttcaccaccatgggatgcagcaccccatccaaatataaatctacaaatgaattatgtgatatcctaaaaactgcactagtgtcatttactaatacacaagctttactgattgtaatatatggatagtttattttgattacatggtgaagtttcggtgttaatgcccttgactaggagggaacgcatgtcgatagctttgaactgactgttttcttttaacaaattgcatgctcacattccctgaatattttaaaatttacataaaattgaacaagatcagatgcgagttattccactttcgttgcagcattttttagagaaaacagcgtatccactattggaaggatcagctaggtttttgttggattggttaattgaaggacacaggggatatttggagaccaatccttctacatctccagaacattattttattgctccagatggtaaggaggcctgtgtgagctactcaacaactatggacatctcaattataagggaagttttctcagctcttatattgtctgctgacattttaggtaaatccgacactaatgtggtgcagagaataaaaaaagcactgccaaatctcccaccaatgaaagttgctagagatggcacaatcatggagtgggcacaagactttcaggatcctgagattcatcacagacatgtgtctcacttgtttggtctttatcctggacatactatgtcacttgaggaaacacctgacctctgcagagctgttgccaatagtctttataaaagaggtgacgaaggcccaggctggtctacttcatggaaaatggtcctatgggctcgccttcacaacagtgaccatgcatacaaaatgatactgcagctaatcactttggtggatccagaacatgaggtttcaagagaaggaggcctatacagcaatctgttcactgcacatccacctttccaaattgatgcaaattttgggttcccagctgcgttgtcggaaatgctggtacagagcactgggaccgacttgtaccttctccctgctctgccccgcaacaagtggcctcaaggctacgttaaaggtctgaaggcccgaggtggtgttactgtaaacatcagctggaaggaagggagcctccatgaagctctgctatggtctagcggcgggcagaataccctttcaaggctgcactacggggaccagattgccaccgtcagcctatcatcgggtcaagtttacaggttcagcatggatttgaagtgcttgaagacttggcccctgtgatagcacacatttgctgaaatgaaagatacgattgattgtgcaaaaattcatgaaaacttctggctggcaagaaaataatcgatttcatacatcaatcataacacgtatcatatttcttatttactgtgtatgtttagttacatttcactgtatacatgtttactcgttgcccgtgccaagtgctatacagtgcacgactgcatgtgcatccgaaaaaaaaaaaaaaaaaagcggcc

SEQ ID NO: 13340 - DNA, 473 bp, Zea mays
  Clone ID: MRT4577_112159C.1
aattcggcacgagggtcgtcttcctccccagcatatggataggagcatatcatgaactaatggggaacgtcatttgcagattttacttgaccaaggtatgcatcacagtccctttacttttctttctactagtcaactcagctctatttctgtctctgatgatacataaagtttggtggtccaaaatactcattcgtcctaaaatattagtcgttttagtattttaatagagattcatataatacttaatttatgtgttttatttatatgtttagatttattgtcatctatttgaacatagacataaaatttaagggctaaaacgagttataatttgggacggagtaaattaatatgtagattgtagcttattacagaggttgcatgtgtttactgaatttggatggacgaagtttttgttggagctttggatgttgatgtgatgcagtttttcgggtacaagggacatgtta

SEQ ID NO: 13341 - DNA, 810 bp, Zea mays
  unsure (1)..(810): unsure at all n locations
  Clone ID: MRT4577_11215C.1
cctcgaggccggccgggctttccgtttcgttcccctacgcccgtttctctctcgtcgcgcaacatcagagcacaagcgaggaacccagtccagtcccgggaatggagtgcgtattgggcgtggttggccgcgacttcgcgctggtggcggccgacacctccgccgtgcagagtattctcgtccacaagaccgacgaggacaaggtgatggtgctcgactcgcaaaagctgatgggcgcttcaggggagcctggtgatcgggtgcaatttacggagttcatacagaagaacctccacctgtaccagttccggaacaccatcccgctctcaaccgccgccgccgccaacttcacacgcggcgaactcgccacagcccttcgcaaggtactaatccgaattaatcttgtttctctctttgtgcgatttgggcgttccaaggttccattggatggatattattaaatggcgttcaatttttttagtcgagagtgattacataccaagtttaatctgtgattggggctgatttcattaagcaaggggcacgaaacttggggcaaaagacgtgtgtccgagtttctaatctctttagccttnttggttttagtgggtttgtgggatgaactggtttatccctagtcattttactgagttctgtaatcataaaacatcttctaatttcaaacaaaacatcacatggcagctcctaaatgaactggtgtgatttattgaattgaatctagaatcttgtagcttgcctaaagatgttttttaatgtctgtagtttatagggcatcacagggtaatatct

SEQ ID NO: 13342 - DNA, 589 bp, Zea mays
  unsure (1)..(589): unsure at all n locations
  Clone ID: MRT4577_112160C.1
ctcccactggcccccgggggcgtgctttcttctcccttcccaccctccccgcttccaccagagagagaggtccgagagcagtgagtgggagaggaagagagccagccacagaatagtgagtgagagagttgagtgctcattcatggtgcggcaagaggatcagtagcattaggaactaggaacaccacacgttgcattgcattgcattgttaacttgttagttagatcgtcttcgtcatcccctgattcctggtttcttggaaaggttttttcttcttcttcctcacttcttttcgtcgtttgggcaatggaggtggtgctgggttccgccgctcgccgctgcctggcttccactgccgtcgccgccgcgcgggctctgctgcagagggtgagccgccccggcatcgccgcccggtttttctagatgttttaggcagcttctccttcttcctatactacattctttgattcttttgtactactgatccncattgtttnctgcatatacagcataacatacacatacccatctctggtagtcatagacattgatttgttcttctttcttttatacacaaagaaagtaact

SEQ ID NO: 13343 - DNA, 212 bp, Zea mays
  Clone ID: MRT4577_112161C.1
atcgataagcctcactgtgagagagggacgcggcctgatctaccggatttgagaggcaacatccatcgctgcgaaattatccatccgcgtccttcatgggcagccgcggaaccggggaaggccggaagcacaagctctgaaaacgtcattaccaacgccaggatgagattgacaaacatgctgatcgcggagcccatccacttcgaccacat

SEQ ID NO: 13344 - DNA, 397 bp, Zea mays
  Clone ID: MRT4577_112162C.1
acataaaacactcttttttggggtttccttgcgtgacttcagagccaaaaacaaaaaaagttgcccaaataaatttgagggcccattttttttggccccccaaaagtcctttttttttttagggcagtttttttttcaacaaaggactttccttaacaaaatttcaccccaaaaaacagcggtccccccccttttttacattatgaaatttgttgttgtttcaagacttttcttgaggaagtcctttgggtccctaacgtcccccgttagggttgaggcccccccattttagggagacccccggtaaatttgcccttttttgggccccatcctgcccggaaagttcctttttttgggggacccccaaacagtaggtttatttttcccggcttttttt

SEQ ID NO: 13345 - DNA, 412 bp, Zea mays
  unsure (1)..(412): unsure at all n locations
  Clone ID: MRT4577_112163C.1
cccggtcgcccagcgtccgctttatatttacgaacgaagataaaacgatcggncgcaaacctggctgtctatattagaatcgaagtaatacagacaggtgttggggcgatcgttatggagggtttggggtttttttttttttgttggttgantgtaatttggggggggggggggagttaaggggttattgtgggttgatttgtgtggtgattgaggggagttttaggtggtttgtatggggttttttgggaagatgttttgtgagaggggagattattgttgtttgttgggggagaaggtaatggggagagtgggatgttttttttttttgggaagtgattttagagtagattgggagtttggtgttgttggagggggattttttttgggggtgggaggggtggtgaaaggt

SEQ ID NO: 13346 - DNA, 339 bp, Zea mays
  Clone ID: MRT4577_112164C.1
aaagaataccaccaattggttcctatacttgaaaacacaacaaccctagtaggaaaaaactgggggcgagcacatcaagaataatgtgcaataaacgaaaggatgcacccaaaaatcaaatacaacgccattccttgatgggcttcaaacattattagtcttgtacaaggcgcaaaaggatgttgatgaagtgtggctataaattcttaaaaaaacatgacaacactcgcgaccgctggatgttcatgagaataaatgcaaaaaattactcaaacaaacccttatatcgggcctattaaatgtcaaattggacaaaactcaattccaagaactttgggg

SEQ ID NO: 13347 - DNA, 1012 bp, Zea mays
  Clone ID: MRT4577_112165C.1
cggacgcgtgggcggacgcgtgggtgctatgaagccggatgaggcgtttggtctaattttttcgtgggacaatgttattgctgacacagactcgctaaagttgaatgcttggagtcagcttgctctggaggaaggtaaggatatcccaagtgctgctcatgtccggaagagcattcttcatggtgctgctgaccatgttcttagaaaggttttgtactgggcaaaagaggaagataaaatggaaaaaatgaaggcacgccttatagagttatactatgaaaacctgttcaaactggatacacctgtagaaggattgagagaatggctggatgctgttcagactgcagggataccttgtgctgttgcatcatcccttgacaggagatgcatgatcgaagctttggatcggatggcactaagcaaatatttcaagtggttgactgcaggcgattgtgactgacgaagatgatatggactcaatagcaaataggtttctgtcagctgctatgaagttggatcgtaaaccctcaaagtgtgttgtgtttgaggacgacccaaggggcgtcacagccgcccacaactgtactatgatggcagttgcattgattggtgctcatccagcgtatgagttggtacaggccgatcttgccattgcaaagtacagcgagctctcagtgatcaacctcagaaggctgtttgcgaacaagggaatcagcttcatggacttgcagaagcagataatcgagaagtcacctcccaagaggaggctgacagtagacaccattttctgatggatatactttatttggtgtctgtctgttgttcttgagtagccgaccatctttgacagcgttgtatataagatagtgctgatcttagttgatctgccgtgtccctccttgtgaatgcaatgcagtagttccatcaaggtaccatgaagactgctgcatcaatgttgctgttgatgtaagctgatattattcaaatttattcatatttcatagtcgatact

SEQ ID NO: 13348 - DNA, 1579 bp, Zea mays
  Clone ID: MRT4577_112166C.1
ggtaccctcgggttcggccgggatccctctcttcctctctgctttccccttccaatggaatcctgtagcttccgtgccgcaaccgcgccttctccctttccctccgctccttcttcatcttcatccccgcgcgccccatgccccatactccgatttcccgtaggcgacttcctcctccgcttgccaagaaaagggaggcagattggggtgcggaggagggcgtccggatttgatgccttcgcgtctttcgccggcaaggtcttcgtggatgaggcgattggagcggaatatggggagggcttcgaaacatttcgaatggatggaccactcaaggttgatgtggattatctgaatgaaaaattgcaagagtgcttccttcaaaggataaggcatgctatgaagccggatgaggcgtttggtctaattttttcgtgggacaatgttattgctgatacagactcgctaaagttgaatgcttggagacaacttgctttggaggaaggtaaggatatcccaagtggtgctcatgtccggaagagcattattcatggtgctgctgaccatgttcttagaaaggttttgtactgggcaaaagaggaagataaaatggaaaaattgaaggcacgccttatagagttgtactacgagaacctgttcaaactcgatacacctgtagaaggattgagagaatggctggatgctgttcagacagcagggataccttgtgctgtcgcatcaccccttgacaggagatgcatgatcgaagctttggatcggatggcgctaagcaaatatttcaaggcgatcgtgactgacgaagatgatatggagtcgatagcaaatcgatttctgtcagctgctatgaaggcatgctcctgccccacttctaatcgttgtacatcatgttaatatatataggtcacacatttgcggtttttcttttcttcctggcagttggatcgtaaaccctcgaagtgtgtggtgttcgaggatgacccaaggggcgtcacagccgcccacaactgtacaatgatggcagtcgcattgattggtgctcatccagcgtatgagttggtacaggcagaccttgccattgcaaagtacagcgagctctcagtgatcaacctcagaaggctgtttgcgaacaagggaatcagcttcatggacttgcagaagcagataatcgagaagtcacctcccaaaaggaggctgacagtagacaccattttctgatagatacacttttatttggtgtctgcctgttgttcttgagtagccaacaaccttcggcattatggcggtggcgttgtatataagatagtgctgatgttaggtgatccgctgtgtacctccttgtgaatgcaatgcggtagttccatcaaggtaccatgaggaagactgctgcaacaatgttgttgctgatgtaagctgatattattcaaatttattcatatttcatggtcgataaaaaaaaaaaaaaaagcagtagttccatcaaggtaacatgaggaagactgctgcaacaatgttgttgctgatgtaagctgatattattcaaatttattcatatttcatggtc

SEQ ID NO: 13349 - DNA, 1355 bp, Zea mays
  Clone ID: MRT4577_112167C.1
cgcggagaaccaaccagccttttgacgctgtcgcccgccgatagagcactagacgcgctagcccccggatctcctccgcggcctcgccgcacgcgtggggatggatttcgacggcgccattggcgatcagggtgagttgtgggaatggcaaagtcaggagtattgtatgcagaaagattcgttagctgctccatgtagcagtttgtgggccgaagcaagcaacaatgtgggtggtgattggagcatatttgaggagcaaacaccaattaaacactgtacagacttcgaatttcagttctgtgatgtaggaggtgaagtcttgttctcatggcaaaacgcacacgcatgctgcagttctgtccagaaaatcttgagatgacatgttcagtgactgaagatgggctcttggaaagtcttcaggagatgatttttcaggtactgactgtttactgaactctgacgggactgatgaactgccagaagaatggctagttagttgatcacaagatatcgagcccggttttccggcagaagaaatgtacttgtttcattccattgttcataagagtttggattcctgagttgttgagttcactgtctttgaagatgagatattgctacttatggtgtcgaaaatcttcttagtaggaataaccctgctgctgcaacggaagaaactgccgatgtcttggcttgagctcttcgcctgtcgtagtccacgacaatcctgcatgctctagacctacttctctgaaaggtgcagctggcaaaatttattatcggagcaaagaaggcgagaccatccgtgtccctcccttttgtgctgatcaaaccatacagcatccatggcgacatcaccctgaacgacatcaacgagaagatccacgccccttcgccgcataagatcaggcacaggagcgacgaggagcccgacccgctccaggcctcagcagcgatctcagggaaacctgtggcccacaagacgaagatccacacggagggggggaagggggaaggggagcatcacgatcaccagaaccaaaggctaggctgatgaccatttgtgtgacgctggcgaagtggctaacagttgattcgcctttgcatttttggcgctctgggctcgttcccaattggttttgtggcccaggtgatgcatggccttagcagcgtgcttgtagcgttttctgttcttgctgtttactagtatcttacgcacgcgccttagcgcacgtcataggcagcgctgaatcgtgtcaatgagttaatataaaaatttaataaaataatccaaagaaaataagaatggttcatatgtagtggtactactaataatgaattgcacaatatactgt

SEQ ID NO: 13350 - DNA, 372 bp, Zea mays
  unsure (1)..(372): unsure at all n locations
  Clone ID: MRT4577_112168C.1
gggggggggggnggggccgtccacacancttcgtgggggggtgaagcattgtctacatggtntggatgagcgtatcttgtccagttcgttccttctgggagagcacatgattatttgcattcgttcatggttctgatcacgaccgaaacaactagggtaagcacagggccctgccncgccgcgncccgnnngctagcttangaccctggngcgancttggnggctttgacccttgctttgttggcgacgggttcnncgatttggtcgagctggntctctttgggccccttgccggtttctttggcctgggcgtttttttctatcctgtagagttttgtgatgtcggcctgttttgatctcctcgaccttgag

SEQ ID NO: 13351 - DNA, 385 bp, Zea mays
  Clone ID: MRT4577_112169C.1
acgggggaaacctcatgatttattaatatatcccctcaataagttttcctgaaaaggtgctaaaaaaacacctacaaattttatactttttttacaagaaatgattagtagttttccaggagtttaaatccctaattaaaaaccctgaattggcccattttttttttttccatttactcaaaaaaggaaatgaggcctttattttttgggtcaaactctataaaaaactttggtggagcacaatgcatttttcaagggctccgttccccccttaatttttcttaacaaactaccgttgatttttatggaggaaaaacagggacttatgttttcattaaatgggaagggaaaatgtaaacttccccttttaaattcctcctaaaac

SEQ ID NO: 13352 - DNA, 582 bp, Zea mays
  Clone ID: MRT4577_11216C.1
tgggaccctcgaggccggccgggagccgatctactgaggagaggagatagggaaaaggtagcactggccgcgacgaccatcatggtagcctcggtccaagtgcaagctcgcgcagcaactgtgatgcaaccggccaagatccgtggtcgggcgccgaccgtcttgataccggcctaccgcccgccgtcgaactcgccagggcgttcggcgtcgaccccgacaccgccatgatgatgtgctccctccactctcacgtgagggacgacggcagccattgcggcgacttcgccattttactcctggttgcctctcatctgatccggactccctgtctcggaacctgaaggggaaggtactgccctgacggtgacctacgatcagatccagagcaatacttatctggaagtgaatgacacagatacggggaatcaacgccccattatggaacaccgccgggaatcattaccacttcagccagaccagcaccctatgaataatctgtgtctgcatcctacgttgttcccagggacggcggtgggcatgacatcataaagcgccgaacgagttacacaagacccatct

SEQ ID NO: 13353 - DNA, 797 bp, Zea mays
  Clone ID: MRT4577_112170C.1
ctcgaggcggccgggactttcgagtcttctatctcacctcttcccccatctctcgcttttagatctaattctttgttattaattaatttctactcatcaaaatgtgggcaacagcagcatcaatcctcgccctggcgtccaccgccgtcgcgcagagcaagggcttcaactacggagccacaaacgctgacggcagttgccgcggatacaatgactttgtccgcttcttcaacgaggcaaagagcctgcccggcacgtctggcttcaccaccgcccgcctctacacctcaatccagtgcggcaccggcgctgaccccatctccgcattccaagccgccatcgacaccgacacgaagatcttggtaggcctttgggcatctgctgggcgtggcgtatatgagaacgagctcaatgctctgctgagagcggctcgtgagctcggcagcgctttcaccgaccgcattgttggtatgagcgttggatctgaggacctgtaccgcagcagcccccagggtgtcgccaacaatgctggtgttggcgcaactggtgctgagatcgagggatacattggctggatgagggattggatccgcggaactgctctggagagcaagccaatcggtcacgttgatacctggactgcctgggttctccctgagaaccgcggtgttgccaattctgtacaatggctcggacacaacagcttcccttacttcgagaacacgcgccccaactccatcgaccaggcatacgagaatttctacgcggccgtcggacagacccgagagcgtctctgg

SEQ ID NO: 13354 - DNA, 234 bp, Zea mays
  Clone ID: MRT4577_112171C.1
gcacgaggtatctttcagcaagagataaaccatctgaaagagttcagagtggaatggactgataagatttccactgtcattttgcgtggattcgatgctcgttctcgggattatctaaaaaacaagaggcagtggctggagaaatcagatggacctgctgtatccagaaccttcatagaatctttagactacatgcaagagcaactatccaagctgcaaggtggcctaaatacg

SEQ ID NO: 13355 - DNA, 622 bp, Zea mays
  Clone ID: MRT4577_112172C.1
catgttgtatcattagacaaccaattttacataactgtatccttgaatggtaaagtagcttgtaggatacttggaacatagcccttatgatatttgtgcacatggtgcatatttgtgcatacatttcttggctgtgggtttttctttgtgcatacagtgcatatttcctagttgtaaaatattggtacatggtgtaaactaaaccgtgtgtcaattggtattacttggtacttgcagagtgttaagtggaagcaacatatgaagctgacatggaaaaggaagatggaacgacactccacatgaagcttgtaaaaaaggagtcaaactcaatttagtctagtgtcaaagtttataatgaagggacttgtactctgtttctatgttatattatctatttgtacgtgtgaatggagatgatcttatgtgtgggatgatggatagattaactttgatggatattagatgatatttaagttaaactttatcggatattagatgatcaagtctggtgcatgttttttaaaaaaaaaaaaaaaaaaaaaaaaaaaaaaaaaaaaaaaaaaaaaaaaaaaaaaaaaaaaaaaaaaaaaaaaaaaagaaaaaaaaaaaaaaaaaaggggcc

SEQ ID NO: 13356 - DNA, 583 bp, Zea mays
  unsure (1)..(583): unsure at all n locations
  Clone ID: MRT4577_112173C.1
ctggccgggagaaaaacccggcggcacactagttgctgtaggtcgtggcgctctggtgcgctcgcaggccaaacaaaagcgccgccgccgccgggaatgtgccgccgcctcctcccccaccggggctacatctccacctcgggcggctccaactccaccccgaccctctactctgacgggaccatcccattctctatcctctcggggggccggggggcttccggacaggtgggcgggggcaagggggagcgccgcctctacccatcccccgtcgcccacctacttctccccgaatcagacccacgccttgcgcccacccccggacgccttccctctgcggaggagacggctggggggggaggggggatctcttgtgggcgcttccactcctcgctcctcngcnaaggaggcgcctgggtgtggggcaagggcgacggaggccggctcggcctcngtgacgaggcttccggcttcgtgcgccgcgctaaccccaatctccgggatctccggctccttgcgcgtggggggatccactgcggcgggcggaccacttgcggggacgtcttcacctgggggtatgggg

SEQ ID NO: 13357 - DNA, 307 bp, Zea mays
  Clone ID: MRT4577_112174C.1
aggcgacgaggccgccgagcgcgaggtgtcggtgaccaccttcagctgggaggagattcagaagcataacctgcgcaccgacaggtcgctggtcattgaccgcaaggtttacaacatcaccaaatggtccatccagcacccggggggccagcgggtcatcgggcactacgctggagaagatgcaacggatgccttccgcgccttccacactgacctggaattcgtgggcaagttcttgaaacccctgctgattggtgaactggcccggaggagcccagcaggacacggcaagaactcaagatactga

SEQ ID NO: 13358 - DNA, 447 bp, Zea mays
  Clone ID: MRT4577_112175C.1
ggccgcttttttttttttttttttccaataaaattgggatcataataatattagcatcgagtcacgattacagaacaaacccttcgacaattcacacgaccacgaaacgaacgaacaaacaaacaattaaccaatcgcaaaccacgtaaataaaaaaaacaattaattaatcggatgaaccaaacacgatgcatcccaacgttgccgccccgcgcgtcgtcgctcagtggaggtagtaggcgaggaaggagggccttcttcatctccatggctggcgggtggatcacttcgtcgctcctggatatagtggtccaaggaacctggcgttcgaggagatgttattagttattgggtggaattgggagactgctcgctcgacggccggtgatctctcaattgcttttttttttttttttttttttttttttttttttttcccccggccgg

SEQ ID NO: 13359 - DNA, 543 bp, Zea mays
  unsure (1)..(543): unsure at all n locations
  Clone ID: MRT4577_112176C.1
aggccggccggggaaaaaaaaaaaaaaaaaaaaaagaagcaattggagagatcannccggccgtcgagcgagcagtctcccaattccacccaataactaataacatctcctcgaacgccaggttccttggaccactatatccgccgcctcggccaccgccgtgctggcctcggtcgcctccgaggcgccctccgaggcgcccgccggcgcggccggtggtgcggctggccctagcgcaagcggcgccgccgccgccgccgtgcccgccgccggggcgctcgtcgcctccttcctcgcctactacctccactgagcgacgacgcgcggggcggcaacgttgggatgcatcgtgtttggttcatccgattaattaattgttttttttatttacgtggtttgcgattggttaattgtttgtttgttcgttcgtttcgtggtcgtgtgaattgtcgaagggtttgttctgtaatcgtgactcgatgctaatattattatgatcccaattttattttattttagaacaaaaaaaaaaaaaaagcggcc

SEQ ID NO: 13360 - DNA, 184 bp, Zea mays
  Clone ID: MRT4577_112177C.1
gacacccatccatactctaacacccaatctatatactccactctcatcccaaggggacgttctattttttcttctaataaaaataaacctaaattaaattcataatcatcatagttctcaacccattaacacctttatcctacttaactgctcatttactcttttcatattcaactgtattcat

SEQ ID NO: 13361 - DNA, 666 bp, Zea mays
  Clone ID: MRT4577_112178C.1
ggccgccccttttttttttttttttttcacgacgcgacgtcagcactcgcccatagttcggccgcaatttttttttttttttttttaaaataaaattgggatcataataatattagcatcgagtcacgattacagaacaaacccttcgacaattcacacgaccacgaaacgaacgaacaaacaaacaattaaccaatcgcaaaccacgtaaataaaaaaaacaattaattaatcggatgaaccaaacacgatgcatcccaacgttgccgccccgcgcgtcgtcgctcagtggaggtagtaggcgaggaaggaggcgacgagcgccccggcggcgggcacggcggcggcggcggcgccgcttgcgctagggccagccgcaccaccggccgcgccggcgggcgcctcggagggcgcctcggaggcgaccgaggccagcacggcggtggccgaggcggcggcgacgagggcggcgcagaggaccttcttcatctccatggctggcgggtggatcacttcgtcgctcctggatatagtggtccaaggaacctggcgttcgaggagatgttattagttattgggtggaattgggagactgctcgctcgacggccggtgatctctccctggcgccccgccgggtccccaatcgccaatcgccctaggagccg

SEQ ID NO: 13362 - DNA, 428 bp, Zea mays
  unsure (1)..(428): unsure at all n locations
  Clone ID: MRT4577_112179C.1
ctcctcccacggcgggcgcagtgggtgagcgcggcacacacactacacccgctctgtgctcccttttctcctccctttccgcgccctcccnntcccttcnnccccacccggatttcacacgtnnnctctctcgcttccgnancncnnctctccccaacgtgnnctcgtctcttcttgtccgcccttcccnttttcgccttccccgagctggggggggagnngcgggtaccgggaacccctgggnctggcgaccttctaatnnctcgtccgcagggnaagggcttgagtaccggcggtgggnnctggnaggtgnngtgtgccgatggccacgnnnaccgggcggtcggccccgtgactcggggttaagaagtaggggaggtcgccagnaactgacaaggcaccgtcatttcgcaattcacgcgccgcaa

SEQ ID NO: 13363 - DNA, 251 bp, Zea mays
  Clone ID: MRT4577_11217C.1
ccccttataatacccacccaaaaactaggcaacgcgggggacaattgaaaaagtcgtgcggcgcacatcaccgaggagacgtatatcctaaagggacagtttactatgagaaaaaccggaaggatgtcatctaagtatgtaacgggtatgcataagaacaaactccaatacgggaaaataacaacccggaccaaagtaagaatgcatcataatggcaaaaatggaggtacaatggtggcaatacatgaaac

SEQ ID NO: 13364 - DNA, 684 bp, Zea mays
  Clone ID: MRT4577_112180C.1
cgactgcttcatacacatatatagcagtcgacgaaactatacatcgtcggtcatcaaattgggaggtatacccatgcatgcatgcatcaaatcgtcatcgcatcccatgcatgcatgtatgatgtatcagtgattcaggatccgccgggaccggccgtcgagcgagcagtctcccaattccacccaataactaataacatctcctcgaacgccaggttccttggaccactatatccaggagcgacgaagtgatccacccgccagccatggagatgaagaaggtcctctgcgccgcccgccgccggggcgctcgtcgcctccttcctcgcctactacctccactgagcgacgacgcgcggggcggcaacgttgggatgcatcgtgtttggttcatccgattaattaattgttttttttatttacgtggtttgcgattggttaattgtttgtttgttcgttcgtttcgtggtcgtgtgaattgtcgaagggtttgttctgtaatcgtgactcgatgctaaaaaaaaaaaaaaaaaaaaaaaaaaaaaaaaaagttttcattgtcctgtaactgtttgggttggaaaataggtgcattatctctttataatttgtttgatcctttaattaattttatctcaatattgaatagaaataaagaaaaaaaaaaaaaaaaaatttgcggcc

SEQ ID NO: 13365 - DNA, 926 bp, Zea mays
  Clone ID: MRT4577_112181C.1
ggcgtatctccagccgccccctgctccttgttccacgcgcagcagccacgcgcaggaagtaaggccagcagccatggcgatttcccctgcgagctcccctctctcccatggctgaccctctgctccctgcacttggcgtccttgcagcaggcgagctcagctccacctccctgcgctcagctcatctcccttgcccagcgccctccctcctctctgtttttccttgagctcacgtgcagggaacgacgccctttctcctccactgcgctcgacgcctagccccttttctatggcttggacgcagcaggagcggcgcaggagcttttccatccatggctgtttccccctgccgagcccttcctttctctgtgctttggatgagcctctgctccctatgctgatctccaccttgccatggcgttgctcgccggggatcccctgcagggcgccgtcgtggcctcgccgggctcctgctcgccggcgagcccatgtgctcatggcacttccctgccttctctttgtcccaaacatccagcagcagggatcggatcaacgccgcagcgcccagccatggtggctgtaggccgagtccctctcccaaccagtgccctccctgtttccctggacgacgctgtcccttcccatgccgctgctccaccacacacactacctgctcgacgatatgcgtagccgactgcgtgttgtcttgcttgtgttgtgcgcagccctgctcgcctcttttcggtgttgtcaaactatcggtgtggagcactgtgtcgaggacaacatcgtcgacttttattccggtgcgctgctcaatccatgctgccccgctgtgccttgtagcgctgtggatccacggcatggtctcgacgtcgctctccttgcagccacacccctgctgctcccacatgccgcaccacatc

SEQ ID NO: 13366 - DNA, 386 bp, Zea mays
  Clone ID: MRT4577_112182C.1
ttttgcttggaacaattatgtttgccactggtctaaaagagaaagaaaaatgtgctacatattatgccggcgtccgcgtgtcaccgcgcgatgagcgagcctatggcgccggcgatgagcgcggtgggatcgccgagcaccgcggagatgacgacctgcgcggcgaacccggcgatctcgcagcagcgcttggccttgcccttgtgcctgccccagtacgagtacctccctcccccgctggcgtggctgctcttcgccgcgcccctgatcatcgccggcacccagtacccgccgctgccgggcaccaccacgtgggccgccatcccctggtcgcctttgtggcgcccgacggcgtgccagctctcgacgagcatgtccatgacgca

SEQ ID NO: 13367 - DNA, 541 bp, Zea mays
  Clone ID: MRT4577_112183C.1
tcgacggccgcccgggcaggtacaagctttttttttttttttttttttacaagctttttttttttttttttattttttttttttattttttttttttttttttttttttttttttttttttttttttttttttttttttcacccacccccccccctccgggggggggggggggttcccccccaccggcggcaggcactaaccccggcgggcgcccccctaaggttgaatttcaaaagaacatagctgttttttgggggaatttgttttcctttcacatttgggtttatttttttacccgtaattttaaagtgaaaaatcgggggggcctaaagagggaacaaacaaaaaagaatgggggagaaatcaataaccgttttgcagccaaaaaaccagctgtcccaaattaattaatgaaccccccaaccccctttaaaaagcggaaaaacaatggggccggattcagttttatagataacaaaccccctgaactgggtttttgggttttgggccgctttttcctttcggttgaagggggtattt

SEQ ID NO: 13368 - DNA, 586 bp, Zea mays
  Clone ID: MRT4577_112184C.1
aaaattgaaatattttttgagctatttatgatcaacaataacttaagagtgattctacatatcaaaaagagttgttggatgagatggatctcaatgatataagcgatgactttgtatcacaaaatgttagaagatagttttaatgatatcagataacaagtaagtgtttttggctatattttacatttgttgtcttataaacttcaaaacagggtataatactttttatgtgtcaaatattcgataatatatgtataattatatatatttgggcgtggatgaggcctccatatcagatttcgcactgggccccttaaaagtcatgatcgaccctgcttgggagatactgcttcagaagacgaaggtccgtaataattaacaattgtgttgccttgttttttatctacaacatttgagaacaagtgatcaataatttctcttgccaaactttctatgacagaaagaatttaccaaaggtttaatatgacaaactacgacgctaaccaaagaatctcaaaatatgcatgatatagcctacatgttattggctctgtttgacatattttatttcacatattttcacaaa

SEQ ID NO: 13369 - DNA, 230 bp, Zea mays
  Clone ID: MRT4577_112185C.1
atcatatacagagactacgtagacgtcagtgttgctgttggcacttccaaggtgccatattgcttactccctgacccaaaaagaatgcaaccatgggttgcgttgcgtgcccgttaaactagttcacatttgatcaagtttctagtgtagtattcacgttcaaggctccaaatcaatttattatgaaaatagatttcgtagctaactaattgtatttatttgatgtttta

SEQ ID NO: 13370 - DNA, 222 bp, Zea mays
  Clone ID: MRT4577_112186C.1
ggcacgtacggagggttgcacggcgggcacttgggcggcttgccatggtggtgcttgcgcggtcacagcaagccacttccggatatggtcgacgagagtaaaagtggtcgcttgtgtctccatagtaggctattgtggctcaccgcccgctgatcagaccgccatcgcaggccccgtctgcccagctgggccgtcctcccctcgttaacaaccggcccgagg

SEQ ID NO: 13371 - DNA, 313 bp, Zea mays
  Clone ID: MRT4577_112187C.1
gtggaggagggcctcaagttggcggaggcggtcaataacaagaaggaggtgatcgccacggccgtcgccgccttcacacttggcgtcttcgtctcgagtaggctcttctccaggacttaatcaacccatgcgtaatcatggaccagacatattcacgtatatgagcatgagaacatgagcataatcgccaggttatattgattcgtagacttgtacatgcatgatgcagcactaatattcatattatgtattaattattgctccctattgagcactatatgaatatgccgcagctcagaaggtcggacagtca

SEQ ID NO: 13372 - DNA, 779 bp, Zea mays
  Clone ID: MRT4577_112188C.1
ccggccgggaccagatcaaggagctcgccgccggactggaagcgtgtggccaccgcttcttgtgggttgtgaagggcgctgtcgtggacagggatgacgctggggagctcagcgaactgcttggcgaggccttcctgcggcgcgtgcaaggccgtggcctggtgaccaagtcgtgggtcgagcaagaggaggtgctcaggcacccggccgtggcgctgttcgtcagccactgcggatggaactcggtgacggaggcagtgagcagcggcgtgccagtgctggcgtggccgaggttcgcggaccagcgagtgaacgcccgcgtggtggtccgttgcgggctcggtgtgtgggctaagcagtggagctgggagggggaagaggcgctggtgagagcggaggagatcgcagcgctggtgatggaggctatgggagacgacgcgatggcagtgaaaacggcgaacgtccgcgaggctgcgtcgagagccgtggtggacggcggcacgagctacctatgcctggcggcgttcgtgcgtcgttgcattgcaccgcgtgaagttatataaaaaatacttatataacttaacttcgtgtcgatccgcttcataaacttttaaaatgtgcctattatatacataatctatgtgtacaactttagatctttcttaggtccaaacgagttacatatcagtacgttgacccttctcccttttgtgtagatttgtttttttaagtgacaactctcttgctgaatgctacaaaaaaaaaaaaaaaaagcggcc

SEQ ID NO: 13373 - DNA, 146 bp, Zea mays
  Clone ID: MRT4577_112189C.1
ctcgtgctcacaaaacaaagcgttgggggtgtgccgaaccctctttactatacagcacataaaccacggcggaagctatgtgtgaggggcgcacgctggaaaccgaggaggctcaacttacgcaacactcagtgcttggatccctg

SEQ ID NO: 13374 - DNA, 259 bp, Zea mays
  Clone ID: MRT4577_11218C.1
aaaacgatacgatttataaatttatcgaataatttcaacaccaccaatatcaacaacccaggcgcatctcgctcaaaggataattgtcacacttccgctcgcgctcttactctttgccgggtcagggcatggcctcgtgaatccggatgcagcccgttctcccaagccccccatccacaatgccatatctgacctaacggacacgatcgtgaaagtgctgggattccatgccaaggggctcaaagtgtccagcttctac

SEQ ID NO: 13375 - DNA, 167 bp, Zea mays
  unsure (1)..(167): unsure at all n locations
  Clone ID: MRT4577_112190C.1
cctgttgcngttccccttcttccncagtnctcccgcccgcngctgccctccgtccgngtccagatcccgccaccaanngatccgncgctctcnagcatgncngnggcgggggcgaaggcggngggagnnctggctctggcgctcgtgctcncnctcnnnggggctaa

SEQ ID NO: 13376 - DNA, 3275 bp, Zea mays
  Clone ID: MRT4577_112191C.1
agccaatatcagacctaaatccactttggatagctgtaggtgcgaaattccatataatagatgtgaacggtaatgttagaactacccttgcaaaggacttctttcttggttatcgtaaagttgatataaaaccagaagaaatattgctttctattatactaccatggacaaggccttttgaatatgtcaaagaatttaaacaggcacatagaagggaggatgacattgctttggttaatgctggaatgcgtgtgtatttacaagaaactgaacgaaattggataatatctgatgtttcaattgtctttggtggggtagcagcagttccacttagtgcttcaagaactgaaaacttccttactggaaagaaatgggactctgggttgctggatgatactttcaatttattgaaagaagacatctctctttcagagaatgcacctggtggaatgattgaatttcgcagatcgcttactttgagtttctttttcaaatttttcctgtctgttacccatgaaatgaaaataaaagggttgttagcagatggattgcatgcagatcatctgtcagctgtacagccttacagtaggcctgttactgttggaactcaaagttatgaattagtaaggcaaggagcttctgtaggtcagccaatggttcatatgtcagctatgcttcaggtcactggtgaggctgaatacactgatgacacaccgacacctcccaatactttgcatgctgctttggtgctgagtaagaaggctcacgctcgcatattgtctattgatgattcacttgccaaatcttcccctggctttgctgggctgttcctttcaaaagacattcccggtgttaaccatactggaccaattatccatgatgaggagttttttgcatctaacattgttacttgtgttggtcagatcattggaattgttgttgctgatactcatgataatgcaaaaactgctgccaacaaagtacatatcgagtattgtgagctcccagcaattttatctgtagaggaagctgtcaagattggaagctttcatccaaataccaagaaatgccttgtgaaaggcgatgtagaacaatgttttctgtctggtgcatgcgatagaattgtatcaggacaagttcatgtcggaggtcaagagcatttttacatggaacctcagtgcactcttgtctggccagtggattctggaaatgaaattcatatggtttcatctactcaagctccgcagaagcatcagaagtatgttgcaagtgttcttggtcttccacaatcaaaagtcgtttgcaagactaagcgtattggtggtggatttggtggaaaagaaaccagatcagcaatatttgctgctgcagcatctgtaccctctttctgtctgagaaggccagtaaagcttgttttggacagggacgttgacatgatatcaactggacagaggcacagtttccttgggaaatataaggtgggatttaccaatgaagggaagatactggccctagacctggaaatttataacaacggtggccattcacttgatctatcccttgcagtactggaacgtgctatgtttcattcagaaaatgtctatgacatagaaaacatcagaatcaatgggcaagtatgctttacaaacttcccaagtaatactgctttccgaggttttggtggtccacaaggcttgttgattgcagagaattggattcaccatatagctacagaactccaacgaagtcctgaagagataaaagaacttaattttcacaatgatggagttgtgctacattatggccagttgctccagaattgtacaataagttcagtttgggatgaactaaaagcatcttgtaattttgtggaagctcgcaaagccataaataattttaacagtaataaccgctggaggaagcgaggaattgccatgattccgacaaaatttggcatatccttcactgcaaaattcatgaatcaggctggcgctcttgtgcaagtttacactgatggcactgtcctggtaacacatggcggggtcgagatgggacagggtttgcacacaaaggtagcccaagttgctgcctcgtcattcaatatccctcttagctctgtatttatatcagagacaagtactgataaggttcctaatgcatcaccaacagcagcctctgctagttcagatctgtatggagctgcagttttggatgcttgtcaacaaatcaaggttcgaatggaacccattgctagcaaaggaacccacaactcgtttgcagagttggctcaagcatgctacatggaacgtgtggatctctctgctcatgggttttatgctacacctaatattgggtttgactggacgattggcaagggaactccattcaattatttcacatatggagctgcatttgcagaagttgagatcgacaccctaactggggatttttacacaaggacagctgatattgttatggatctcggattttcaattaatccagcaattgacattggccagattgaaggagcttttatccaaggattgggctgggcagccatagaagagctaaaatggggggatgataaccataagtggattcgacctggacacctcttcacctgcggtcctggttcttacaaaataccctctgtaaatgatatacctctgaatttcaaggtttctctattaaagggtgttccaaatccaaaggctattcattcttccaaagccgtgggagagccaccatttttcctaggttccgccgtcttatttgcgataaaggatgcgatctctgcggcaagggctgaggaggggcacttggactggtttccactcgacaacccggcgacaccggaaagaataagaatggcatgtgtggattccattacaaagaaatttgccggtatagattatcggtccaagcttagtgtatagcggctgctgggctggtcacgggagaataaattggaaacagaagcccgcatttgtaaagtttcatgccctttgtgctaaaaagaatgggagggacggtttagtgttacttgtgggaaactttaaccctaacaaaggattgggtgatgtattaatagattgagttagttgggtctgacatacacatggatgagaagataattacacggtaaactctaaggccctgttcggtttttatggattggagccctggattgattcctagccggattacttctctaatttatatagattttgatgagaaaaaaaaaaaaaaaaaaaaaaaaaaaaactcgagaaggg

SEQ ID NO: 13377 - DNA, 306 bp, Zea mays
  Clone ID: MRT4577_112192C.1
accaagcggatgttgctccgggatctgctcgacgaccaagacgatgacgaggattcgatgacgtttcgtcggacgggtactggcatcaccgtcttcgtcaagtcgtcagcccgggcagggaccagtcagtggacatcagaggtagcaccaccagcagcttccgcgagttgagcagtacacggttgatagatattgtcgacggacgcggccgccgacatagagagcatgatatggagaggccgctcgtgctgcgtaataatgcaccaaggtgacgatagcagctgcaatgatggtgcctaaatttcc

SEQ ID NO: 13378 - DNA, 294 bp, Zea mays
  Clone ID: MRT4577_112193C.1
cacttgtcagcaaagcgccggaaaccaaaccaccgccgccttggctagctaacacgtgcacgtggcagtgatcccgatgggaatgctgccgcgtacaacagcgctcgtcgcatcggcggtggtggcggcggcgctggtgctcgggatggcgtcggcgcacgggccggccgccgcgcccgcgccgggcccggcgcccgggatcagcgacgagtgcttcaacgcggtgctcaacatgtctgactgactgacgtacgtgacggcgggcatcaaggcgcgtcacccggacacggcctg

SEQ ID NO: 13379 - DNA, 268 bp, Zea mays
  Clone ID: MRT4577_112194C.1
acgagggcgtggcggccgagcgggcggtcaaggccccctgaccggagacggagagcatcgtgtggagggaggacaaggggaggttccagacgcccgaccgcgaggccgaacttcagtaccggctcctcgacggtcgaggagcccccgatgctgcagtgatggacctggtgcacacctacgtgccctggaccaagcacaggcaggggcgtaaggcgcggctatgagacgctgtcttcgaccacgcgcaggctcggcggcatgcgcgaac

SEQ ID NO: 13380 - DNA, 2656 bp, Zea mays
  Clone ID: MRT4577_112195C.1
ggtaccctcgggttcggccgcacctcggacccatcaggtgctgctgtgctgggcgagttctcccccccttccttgcttttgtctggcattcgctcgctctagtttcgcgcaacccggccgccgccgccgcctcgggtttctcgcctgtggctttgagccgagaggttggggactcggtttccttcctgctctgagttgggtttcgcgcggctcggactttggccggcgggcgaataaaccggccggatgcttctgggcgctgcggccgcgaggatggaggagaagcgtgtgatcacggggagggagcgggaccagttccccgtcgggatgcgggtcctcgcggtcgacgacgaccccgtctgcctcaaggttctcgagaccctgctgcggcgctgccagtatcatgtaataacgaccaaccaggccatcaccgcgctgaagctgctaagggagaacagggacatgttcgatctggtcatcagcgacgtgcacatgcccgacatggacggattcaagctccttgagcttgtagggcttgagatggacctacctgtcatcatgttgtcagtgaacggggagacgaaatccgtgatgaaggggataacccatggcgcctgcgactatctcctgaaacccgtccgcatcgaagagctaagggacatatggcagcacgtcgtcagggacgcgtggggcaagcgagagcgcagcaaccttgacgtctacaaagatttcaacaggctgccaggcgcggatccatgccacagccacggccacggccacggccagaccactgccggggcttccgaccagagcgggaggatcggcaggaagaggaaggaaatgcacagcgacgaggaggacgacggcgaggagaacgatttccaggagggcgacgagccctccgcggctaagaagccgagagtcgtctggtcgattgagctgcaccggaaattcgtcgcggccgtcaaccagcttgggattgataaagctgttccgaaaaggattcttgagcttatgaatgtggagaaactcaccagggaaaatgtcgcgagccatctacagaaatacaggctctatctgaaacggttaagtgctgtggcatcacagcaagctagcattgtcgccgcatttggaggtagagacccctttctccacatgggagcctttgaaggccttcagagctaccaacctttcgccccctgtgctgctctatcgtccttcatcccacaccacggctcgcttggtagaactaccgcggcagcattcggggtcccggagcttgctcctgccatcacagttcaagctgctgccagcaatggcatgataagccactgtgctggcgacgcaagcaagtttcagctctccggtatacaagaaaaccagcaaccaaatctgggacaaggctcggccacctctcttgggctgccccagctccaacagaagtggatccagcaagaaactggcgacttgtctgctgtcttctctgggagtgcactggctaacactctgtctggtgcactccagagagttgcgagcagtccattgccaccgcaagaacttttggagggcgtacaaaccaaagttagtgcccagccaccaataacaatggcatctgtgagttcagaacttgttgagaggactgttggagtttcggctaatttgcaggactccggtatatccccgcagggcactcttccaataaatgatggatttactgctgacaagttacagctgcaagatccattcgacagcaatggtggaacaaatttttcagtaaacatgcctgtttgtccctctggtagccttacagcatccagcaacgccaagggtggtgctagttcgtgcagtccagtgctgctcgctcctgatactgggagacattcaaactacttgcagtttggagttgcaggcaactctggacatgacatgaacgatattaaacaggaccatctgcatcaaggattgagcactggaggtttcaatcacgattttggcacctgtatgactgaacaaacagatccaaatgtgccgtatcttatgccacaaatgaagcctaacaccttgtcatcagaggataaactgaagcagaggaatatttatgatttggggattccaaagctccatggtggttttagctctagtagctgcaattttgatggtcttctcaattccatgatcaaagcggaaaaggatgatctctcattcacggatagcgacctggggtgcgacttctttccactcggtgcttgcatatgagacctcttaacaacccctcgtgcagattggccctcgacgggatgggatgggactacggcctacgggagaggttgtaaagtacactgcttaggagcattggccagtttatgctgcctaatgtgttactatgcttggtactgtgcacactagaaatgctagggatacaggtagctacggacatgccttgtaatctacatttcctcctcttcgaatgggaaatgaaagtgattatggttaggtaaaaaggagcaagtataatgctccaaattaacatcatcttcatcttaaaattttaccaaattttgtttccaagtgtcattagctcaaaactagaccattaggtgcattgatgacacgtataatcgaaaatattgtaatagtccttcctttggcagtgatt

SEQ ID NO: 13381 - DNA, 287 bp, Zea mays
  Clone ID: MRT4577_112196C.1
tttaatgatggctataagtgtgacggagcgggggacaggtaacatgacgcgctgagattcagtgctaacgagatcttcagacaatgatgaaagatgaagtcgacgacgacattactggaaaatgcaacaatgagaaaaaggaccagtagaacacccagctagatcatgatgacacacttaatgaataaatgaacgaaggtaccaatttagtacgcgacatctattataaggcctgatgtaaatagacctgaggcattaacaggataaccgaccgtgagcataacgtg

SEQ ID NO: 13382 - DNA, 282 bp, Zea mays
  Clone ID: MRT4577_112197C.1
tagctgagcttctggatccacaacttgatgtctttgccggacaccatcacggtaatcacaccgggctactccaacaactcgactgacattcatactaccgcattgttcacctatggcgacatcgacccttgacttatccactaatagcatagcttgccatcagcgctcctcttcttttgtcactttagcactcaaccacttccgccgtactcttccgctgactgatgttaccattcgtgtaagctactcttccacatacactagcctactactattaaccaa

SEQ ID NO: 13383 - DNA, 175 bp, Zea mays
  Clone ID: MRT4577_112198C.1
tcgtccacgcgtacgaccacgcgttcgtccacgcgtgcgtttccccttcaccgactactaaaagccggaggccaccgacccaaaggtgcgcagaccatctacgctatgatccaacgctctctcctcgttagacgacagataatttctctcgtgcacgtgcatgcatcgccgactg

SEQ ID NO: 13384 - DNA, 277 bp, Zea mays
  Clone ID: MRT4577_112199C.1
gcatttaccaatgatcaggatggtgttgaatcttcgctcgtgacttgattggagaggtataaccttagttacctaactactagtcacggcgtggttacgcaccgcctatagcatcatatactcgatacatacccaatgcctatcctgcccaaaatattacaaagcaaaaccaatgtcgagttcaagtcggaaatgtcacactgagactccatcttgctcagcaaatgcatgcagaacgtatgacggtctttagtgaccaccatcatcggcgaaatca

SEQ ID NO: 13385 - DNA, 350 bp, Zea mays
  Clone ID: MRT4577_11219C.1
gcggaaaaaaacgggagaaccaaaaagaacctggagccacgttaaaacaagaagaagaagacagaggcgctggaagggccgaataaacacacaaaaaaagggatacccaaaggacgggcctgctgaacacacaaaaacccaggacgaccctgggaggggttggggcggaacgctatacaaaagcccgccgtgggaaacccacccaaaaccaccccaaatgaaccaaaggggggcacggcccggggaaacccccagacaaaatcccccaggggccacagggggggggggggttccaaagaacccaaaaagtggaaagccggggaagcagggggaacaccaggcctcaaaag

SEQ ID NO: 13386 - DNA, 261 bp, Zea mays
  Clone ID: MRT4577_1121C.1
gactgtggttaaataaaaacttggatgacttggttacataatgcattttgtcacatatacagaaagcaatgatatatcacactttttttccccgtcaaagaaagaaagaaaccgtttttttttttctttactgcactgtccgatgtttttaaaacagggtttttttttctgtacaaagaaggaaaatattttggcttactctaaaaaaaatcgtttttgcccacaaaaacaaccgccttttttattacttttagctccggg

SEQ ID NO: 13387 - DNA, 644 bp, Zea mays
  Clone ID: MRT4577_112200C.1
tggttgggcttgttccaaaaccgtggaaaccgttcattttcctgaaactgtgtttttttgttcgggctttaaattaaagtcaagggaagaatggagcctagtcgctgcaacactgaatgtctgtgtttaagagcagggcggtcatggagaaggagaaccagttgaacgttttgcatttctgtgcatgagtccccacaagcgtacgctggcacatgcaacctctccagctatgacgacggcgacgacctcgcgtcgacgccgtcgtggccggcgatcatccggtacttgtccctgcgcgtgagcccggtgcactcgaacccaagctcatcgccgatcatgcgctggacgccgttggccacgtcgaggctggacgcgccgccactgccactgcaggtggccaggatccggatctcgtaccacggcgccgggttcatgaggaagaagacggagtcgagccacttgtggccccgcacggtggagccgtggaacatgtgcgccgccggcccgcacggccgtcggcgtgaccttgtcggcgatctccgcgaacagcgggctgaagcgcagcaggtagggctcgcggaggtggtgcccttcgggcagaccaccaggtcgccgcgcgcgagcttgcgctgcatgatccggct

SEQ ID NO: 13388 - DNA, 933 bp, Zea mays
  Clone ID: MRT4577_112201C.1
atgggtgtgggttcaagtgctcgttttgcattattttttgtacggtgtggtagagcgggaagcacaaatctcagcatggagttgtggtggctaaatatattgtgtgagatctgcacaggttttttgaaagatggcaagcctgtaaagtcgacacgggagcaagaaatcaccatcaccactgattattccattaagggtgatgagaatatgatttccatgagctacaacaagattgttgtacacctgaagcctaggagcacaatactatgcgctgatggcaccatcacattcactgtgctttcctgtaatcatgtgcaaggcctggataagatctctagatggtccgaagtgtgtttggtgagcatgccaagtcaatactacttatgtccaagcggtgagactgcaactagggcatatccagagcttgtagtgcaaacaatgtcaaggacttgcctacaagcagagtcacatacatattatggaatagttttcaagttaatcagtaacactgccccaatgcctatgagtccactagagagcttggcatcatcagcagttcgaaccaccaacatctctaatgcatcactcatcttggtcctcataaggggcagtacaacagcaaggctcatggcaaagtacaagccaacaattccagtgataaccgctatggtcccagaattgaagactgatgataattttaattggacttgcagcgatgagcgtccagctaggcacaacatgattgtgaggggcatgatcctgatgcttctcgccgctacagcgaaggcatttgatactgagtcgactgatgaagcaattagctttgccatagattacgcgaagaagctcaagatctgcaagtcaggggattcagttgtcaccttgcatcgtatcggtgcatcatgtgtcatcaagatcttgacgattaattag

SEQ ID NO: 13389 - DNA, 406 bp, Zea mays
  Clone ID: MRT4577_112202C.1
agtttggataatttaccttcgctcacgtttatgatacaggggtactttttacactattttgcctaggcaccagcaacaaccatctattgattaaattcaggccgatgccaggatccatttcaggccgcacagcacataaaacaataataaggaattcatcgcagtaagctcgatcattggaaccaaagatgcccaccaagcggaactgactacagagcccgataactaatggcaggaccaggccgaaccaagcccgatacaagcacgaattaaacccgggccggtcttaggccttaagcactaactatcgtagaccctgttggtgttgggcgtctaggacctgctgtcccacggagcgtgaaccggggtgggagaaaagggcccgcccttggtcttggccccatcc

SEQ ID NO: 13390 - DNA, 281 bp, Zea mays
  Clone ID: MRT4577_112203C.1
atagcctacaacgggtttatgatgtaccatgccatatatagccaatttaaagtctagtcatataataactctcccatgatagaagttgtgcgtttaatgcttggctcactcttcctctcacaaactgtcatgaagtacgtaagcagtccgctgccccgctttcaactggctacagtgagcagcccgtttgcataaatcttattattttgcagcccgtttatatcaccttattatatttgcttttactttttacagctatagaaatattggtaatagaggtg

SEQ ID NO: 13391 - DNA, 419 bp, Zea mays
  unsure (1)..(419): unsure at all n locations
  Clone ID: MRT4577_112204C.1
cctcgccctttttttttttttttttttttttttttttacttaaatggcacgcttatgagaagggcaaaggatggacactgacaccaaccccaaatccaacaaaccataatattgactgcgccccaggcccccccaaaaagggggaccatgaccacccggggcaaaagggggggcaaaaaaacctccccccaaaactaaaaagggaacccccccccgcatccggcccacaaggggggggaaccccagggtgatcaccacaaaaaaccccccccgccccccccaagaaactcgtatttagcccggccccaaaaagaagaggcccctggacccccaaaaaaggaccccccctgccccccatgccctaaaanccctatgaaaaagcccgccccaccccagggggccaagaaaacacccccttc

SEQ ID NO: 13392 - DNA, 2622 bp, Zea mays
  Clone ID: MRT4577_112205C.1
aggacgctgggatcgatcaggagacctacttgctttacttggttgatgatctcctgcagaagcctacagtgagcgagcttgcagagggccatgccatcctagatgacgggagagcattgcttgacacaggaataatagccgcaacgggtaaagcatggcaggaccttgttacccttgcacattcatctagccattccgtggttaaggagctcatgtcttgtaacaaagagctcagcttatatgaggatcttgtggcggcatgggtaccagccaagcatgtatggttgcggaaccgtccattgggcaaggaactgatttctgctttaggaaaacaaagacttttcagcttttgttcatatgacttctcatttctacattttggcacatccgcggaggttcttgatcacctggcgggttcctattctggacttgtaggtcgaaggcatatgtgttcactaccagagaccactgcttgtgatattgcagcgacagctattattttgtgtacaaagatttcttctggagtctcaataggagaggatacattggtttatgattcagtactttccggtagaatacggatcggctcaattcggcacgtggtcacggtgaatatacgtgagtttgatggtagcgcttgtttcacattacctgatcgacattgcctctgggaagtacctttggcaaactctgcggggagggttttggtttactgtggtcttcacgataatccaaaagtttctattcagaaggatgggacgttctgtggcaagccatggataaatgtcttggaagatcttagaatccaggatacggatctgtggggttcaactagccaggacaaatgcttatggactgcaaagctttttcctgtcatgtctctcccagaaatgcttaatgtgggcatgtggcttatgggatcagaatgtgacccagatgggagaatagcttccttgtggcaaaaatcacagaggatcagcctggaagagctgcatcgtgctattgattacagacaactttgcaccgattcgagcaagcatcaggcaaatcttgcagctgacatagccaaggcttgcatgaactatggcttactcggtcgtaatctgtttcaactttgtgaggaaatgttacaaaaagatacatgtttagcagtctatgaagaattactttcattttttccaagtcacagtgaacagtatcctggggttcttcctcagagcagagaatatcaggtcaagatggatctgcttagagcttctggagatctttccactgcatgtacggtggaagagaaagtgtgggcttccattgcaagcgaaactgcgacggcgataaaatatggatccaaagagccatctagcggcaagatgtcttcaaaccatgaaagcttgcatccaaggaagactgttgtagaattaccagtccgtgtggactttgttgggggttggagtgatacacctccgtggagcttggagcgtccaggttgtgttttgaatatggcgataagtttgcaaggaagccttccagtcggtgctatggtagagacaacagaggaccaccttggagtaaggatcgaagacgacgctggtagacatgtttatatcgataatctggcatctatttcttctccattcaaagaaagtgatccattccgtctcgtcaagtccgctcttattgttactggaatccttggccacgagatattgtcgaaatcaggcctgaacatcaggacatggtcgaatgttcctcgtggaagtggactgggaacttctagtatattatcagctgctgttgttaagggactgttccaagtgatggaggacgacgaaagtgacgacagtgttgctagagccgtgctagtggtggaacaaataatgggcacaggtggtgggtggcaggaccaaattgggggcctatatcctgggatcaagtgcacccagagttttccaggacaaccgttacggttgcaagttgttccagtgctgaccactcctcagctgattcaggaattagaagaacgtctcctggttgtattcactggccaagtaaggctcgcccaccaagtcctgcagaaagtcgtgactcggtacctccgccgcgacagcatcctgatatccagcatcaagaggctagcggaactagccaagatcgggagagaggcgctgatgaacggtgagctggacgagctcggcggcatcctgctggaggcctggaggctgcaccaggagctggaccctttctgcagcaacaggcccgtggacgagctgttcgccttcgccgacccttactgctgcgggtacaaactggtcggagctggtggcggtggcttcgcgttgctgcttgccaagaacccgagctgcgccagagagcttcgacgggcgcttgaagagtccgacaccttcgatgtgaaggtgtacgattggaacgtcgccatgccacggtgaagagtagctggctcaaagggattgtgtacactgtattgctaccatagacgctgttatcattttttgtgtgtcagacgacctagggtggtggggtggttgtgtgactctgatccaaaagtcggctgttatcaagtgagcaggctgtcggtttggttggcttttccaacgcggtcatgcc

SEQ ID NO: 13393 - DNA, 2159 bp, Zea mays
  unsure (1)..(2159): unsure at all n locations
  Clone ID: MRT4577_112206C.1
cggccgcgtgggggacagnatagnagtcatactaccatccagcaaagcacaaagataccagatgtttatggcagaatatttgtcacttgcctactgctgctaacttggatctcacttcatgtaggggtgatagagctgccacgacaggcactctgatcttacaaatgaccaaactggacttcacctctgaagttgacggctcactagttcactgattcccagtacggactgctgagttgatcacatctggggaccttataactccaccccccgaattgggaacctccacaccttctggtgcactggtggtcttctcagaccatagacaatggccaccgaactagatgtgagcaagtctcgccgcttcgacattgccatgtcgaggcgaacccggcgatcgacaagcctggtagcctgctttcaagatcagtatacaccatccctggcacagcatcgccaccaagagctgaaggcgtttctgcaatgccaggatgaagagctgaaggcactccagcgatgcgaggatgcagagcacaagacactgtgtttgaatgaagacgaggagctgaagattccacaagtaccaatgcagtatgaagatgacaagcaagagacgccagagcaatatgaagatgggcaggagaaggagtcgcagcaatatccagaccaagagcaggagataccagattcatgtcaagacgatgagaagacaccgaaccagtatctagacgaagggaagatgctagagcagtatcaagatgaagatgatgagctgccatcacaataccaagaccatgagctggtgacacagaagctacctgaggaagatgaggggactgcatcagagcgattccaagacgaggagaggaaggaacttcatcagcaccaagaggcagatgagcagacgtcacagtctgaggacgaggaggagctcaagtctcagcaggaacgccatgacgtcgagcagaaggcaccgaagcaattccaagtcttgaagaaggtagccgcgccaccacgtcctgtggagaacgtgccccggttctccctccaggagcttatacggcagaagcagcagcttccaaccggcgaggcgatggctaccagcaaggtaggcggccgtggggagagtgtcctcgctgaccatatggtttcaggagcaggtgcagcagccgcagagggcacggcactggcgatggtgataaagcgacccgagggagggaagaagcccatgggcatgatacgccggtgcgtcaaggccctgaaccagatgatcaaggccaagcacgggtccaagaagaacctgcatttctagtgttcaacagagtttcttagtagattgcacatctctgaataatgcacgcgcagttggggagaaccacaattttgggcatggtgcagggtgtgaaagatctggcgagaaacttttacgctctggtctatactgtcttcctaatagcaataaactgtggtagttttattagctgaatatcacaaatctgttcctcctatgcgagaagatggtctgctaagtccaagagtagagatcaggctctgatcatgtgctgttgacttcctctgcaaaagcctgtttgcttttagaagtgtatgggtgtgattagaaaaggtgaaaatgatcggttctactcctaccgacacctgccccccaggtcggcagcggttttggtgcagtctccttttctgcctttctgtgccgcgtcccgtttcggtttggtgcgtcacttgaatgctgagaaaacaagttagtgcaaaagaaaaggcgatggagctgaagcctgtgaagcttcttgtgaattattggttgaggacgcagcgcatgtgtttgatgccagtaaggctcctctcctacgtcgcgctcctatcacactgccgctggaatagcgacagcgaaagctctagcccgtcaaccgcgccttcgcctcacacccttgcatgtgtggtcacctcctactccatcgatttgaactggttcctctaccgctccaggacccagnctcaccctcatactcatcttcatgttatctccagcangccttatctcattcaatggttaaactttactctacaaacgtgtcaaatagtgtcatctataatcatgtggcgtctattttacccaatccattaaagataagcttacctac

SEQ ID NO: 13394 - DNA, 213 bp, Zea mays
  Clone ID: MRT4577_112207C.1
cagacttttcagtacagaacttctagtgagttacttgtcacaaaagactgataatatttatctcaatgtgagagtttatataaatcataagcttatgagtcattgtactgatgtctcaaaggtccagaggttatgaaaattgttgatcataatttgactgtatatgaatgttgaagaatctctgcagatacaataaatttagcagtagtacac

SEQ ID NO: 13395 - DNA, 2194 bp, Zea mays
  Clone ID: MRT4577_112208C.1
gaaaccaatagcttttaacggtacagctgtacagacgatcgattacttatttacttttctgcagacaaagtatgtaaagcatgccattcatatctttcacttgaaacaaaatcctgctggttatcattcaggtagtgttgttggacaaggcttcaattacacagggatgataaagctgccatgacaggcactgatcttacaaatgaccaaactggacttcacctctgaagttgacgcctcaccagttcactgattcccagtacagactgctcaatttatcacatctggtacagaccttataactccacccagagaagatgcaaacccacactttctggtgctctggtgctcttactcttcagaccatagacaatggccaccgaactagatgtgagcaagtctcgccgcttcgacattgccatgtcgaggcgaactcggcgatcaacaagcctggtagcctgcttccaagatcagtatacaccgtccctggcacatcatcgccaccaagagctgaaggcatttctgcaacgccaagatgaggagctgaagtcactccagcaatgccaagaggaagagctgaaggcactccagcaatgtgaggatgcagagcagaagacacagtgtttgaatggggatggggatctgaagattccacaagcaccactgcagtatgaagatggtgaacaaaagacaccggagcaatatgaagatgagcacaaggaatcacagcagtgttcagacgaagagcaggagataccagatacatatcaagatgatgagaagaaaccagaccaggaccagtatctaaatgaagacaagatgccagagcagtatcgagctaaagatgagttaccatcacaataccaaaaccaggagcttatgataccaaacctacctgagaaggagactgcatcagagcgattccaagatgcggagcagctggtgacaccaaacctacctgaagaagatgaggagactgcaccaaagcaattccaagacgaggagcagaagggacttcaacaacaccaagagccggatgagcaggcatcgcaacctgaagagcagaagtctcagcaggaatgccatgagaaggcaccggagcaattccaaaccttgaagaagctaggcgcgccaccacgtcttgctgacaacgtgccccggttctcccttcaggagcttatacaacagaagcagcttccgaccggcgaggcgatgcctgccagaaagcaaggcagccgtggagagagtgtcctcgctgatcacaatgtttcaggaccaggagcagcagcagggggcacgacactggccatggtgataaagcgacccgagggagggaagaagtcgatgggggtgatacgccggtgcgtgaaggccctgaacgggatgatcaaggccaagcacagttccaagaagaacttgcatttctagctttcaacagaatccaggagaccaggagtacatacatacatacatacatacatacatcagcactgatgagtaagtgtggtccagagtttcttagtagaccgcacatctctgaataatgcattcgcagttgcgcagaaccaaaattttgagtatgatgcgcagggtgtgcaagatctggcgagaaactccagggctttttacgccctggtctacactgtctacctatagcaataaactgtggtagttttattagctgaatatcacaaatctgttcctcctatgcgagaagatggtctgctaagtccaagagtagagatcaggctctgatcatgtgctgttgacttcctctgcaaaagcttgtttgcttttagaagtgtatgggtgtgattagaaaaggtggaaaatgatcggttctacttctaccgacacctgccccccaggtcggcagcggttttggtgcagactccttttctgcctttctgtgccgcgtcccgtttaggtttggtgcgtcacttgaatgctgagaaaacaagttagtgcaaaagaaaaggcgatggagctgaagcctgtgaagcttcttgtgaattattggttgaggacgcagcgcatggtacgccatcgcatatctcttcgtttatgatcactctctgtttactcgatttgagcgcttgtgttgttggggttgggacctgggcatgtttatgatctgaagttctaaacatttactactgtatttttctggaaattgaacagatagtgtttcttc

SEQ ID NO: 13396 - DNA, 209 bp, Zea mays
  Clone ID: MRT4577_112209C.1
actacatgcatctctgatagtgtaacaaagcagtgagaggcacaccaggccagctcacacctagcagcgacctaacatacaatggctcaccaagatattatgccctcgcttgggctcattgcccttctaactaccgcaacaaatgcatatcattattccccagtgaataggagtatatagggcctttagttcagagtgccctcccacca

SEQ ID NO: 13397 - DNA, 300 bp, Zea mays
  Clone ID: MRT4577_11220C.1
gctcagcctcccctcagaataaacagcgaaaaaaaggaaggcgaaaagaaaaaatcaatcgcgagcgctaagagcggagatccaaatcggcgcaaaaggaggcgctcgctcgcttcgcccgcacggaagttcctccgcgccgtcgaggagcaaaccaattgcggcttggaaaaggctaataaggaatggaatcgagttatgccaccgaagagagtaactctaaagactcttttgcaaatgcatcttcatctccaacaggaagttcagaaacttctgtggatttacaaactcctcccgcag

SEQ ID NO: 13398 - DNA, 351 bp, Zea mays
  Clone ID: MRT4577_112210C.1
ctgactcgtgggcgtgcataggcacatttttgtattaatgaaggacctactccagtgcgcgaactgtctactgtccatgggcgacaacaagtccaacgagaacatgatccagctgatcgccaccaatgcatgcatgaactcgctgacatccaatgctgtattgttcgtgtgcaccgctagcctcaagcccagctaggccaactacttcctcgacgactcgccctaagtagtaaggctaatacaaagtctctcctacgtctactatgagctcgcgcttgcgaaccatccacattaagacaaggactcctctttgcactacttgtgacaataggaaagagcgttgccttccca

SEQ ID NO: 13399 - DNA, 225 bp, Zea mays
  Clone ID: MRT4577_112211C.1
gcacgaggcgcaacgtgagatccagcgaggtggcgggaacgcggtgatgtgtttgagttgtttggtcgtccagctcgctgtggtactgtgcagcggggggggaagtgaacaggtggtattggcatttggtattgggtgggagtgggactgacggcggggagacaggcaaatggcgagttttaagaggacggtaattttggctgcgtcttcatgaatgagttgtta

SEQ ID NO: 13400 - DNA, 202 bp, Zea mays
  unsure (1)..(202): unsure at all n locations
  Clone ID: MRT4577_112212C.1
cagncgcgtgttggcgcaaagcacctctgtagcactcactcacagtggataacagcgggcctttgattgcaatgctttgaggggatcaagaggttattcgtgaagggcatgggttcagggtctatatatgcttgggggcgggcgctctgagagatccactcttacattcacaaccctgctgcgcatgaaatgcattatcttg

SEQ ID NO: 13401 - DNA, 506 bp, Zea mays
  Clone ID: MRT4577_112213C.1
ccggcccgggaaaaaaaaaaataaaaaaaaaaaaaaaaaaaaaaaaaaaaaaaaaaaaaaaaaaaaaaaaaaaaaaattcaggaagatgactatcttgttgacaattgccaacaattttgggcccatcgacactctaattgaggacccccttacgcaaaagcccatcaaggagaacgcccaaagttgcaacattggggttttcaacaaaatcaaaagttcagtttcggagttggggaaacggaaggggttcagttcgtaaagtttgggctggaatgccagtttatcccttcaagtctataacaaaaaggttgttcggagctgagtctattataaacatcttggcctgagtttattgttgaggggggccagtttttttcaaaaaacatttatccaaaaaacaggggaactgaggtttttttgccaaaagtaaatgattttgaaagggttctgacccaaaaaaaaaaaaaaaaaacccccggccctcaactcacagtttttctcccct

SEQ ID NO: 13402 - DNA, 759 bp, Zea mays
  unsure (1)..(759): unsure at all n locations
  Clone ID: MRT4577_112214C.1
gcgggaacaatcccctgcatccacgagaggacgatgagttgttcgtgcagcggcatgttcctcggcggacccccgcccccgcgcgaccatctgttgcgcccctctccgcgctgcaaattcctcgtctcagaagtcgcgctcgagctccaccgccatgccgccgcccgccaccccatgtgacagccgcgttcgccgtcacaccccagtcccaaacccatgcaccatcgtccactccccacctatcacaccgtcgcgcccgcccctgagagccatcgtcgacgaccatcgaggtctgcgtccccatgtttgcgggcaggcggagatctggatctgctctcctctgcttcgtcgctcggcggtatcgtcgtggcggaagaacaagcagctcgccgtcgagtgattccatgtgtcccgtcccctcgtcggcatcacggcaccactgagcgtgtgcgtcaccagcgggagacgagggcaggtggtggtggtggtgatggcgtccaccgacgcgcgcttggtggggatcgcctcctccatccgcagcaccacctctttggaagcaccacctcttcggcgccgccccaacggtgctcgtccaagggtacacgcccgaggtgctcgccatcacggggagttcccncatcacctggctccccttctcggccgctcacaacacacaagcaacgccgcttctggatgcattaattcaaactccccacaatgcgaatatgccattttttgaataaaaagggaaaagcgagc

SEQ ID NO: 13403 - DNA, 634 bp, Zea mays
  Clone ID: MRT4577_112215C.1
aattcggcacgaggcgtccctccgcttacccggccggccatccccattcccatccttttctcctcctcctcctcagccggccaagctcgctaccgcctcggcgctcctcctccggctcggaatgcgcgatgcgagggctccgcagctccagcagcgagcccatggcggcgtcggcgtcgtcgtcgtcctcctcgtcctcctcgcaggcgccgccagcggccagcagcaggcgcagccgccgccggtagtacctccggcggacctgccggacgtggagaggcagctcaacaacctgaccaacgacatcgcagtcaccatctccgacaagttcagcttctgcgttgccgacctggaggaggactggaacgaggccttcaactacacgtccgacctcagcttcgtggatcggtgcctcacggagacccaaggcgacctggtccagcgtctatgcacgccggacgaagtgaagttctacctggcaagcctgtacgaccgcgacggcgacaagaacatcaacctcaagacgaacataaactgcaacatctcgtcctgggggagggggtgcgacgccggatgggcctgcgccgccgacccggtggtcgtcgttcgggatcccaggaacggcgtcccgctc

SEQ ID NO: 13404 - DNA, 365 bp, Zea mays
  Clone ID: MRT4577_112216C.1
ggcagggggaaaaacagttttagcatcacatttacaatttacaggggaaaacgacaacacacatacgggtcccatttttttcccgggaaattcccacccgggccctagcagcaatataatttgggtaacacaaggccatgtccacgtacgggtaccacatacggggggaataagcttgggccccctgagactgagactgaaactatttgccctgaaaaacccggcacgtaaattgattccccgattcaaaattactactggcatccgcaggaggaagacgaggggcccttccaacaaaaaacccaatttgttttggggacgggatcgggggggcaccacttaacatcctgagcaccaggggcatg

SEQ ID NO: 13405 - DNA, 256 bp, Zea mays
  Clone ID: MRT4577_112217C.1
tacctcgagccggccgcgagcagactgtagacctgcgctcgcacgcgcacgcgtcgcatcctaccatccaacagctctctctggccgctgccctagcacctgcttgcccctgacgcccatcgtgatccctcgagccaccagcagagagcttgagcatcatcggccaggccaggcggacacgcagccggcggagatggagaggaacaagtcctgcgccgcctcccgcggtgctccgcggggacgcccgacgccgctg

SEQ ID NO: 13406 - DNA, 683 bp, Zea mays
  unsure (1)..(683): unsure at all n locations
  Clone ID: MRT4577_112218C.1
ctagaccaagaagaggatgaggatagatctcgaattgagtatggcagagataatccctcgctaaaagaagctagcacatttccatcaatgactgattgttgcaatgcacttgctacttactacatcaaaggtgagtatgattttgtgattgataagagtgagccagaaagattgacagtgcattgttctttctcgaggtgtaagtggaggatgcatgcttccactatgcggaatagcataattattcagtgaaagtgaatccatttccacacacttgtccaagtaccgaaagaaagaagactcaaaagtataacaccctaaatttgggggtataaaatttattttctataatcaatcaaattcaggtgttatcctcttttttctttgcctttctttctcttttcaaaatagtgaaggaatattttgcttttatgtaagtattagatgtattaatgaaactcaaaagagtttttgattgtcgcatcacatgctggagcattaattctttggtgttgattgagttgaggagttttgatatttatttattctcctttgcgagcccaattaataataataaaattacctaaaatattataaaatntattggaatatatattataatttaaatatatgattttatattaaaaaacttattcgatactactgagaaaaggaaagattga

SEQ ID NO: 13407 - DNA, 322 bp, Zea mays
  Clone ID: MRT4577_112219C.1
cccacaccttcgaccacgcattacaagtttctttgggaaacacatcaagcgaatctcagtcggggcaacctaacagcaggggcgaccaatatattatatccttcttgagctattctcgctctttaacatcgcaacaaatgcgtttattaatacacaatgcttacttaatccaagattcattattacaaatgttctaccaccaatttctataattggcttttaacaccctatctatctaaatcttttatctataacaagcatttgtttgttaacgttttacaacaaccaatttttcactttcaacatacaattcttttcacat

SEQ ID NO: 13408 - DNA, 1110 bp, Zea mays
  unsure (1)..(1110): unsure at all n locations
  Clone ID: MRT4577_11221C.1
acactccatagggcgattggctacctccggccgaacgcggaaagccgtccagggtactcgagctcgagctacactcggcgtttacggcgccggcgatcacccaccgcgtcctccgccttgtcctctttcctcaacctaacccccatccagcgaggtttctccgctctcatatagaatcagatatgaagagggcggcgccgtctcaggagcccctcgacgtttcttccggggactcctcgggctcggattccgatcaattaggcggcaaggataagggcgggagcgcctctaaagctgctgcaggggctgaagatgtgaagagggtggtgctgcataaagaatcccaggacgtatcttctgatgatgacctgagctcggattctgatgatgatgctgggaaggggaatgcttggaatgcctttgggctgcccaattcctccaaagctgcttcgacggcagaagcccaggtcaaagaagaagaaaaccggtgtggatttcagtgctctgagccggcacggataccacggcggcccatccgtcttgacagttcgtccggcagcggaggaaccgaactggtcctggtccactgggaaagaccgcgacggcagagaggacgcacccgagtcctacgaggaacgcgagcgtaccagggccgcagtaaccgaaggggagaagttcatcgggctgcagaacgcgccgccgaaccagctgttgctggagaaagacaggaaggagaaggacgcctccttctcgcagaaagagaagcggaagagggaccggggccaagccagcagggggaagaactacgtcgaggaggagaagcggctcctgaggggcagcggcgtgtactctggctttgacacttagcaaataccaggtacaagtacagcaagagcagccctagcatgtgtgcataccgagggttagctgcctttcatcgtgtgctttggctgtgtttttgtgtggcctggttagcgttgtgtttactttgggctttggatgtagctatgcattgcgttcaaatagtaccgctgccatattctgtgtgccatgtcttgctgcattcgcgagttgccattgatattaanaaatcgggactccaattatcat

SEQ ID NO: 13409 - DNA, 2307 bp, Zea mays
  unsure (1)..(2307): unsure at all n locations
  Clone ID: MRT4577_112220C.1
cggttcgggataaaattacccacacacccagcaccgatcgagtcatccttaattaccgtaataatacgaaggccgccatgattgttgttgcagtagtactggcgctgctactgctgttctatggggcgggacatgccgactgcgcaacgaggccatcccccagaacagcacggacgacatgctctccctgctcgacatcagaaaggaaatagcagtgatccaagtggtttcctcacatcctggaacactaataacagtagccccgactactgcggctggaatggcgttacatgcagcaggacgcacccagggcgggtcattgaactcaaactcagcagccaaagcttgcaaggccgaatctctccatctctcggtaatgcaaccttcagcaacttattgaactagacatttcctcaaataaacttgaaggggaaataccttacactttgagtgaatgtcgtcagttgaatgtactccaaatggactccaattttatcacagggaacatttcgcctctacgtagtctaacaagcttgaacatgatcaacctctcacacaatatgttgtcagggatcatccctgcagaactgggtgggatgtcctctcttacccagctggatctatcttataatgatctacaaggcaaaattccaatggatggagtatttagaaatgcttcagctgtctcacttgttggcaactcgagactctgtggtggtctgtcagatttgcacatgcccccctgccctattgccttaaaggaaaaggcagcacaatactacatcattagagtgttgatcccaatatttggcttcatgtcactattgatgttggtatgtttcgttctcactaagaaaaggactgcacaacaatcatcattattatctcctcttggtgatcaattcccaatagtttcttacaatgatattgctcaagctaccaagaacttctccgaatcaaatctgatagggagaggaggttgtggctctgtatacagagggatattgatggaaaacaacctaaaggtggctattaaagttcttgacagtgacatgcgaggcgctgagaaaagtttcttagcagaatgtgaagctttgaggaacatccgacaccgaaatctagtccctatcataacagcatgctcaacggtggacatcaacggcaatgttttcaaagctctggtatatgaatttatgccaaatggggatttggactcaatgctgcattcgcaaggaaatgggaaggtcagaaaacctttggacttaaatcaaagagcaagcgtagcagccaacatagccgacgtactggattatctgcacaacggaagtgggaaaacaattatccattgtgatgtcaagccaagtaacatactcctcgatgatgacatgaatgctcgtttgggagacttcggcattgcaaaattctatcttgattctaggacaacatcaactgcagattattccaaacctataaactctaccggtgtgaagggtactatcggctacatgcctccagagtatgctcgaggtggacacgcatcaacatgcggggatgtttacagttttggaatagtacttctagagatgcttacagggagaaggccaactgatcatgtgtttgtggacgaactaaacattgtcaaattcgtggagaggagcttccccgataaaatattggaagtgattgacggttccttacaggatgacatgaagagtgcccaaataaacatggtaacagagagtgaggcctacagatgcttgttttctatactacagctagcactttcttgcacacgtgaaattcctagtgaacggatgaccatgaaagaagctgctagcagaattggtttaatcaagaccacatatatatgctagaggaattgaaaacgcaagcaaacattgaattgaaaccatatgtatctactttctgcttgcatgcgcacgagcaccggtttgtggttgtcgtgcacgtagatcaaaggcttggcgagattcgctcgcgtatgcctaagcttacgtatgcttcactacattgagcggatgggatggaggccatcatccaatgtacgacacgaaaagctcttcgagtatcatttgtttacagtttacataataaataaaagaaggaatacacagaaaaaaaaaaaaaaaaaagcagcccatcccatggcattttgaaaaaagtccttccggggcctctgcgccctcctggttccacccccggcagcggcaggggnaggaggagacgacggncgncaacggcgccctgcnacggcggatgtnggntcgntaggtccgccccctgcgc

SEQ ID NO: 13410 - DNA, 345 bp, Zea mays
  Clone ID: MRT4577_112221C.1
aagaggagacaatatgttaatcagttacaaattttttatctaaaaaggaaacaacgtaatgcttggaattaaccatatagactttgttagagaggtgggaacggatcggttttgtaaccgctgtacaaaacaacagtttacccttctcaaaatattggacacgtacagcctcattactctgataaaaaatctgccgcacatctttgaacagatctttggatttattatggagctgcgcatgccttaggctaacactagaaccagctccatcaatcaagtcaatggctgtgtcaggcagaaaacgatctctgatatactgataacacagctgtgcagaagcaatta

SEQ ID NO: 13411 - DNA, 216 bp, Zea mays
  Clone ID: MRT4577_112222C.1
gacgacgacgacgacgactacgcgagaagtcgaggcgcccctgcttggtaggaccgagctttaggagaggttcaacgggcccggggccgggacgggctggcccgggccggcaaagggattgaatgggaacaaaactattctttaatgggcagcggctgacggtgaaccaaagatgagcgctgggggaatcgatctggggaatgagaactgcattgt

SEQ ID NO: 13412 - DNA, 263 bp, Zea mays
  Clone ID: MRT4577_112223C.1
ctgttatctgatgaaccatggcgaccgctctgaacttgtgtaaggaccacctgcagcataggtgtagctcgttctacactattgcatgcagatcgtcctgtacgttacctgtaccgtgcttgagtcggttgtgtgcatgatagccagggagaagcaggtgactatacgagtcaagggcctagtttgtgtctatcgctattgtcgattggtgggccttgagcttactgattcaaggtatgcatttagtttcggcgatatacatg

SEQ ID NO: 13413 - DNA, 2189 bp, Zea mays
  Clone ID: MRT4577_112224C.1
cattgggtacctcgaggccggccgggaattccacggcggggtcggtgccaaattcccacgcccctgcccaccctgcccgaatcctctcgccctttacccccgcccgcgaccccattcacactctcgctgctccactccgctccgctcagctcgtcgggacgcgcccccgcctcccatcccatgcccgcccccgcgctcgtcggaggccgctcgcggcggcctcccatcccgccgcgctgacgagagggcctctcggtgggggcgcttcgggtgttcattttgtccgttcggggaaggggagtgcggcgatggggaagcagcaggaggggaagcggcggcgcggggagaaggacgggaagcggaaggggagggggaagacagctgcagcggcggtgccggaggacgcggcgccagtggccgggtgctggatccgcttcccgcgcctccgcggctgcatgccgtcgcgcgccaaggtcgactcctccaccagcgcgcgtggcggcggccgggaaaccaaaccatctactgatgatgcttgccaggaccaatcagtaccaccagcctctggttccgcaacaaccagtaacactggaagtatctcaccttcttccatagttggagaggagctaaaactagctttccaactgcgtagatttacttttagtgaactgaaatgtgccacgagaaacttccgacctgagagtcttcttggcgagggaggttttggctgtgtctttaaaggatggattgaggagaatggaactgctcctgttaagccaggcaccggattaactgttgctgtcaagacactcaaccatgatgggttgcaggggcataaagagtgggtggcagaagttgattttcttggaaaccttcagcatccacatctagtgaaattggttggctactgcattgaagatgaccagaggttgcttgtgtatgaatttatgccccgtggaagtttggagaatcatctttttagaaagtcattgcctctaccatgggccattagaatgaaaattgctcttggtgctgcgaaaggcctcgcttttcttcatgaagaagctgaaagaccagtaatctatcgggacttcaaaacctccaatattcttttagatgcggactataacgcaaaactctctgattttggacttgctaaagatggccctgagggtgataaaacacatgtgtcaactagggtcatgggaacatatggatatgctgcacctgaatatgtaatgacaggtcacctgacatcgaagagtgacgtatatagctttggagttgtactactagagatgatgactggtagaaggtcaatggacaagaacaggccaaacggagaacacaacctggttgaatgggcacgcccttatctgggagaaagacgcagattctataagcttgtagaccctcgtttggatgggaacttctccataaaaggcgcccagaagacggctcagctggcccatgcctgcctcagccgtgaccccaaggctaggcctctgatgagccaggtggtggaggtgctgaagcctctccagaacctcaaggacatggccagctcttcctactacttccagtccatgcaacatgagcggcgcacagcacttgccaacccatatggcagtcaaagcatgaaagcgcagagcacctttgcgcggaacgggcagcagcccatgaggagcctctcgtatggccctcatgcttccccgtatcgccagtcgccaaggcttgacagcaagcggcaatgagtcatggtgcttgtctgtcgaccataacatattttcaagactgaagttgtaaccagaactggtgtatgaactcagccatccaacaagcatctgagctatctattattgtggatgaagcagcaacattgattcgaatttgcatatcatctgcgagtgaatttttttctctcttgttatcgcttacattttagctgtactgtctttacggctctagataccttgacttgaaaggtggaactaaacagggttttgatcggtctttgaaacaatgctcaggcagcaaatgattggaatttgttccttcctggaaaccagcagtaagcaagtctgatatatgttacatagttgtcctaaggctgttcataacctatggtttcttgtcacaatatccaaatttgccacgtcacatattactttaaaaggtatatttgtccc

SEQ ID NO: 13414 - DNA, 403 bp, Zea mays
  Clone ID: MRT4577_112225C.1
ggaaaaaggggcacttcatgagtaagggaaaaaaaagggacacagtgtaaatgtacagccgcctacgtatagtagggcggtagagcacgtactcacgcgcatgcatgatggacgggctgtggctggctccaacaaaaaattggagctaccaagcaaccacgtcgtatcgtatgccgtatgcggcggctacagcaccaaatgtatcgacgatctaggctcctacatcttcacacgaggcagctgatgcccaatacacaacgctacgtacaagagcatcagcagaggccgtcgtgttcgtgtcgtcgcgtcccgtcggtactcgagacgccaacgaccaccgacgcgcgcgctaagctagctagctcgatggtaacgatcgatccatcgatcgatcgagactgct

SEQ ID NO: 13415 - DNA, 945 bp, Zea mays
  Clone ID: MRT4577_112226C.1
cggacggccaaacgctaggagctggtgactgctgcgacctcctgaaagcatgactagaggggttaccggacggccaaacgctaggagctggtgactgctggcggtttccagctccgggtcaggggttgtccctccctccgtttggctcccggtaggcaaatcattcttggctgaaggcaacgtgagcgttccactcgtcccacctatttctcctggaaactctggctcctagtttctgggatcttgtggtgagtgcaacatcccttgcctaaaaaaacaaaaaaaaatcactagttgattgtactatctaccaacttctaaatggtttcaccttagctttctgaataataaagcctgaaacttcggactcgtctgaagtttcagaggtactggagttctgctatgtatggattctgttaagcgtcaagactaaggttctgttggtgatgaattgtagtgtgattggagcttgggtggtcttgattcctactttgtaatgtgctgaaagcttgtgctagagtaatgtattggaactggagcttggtttgtaaaaaaaaaaaaaaaaaaaaaaaaaaaaaaaaaaaaaaaaaaaaaaaaaaaaaaaaaaaaaaaaaaaaaaaaaaaaaaaaaaaaaaaaaaaaaaaaaaaaaaaaaaaaaaaaaaaaaaaaaaaaaaaaaaaaaaaaaaaaaaaaaaaaaaaaatattttttaaatggggggccccccccccgagggaaaaaatgggttgggggcccccaataaatttttggggcccaaaccccccccccgggaaaaaatttaacaccaaaatcccgcgcccccccaaaaattttcctttttttttccaagggggggaaaaaaaaaaaaaaaattctttctcttttttaaaaaaggaagatttttttttctaaaaaaattgtctcccccccccccactgtgtttttg

SEQ ID NO: 13416 - DNA, 1554 bp, Zea mays
  Clone ID: MRT4577_112227C.1
ccccgcgtccgcggacgcgtggcggacgcgtgggcagatccagcgggcggaggagggggtgcggtgcggccgtgaccatgaagcagccgaggggccggcaggagccgcgccgggtgggcaacgccgccatggtcgtcaccatggtcgtctccctctgcgtcctcacgtacatcaaggcgcgatactgctccaaccctttccccaaggcggtggcggaggtggaggtggacgaggactacgacagcacgcggtacaagctgacgggccccgtgggcgaggaggacttcgacccgtcccgccccacctgctacaacaccagcaagcggtcggagcggtgcgccgccgtgggcgacatccgcgtggacggcaaccactcgcggatctacatcagcccgctgtcccgcgagtggcggaccaagccgtacgcgcggcggcacgacgccgtggccatggacgacgtgcgcgagttcacgctggtccccttcggcggccccaacgacacggccgtgccgccgttctgcacgcgcacccactccgtcccgggctttcttttctccagcgggggtttcgcgggcaacctgtaccacgactacgccgacgtgctggtgccgctcttcgccagcaccaaccacctgggcggggaggtccagttcctgctggccgacatcaaggactggtgggccgacaagttccgcccggtcttccgccagctctcccgctacgacgtcatcgacgtgaacaacgaccgcgaggtgcactgcttcccgcggatcatcatcggctccaccttccaccgcgccatgggcatcgacccctcgcgctcgcccggcggcgtcacggtggccgacttcaagcgcctgctccgccgcgcgttccggctggagcgcgccgtcgcgtcgcggtcgggggcgccccggcgccgggaccggccccgcctcctcatcatctcgcgcaagagctcgcgccgcttcgtcaacgagcgcgccatggcgcgcgccgcggcggccgccctttttttttttttttttagggggaacggttgcggatagcctgagtatgggaaaaaaggggcacagtgtaaatgtacagccgcctacgtatagtagggcggtagagcacgtactcacgcgcatgcatgcaccggctgtggctggctccaacaaaaaattggagctagcaaggtatgccgtatgcggcggctacagcaacaaatgtatcgatcaaggctcctacatcttcacacgaggcagctgatgcccaattacacaacgctacgtacaagagcatcagcagaggccatcgtgttcgtgtcgtcgtgtcccgtcggtactcgagacgccaacgaccaccgacgcgcgcgctaagctagctagctctatggtaacgatcgatcgatcgatggagactgcgttcgtgttcgtcacagcatgtcggcgtggggaaggagcgcgtactgccacggcgcgtggcgggaggcggcagcgcgctgcagggactgcagctgggacttgaggaacttgacgtactggatggcctcgtccagcatggaggcag

SEQ ID NO: 13417 - DNA, 248 bp, Zea mays
  Clone ID: MRT4577_112228C.1
ctcccgggtacgacccacgggcccaattccccgctaacactgatcggatgagcaaggagatcacctcccttgcgccaagcagcatgaagatcaacgtcgtcgcgccacctgacaggaactacagtgtctggatatgaaggtcgatcctaacgctcgctcagcactttccaacagaggtagatatcaaagggggagtagcatggggtctggcccggcaatttgtcacaggaagtgcgtccaggtttcgg

SEQ ID NO: 13418 - DNA, 688 bp, Zea mays
  Clone ID: MRT4577_112229C.1
atcttctcgaggcctcaccagccagcatactactcacgaatcaccagctatggacgccaactggggcgtcggcgtcggcgttgacctgaacgccccaccgcccaccggaggcgacgactggcgcgcccagctcctgcccgaggcgcgcagcagggtcgtcaacaagataatggaatgtctgaagaagcatctgccagtatcagtgccagagggactgaacgaacttcaaatcatcgctgtgcggttcgaagacaagatctatgctgcagcgaccagccagtctgattatttgcgcaagatctctctgaaaatgctatctatggagacgaagacacaacctgggaatgctcaagtgattccaaatcaaatgaacctcggtcaagcatcatgtttaagaatgcccgatggaaccccctggcggcccacccaggggccagaccccgctgcagttgccgcagccgtcgccgccggcggcggcgttgacccgaacgcctcggcccccaccggaggcgattggcgcccccagcttcagcccgaggcgcgcggcaggatcggcaataacataatgtgatctctgaagaagcatctgccagtatcaaggccagagggactgaacgaacttggaaaaattgcggtgcgatttgaagagaagatctataatgaggtgaccatgcatatggattatttg

SEQ ID NO: 13419 - DNA, 577 bp, Zea mays
  Clone ID: MRT4577_11222C.1
ccccaccgaaaaaggggggccccccccgtgggggcccccccaaaaaaccaaaaaaccaaagggccccccaaaaccaaaaaaaaaaaaggggggggggaggaacaaaccccggcgggggacaaaaaaaaggagaaaaagaaaacctttccggaaccgggaacccccaccccgtggaaccaaacccccaacccgaaaaaaaaaaaaaacccctggcccccctaaaccggaaaggcgaaggggcccccctggcgaaacccccccaccccggggcccttgccaaatttgcgaaacccaccccggccccccggccccaagcccacccccccgtttgggacccaaaaaacgggggaaacaccccggaagaagaaccgttttaattgaaaaccggggcccccaccttgatggaacccccaaaaaaaaaaaaaaaaccccccccccccaaaaggaaaccccttccttgtggttcttaaacaaacccagcccccctggaaaaacggttgggccttcccccccccccccgggaagcccacgccggggtcccaccccttctggcccctgggccaaaattccggcaccc

SEQ ID NO: 13420 - DNA, 269 bp, Zea mays
  Clone ID: MRT4577_112230C.1
gcaaaaaatagaatcctttattgaaaaaaaaatgaatatattaccaaaatataggttgcaaaaaaaaaggatgaccgggacttgatccgtggggtaaacgcacccgtcccgcaatcccaacgtaccgggtcaaaggcgtttccactgggccaccaacccggctaggggggcctacgaataaccgccctaacccagcgcatgcttggcctgccgaatggccgccagagtccgctcccaaagcatcctaccggcaatggaccccaagagcc

SEQ ID NO: 13421 - DNA, 465 bp, Zea mays
  Clone ID: MRT4577_112231C.1
atggacttgctcattaataaatacaacattatcactactatcaaaatgcattcgattttctactatttctcaaatactaggatgaagagaaaatagatgactacgcattttatgactccaaaatgaataatcttccccatcaaagtgagggggcttgccaagtggaatagacaataaatgagcattcaaattatatgggatgcaagaataatcaaaataaaattaaccgtttcttctttgtagaggaatcttcgtcgtcgtcctcctttggtgaagaagaggaggcgtcgctgtcataatagatgatcttcttgatgcgcctcttcttcttcccgtccttcctctttttgtttgagcctcagtcggtgggcttatcaccttttggctcatcgatgttgagggtctccttcttcttgtcattgatcacaatcccgttgccctttgatccatctcttcgggcgatta

SEQ ID NO: 13422 - DNA, 232 bp, Zea mays
  Clone ID: MRT4577_112232C.1
acgaacatgatgaagccatcggtgtactgttctttccagccttcttgtagccactcttgagctacttcttcgcctctcctccgattccgtcgcaagcacccaggtggctgctggtctaggtcgaaaggcagagaactcggcagtcgtagggtaccattattaccagcatcagagcaagcacccgaggcaagtcgactcactctcaacatatcccaagaacatgttcaactta

SEQ ID NO: 13423 - DNA, 664 bp, Zea mays
  Clone ID: MRT4577_112233C.1
cccccctcgagtttttttttttttttttttttttttttcgtgtttttttggttccgtcacatgtgtacacataaaacatgatgtgagttgtcattacacctttctttaacaaacaatatcagcacaatttaatcgagtactccagttgtaagaaacactctcaaaagggcagctgttcttacgttaagttcaatctgccatcttatactgtataaacagctttacagactagtgatgcctcgtaacacttctggaaacgcaaccatcagctaacttgaagactcatatttcctttcacgtagttttgttggcatcaggtgtacaagagcacatacccaacggatctccttgataccatatatattatgcacaaattatatgtgcctggttcgttcaaaccttcacgatgctcccaagagctccttgagatcatatccttgcagctgaagaaaggttagcagaagtattactcctgagttccaaaatgcatgaattgtgatcggagttagaagattgcgggtctgagcatatgaaaatcccaatgcaacaccaagtataaacagctgcggaaattgtccaggagtcagatgagcaagggcaaatacagcagcactgacaagtacacaagctggagtaggaaaccacttagtcaaggacaccatta

SEQ ID NO: 13424 - DNA, 378 bp, Zea mays
  unsure (1)..(378): unsure at all n locations
  Clone ID: MRT4577_112234C.1
cgcctgcaggtaccggtccggaattaattcccgggtcgacgagctcactagtcggcggccgcccttttttttttttttttttttttttttttttttttttttttttttttttttttttttttttttttttttnaaaanggggcctggaaacgaggccatttcattgttttccgcggggggatttttccgcccatgaacttaaaacttgaacggggccgcccaacccccacaaaaaacaggcccggttaagacaacacagacaacttttggccaagaacacaacacggccggcattggcaccacgttatttgccaccgggggagagggggacctatccgccgaaaccgtaaagggggcggcccttaccctttagcgcgt

SEQ ID NO: 13425 - DNA, 293 bp, Zea mays
  Clone ID: MRT4577_112235C.1
cccacgcgtccggtctcaccattctaaacatttttcgaatctttgtttttaaaatcaacactcgtatttattgcctgaatcttctttttacccaaccaatcgaccaaggatactttcaaccagggcggtccctctattggttccatactttcctacgccttcttacgcaaatataactatttctatgtgtgcataattttatttccatgactcttttcttacatctgcttgactagaaaaccccttggctttccaaacataatcactttccataacattgtattttcaccagt

SEQ ID NO: 13426 - DNA, 150 bp, Zea mays
  Clone ID: MRT4577_112236C.1
aactaatctgaactcttacatacgtaatgctggagtgtgattcgtaccgctatgagaatgtggacccttagctgcaagaattgctattgacctcatttcatcgggcttatcactgctactgtgaactaaagtcctggatgggccagagaa

SEQ ID NO: 13427 - DNA, 184 bp, Zea mays
  Clone ID: MRT4577_112237C.1
ggttggggtttttttttttttggttttttttttttttaataaaaaaaggccggttttaggatttttttatagggtcaaatcatatcatcgggggccaattaatttttggttacagcagacccaatcggttcaaccaacatgcattttgacccacgttcttgggcccaaagactgtccccaaaca

SEQ ID NO: 13428 - DNA, 417 bp, Zea mays
  Clone ID: MRT4577_112238C.1
aacctgaacacggaatttaattccccaaaaaaaacaggacagcaaacctaaacaaataaggcaggcgggacaaccgcccccccgaccaaggggagccccaaaccaaaaaaagaacggccctgaaagggacgccccaaaacaaaagcttgcccacacaaggcacaacacaaaaccccattgtttggagctatcggggggaccaaaactctacggcagcccaccggacccgtgggacaacccggaaaacccggaccggccccagccgggggaccaaccccccaaatagggagccgaacaaaacctgggccaaaccatggacaaagcggttccctgtgaaaaatggtaatccgttcccaatccccaacaccatacaaaccggaaccaaaaactgaaaaaccccgggggggccaaaagagg

SEQ ID NO: 13429 - DNA, 731 bp, Zea mays
  Clone ID: MRT4577_112239C.1
aataccaccttcttccgctgtcaagcccccacccacctctccccgattcccatctcccaacagcaacccacaccctagcgcgaccaccctccatccccatccccacaagcacggcgctccggcgtggctcaggcaccggaccccgagcggccgcggccccctggcgcccctctcctccttcgtctgcccctcgcgcccccaaccttcctccaacgctaccggaagccgcgaccgcctccgatgcgccgccgacctgccccccgccgccagagcacctccctaggctgccacccgccgcgccaccccatctccttctgccgtcgcccctgccgcgccgcccctcccatgcatcgcttcgccccacccagttccctagtgcgccaccactgctccccgcaaccacctgctcgtcctcttcggcgcagcccccgcgatcctggtggcgctctgacgactggccgttcctctatgggccagatccggtgagattttaccaatcccacacctcctcgagccagatccggtgagatccaccggctcttcctctccaacgacggcccaaaatccacggccctggagctgcctcggtgtcctcctctccggctgacctcgtcgtctcctacctccgctgataacgtgatccgcgctcatgtgcccaccagcttctcttcttggcaggaaaaatggcctcgatccgacgattcctcctctcatcgagatcgccttctctg

SEQ ID NO: 13430 - DNA, 300 bp, Zea mays
  Clone ID: MRT4577_11223C.1
agcagtggtaacaacgcagagtactttttttttttttttttttttttttttttattttttttttttttttttttttttttggcccaattgaccttaatcattattacagaggggcggaagcagggatatcttttgactggtcactaatcaatcccatccagactgatttacttaacaagagtgaaactggcagctggaaaaaagcacgctcattcgggggaataccagacccggggctgcttgggtcatccatcttcctttttcttcccgtgcccggccggttgctttgccggctttttg

SEQ ID NO: 13431 - DNA, 335 bp, Zea mays
  Clone ID: MRT4577_112240C.1
gtgattttttatcacctgatgttctaatatatttttcttatgaatattgggaaactatcatttgttagtgttagcttaagctttgtgatcatatcgttatctacaattggttgattctcaatgatatgcattttcagtcatcagtatatattcatgttattgtaatatgagttcagcaccgaaagctttagggtcttttggtcagcaagggcattagggcaacatgtgtgctcttattctaatacaattgtaatgcatctgaccagacatgttaaaaatcagactgaaatcccaaactcccaataagtttgaaagtaagtgcttactgtttttct

SEQ ID NO: 13432 - DNA, 474 bp, Zea mays
  Clone ID: MRT4577_112241C.1
cgaggatggcgacgtggaggtggagccagatgccagagctcagtatgaatcatccggtggcgtgtatagtgtgactaatggacgccatggcgttttgcgcatcacgcagcgtactgggactctgggaggatgtgcatatcatatgtgttctctatttctctctctcttggagtcaaagtaggacgaacatggtgacgtgagtgtccgcttcttctactctgggcggctggccctctcgaagctgcgggctgccaaaaaaaaagccttcagcacgccagtcgtacgtccggcactgcatccagcaatagtgcaataccagcatccatcctgctttccgaaccgcagtcgatcggcctgtgcatttgtaatttcaccctgatctccggactagtttttattaagtatttttatctctatgtatggaagctgtatcagtttaagcagtcctctttaattctaatttctaaggggccc

SEQ ID NO: 13433 - DNA, 231 bp, Zea mays
  Clone ID: MRT4577_112242C.1
atgaccgaccgattaacaattacgaaccagcaccgaatgctggtggtagttcaaagaacactaaaggcgtcaaggagaaaaggcgttgcacgatcattgagcttgtttgtagaagcgcccacaccatacactatactattgcgaacaagaaactgccgtggacgttcatgttggagactcagcggctgctcagcgagccagcaccggtgatcagcgcgtcgccctcggggg

SEQ ID NO: 13434 - DNA, 801 bp, Zea mays
  unsure (1)..(801): unsure at all n locations
  Clone ID: MRT4577_112243C.1
ggccgggatcgntaccgattctggtctactcactacacccattacccacgcacagttgaaatctcagttacgcacaacacaatcataatgcacttcattaccccagcccttgttgctctgctcgctgcccctctggccttggccgccccaactcaggcatctgattacaaagagacctgcaagaaggactttgacaaggtgtggaactcacacgacgacaaatggtggaagaaggagaagaccttctactttgacgcggagtatgttgtaaaggccactccggatcaagtcattgccaacagcggggttcctacacccggtgagcacggtgcacgcggtctattcaagtacggcatcaatatcgcagagaacgtaatctgctataatatcacccttagcggcgtgactggcgaatatcagagcccagcgataaccgcgacacacatccatgagggcgtcaagggcaagcccggcccgccccgcctggccttcccgaaccccactggtcccgactaccgtcgcaattctgtgggatgcttgaagggccccttcttcgtcaacgtaaccaacccagcgactggtaaagaccaagccgatggcttccatgtctcccagattgtaaagaaccccaagggtttctttaccgactcgcatacctccaagtttactgctggcgctgttcgcggtcagcttcctggctactaaatgcgatatttcggggtttgcgctcataagaattcgtctattagaagtgngtgttgaggacagatgagaatatttatgaaactcggttgacactga

SEQ ID NO: 13435 - DNA, 1299 bp, Zea mays
  Clone ID: MRT4577_112244C.1
gctgcgctccctccgagcccgagcccgagcccgaggaccgggctactgccgtccgccgcaagccccgtcctgcactcctgcatccgggaacgttttaccccgtccggccgtccccctcgttctttctctcccccttctctctcgctgcgacgactgggtaggctgccgccgccgccctacgccaggtcccgaggaccaaggcattcgtattcgtcagtctcttcgccgggcgacgccagtttggttggaacttggagtgtagagggaagatttggtgatgagcagccgcagcccgccgccgaaggaccgcaggatgcgtactgaacgcacctcataccgtggcgcaccatatcggagggacagccgccatggtccaagcaggtttcggaatgatttgtgcaacaattgtaagcgtcctgggcattttgctagagagtgtcctagcgtggctgtctgtcatacctgcgggcttcctgggcacattgcagctgaatgttcttccaaaggtacctgctggaactgcaaagagcctggccacatggctaacagctgcccaaatgaagggatatgccgtaactgtggcaagtccggacatattgcaagagactgcactgctccaccagtgccgccaggagaagtgatcctttgcagcaactgctacaagccagggcattttcgtgaggaatgcaccaatgagaaggcctgcaacaattgccggcagagtggccatattgcccgtaactgcaccaatgatcctgtttgcaacctgtgcaatgttgctggccacctggcccgtcagtgccccaagtctgatacattgggcgagaggggtgggcctcctcccttccatggtgttggcgctcccttccgtggtgttggcgttcccttccgtggtggcctcagtgacgtgatctgccgggcctgcaaccagattggccatgcgagtcgtgactgcatggctggtgctttcatgatctgccacaactgtggcggccgtggccacacggcatatgagtgtccctctgtgagtctcattgagaggttcccacctcgccgtttctgaaggacgtccaagggctatccagatgactgttgttttcagcccattgtgtcaagaacactcatttccgttttcttttttttttccaaaccctaatggattctagatctttcagattcttaacttgtcagcactatttgtgattccctaatggattctagatatttcagattaataactcgtcagcaccatttataattctggattttctaccaaaaaaaaaaaaaaaacctcgagag

SEQ ID NO: 13436 - DNA, 2459 bp, Zea mays
  Clone ID: MRT4577_112245C.1
caacgtagaggggaccgagcaccgaggcgctcggggaaatccgtaggttaggggacggctgccgcaaaccactccccgttttttctccgcaccgccctgctccccgaccccaactgctgtctccttcctcgggtaatgcgaccgcgcgccagagcatgctccgcccggagcccgcgctagggttcctcgccgccggccccgtgcgcgcgtgcaagccgccgcccgagcgccgccgcaagaagcagccaccgacgcggcggaggcgaccggccagtgccgcaacggtggtgggactgggaccacgcggcgcggccgatccagatcccgcgcactcgtccgcgctgctgcctctcaccagcggcggcagcggcagcggctttgcctcgcggggcacggttgcgccagacgaggaagaggggagagacggggcgagctcggctgaatcgcaggaagtggcagaagcagcaaacgattcgttctcctactcactaagagagtgccagaagcagcggcgtctcaagtcagagaggtctgcactggtgcggccaccggcctcgcataagctcaataatgccggaggtattgagcttctagtgctctcgccgaggtgcttgattggtggtaacccgggaggaatgagcaagagctcaacgacatcatcccggagcagatcaggcacaggcacgttcccaagccctgggactccgagctgcaaccggcattgtgcaggcagcatgcagtactccaagggttggagttcagagcgcgtgccactgggcactggtaggaatagaaggtatgggggcagtggggttgtgcttccatttaacaatgggaggaagctgccatcgaaatgggaggatgcagagaagtggatcctaagtccggtttcctgtgatgggatggggaggatgtctgcaccagctccacatcatagacggcccaagtcgaagagtgggccacttggccatccagctggcattccaggggcttatgcggctgtttcaccgcttgttccttgctttgatggtgtgctggcagcagctaatttcgcagcacattcacctttctctgctggggttctcataccagagcacgggcgcattggcgacttcagcagtggaagagacagatgtggtgatgacggtagcagcagatcctactccgctgagaaagagtcctatatattaagatctgcaagcatacatgcatggacagaaacacttatggaggcatctgcttttgctaatatctcagaagaaaccgtacaagatgataaactgcaacgccagacagaagcaacttccatgatttccagtccaatcataaagaaagacatcggcacacagatgagtcctgaggatagtatatcttctccaaaagcgaggcattcctgctccagtctgccttcaaggcatctgataaaagaaacaaatagtcatatacctaaacctgaaattagggacgtgcaggttgatgaccaagtaactgtgacccggtggtccaagcgacatgtaacacgaggctctgataagaggtcaacaaatattattgaatggaggaagaagactgttgaaacccgagctccatcttttgatgaaaaagaaagagaaggatgcatgtcaaagtgcaaaagggaggaagcaaagatcacagcttgggaaaatctacagaaagcaaaagcagaggcagctattcgaaagctggagatgaaacttgaaaagaaacgatcatcatcaatggacaaaattttaggcaaactccgctctgctcagaagaaagcacaagacatgcgaagtgtagtttcttctagtgaaggtcagtgtagtgtgagggcaaccaagaagacatcttcctctgtcaaaactggcaggcctttcagctgctgctttacctaccgtgcttgctagttgtgatacacagttggtgcctgtggctacagcaatggatatagttctactcgttatggacgcgaagggaagtcagttgggttttgactgcaaggcctaattgttaatgagatttgcactgatgaatgagatatcgttatggagcagcagacgaagacagccacgcgaaatccactcatgtaactgatggagtggactaatgcagtctagtatgcgacgatcaatctctgtacacccggtagaaaaagttcatgagcttcatggcagttagaatcaggattgagctgatattcatcccgcttgatgtgtagctagcattcttgtaactggaattgtgtgtgtaatgcaaatcatgggcgcattagactttaatgaagaaaaagtcagggctgcgcctttagaatgcagcttgctcactttttgggtttagtactgagacttggcttgcttgttaaaaaaaaccaataatataaataaaaactttaaaaaaaaaaaagggcggccctttttgcctggcagcaattggaactgtgacgaagtataatttcc

SEQ ID NO: 13437 - DNA, 1153 bp, Zea mays
  Clone ID: MRT4577_112246C.1
attcggctcgaggcccgaggaccgggctactgccgtccgccgcaagccccgtcctgcactcctgcatccgttcacgttttaccccgtccggccgtccccctcgttctttctctcccccttctctctcgctgcgacgactgggtaggctgccgccgccgccctacgccaggtcccgaggaccaaggcattcgtattcgtcagtctcttcgccgggcgacgccaggtttcggaatgatttgtgcaacaattgtaagcgtcctgggcattttgctagagagtgtcctagcgtggctgtctgtcatacctgcgggcttcctgggcacattgcagctgaatgttcttccaaaggtacctgctggaactgcaaagagcctggccacatggctaacagctgcccaaatgaagggatatgccgtaactgtggcaagtccggacatattgcaagagactgcactgctccaccagtgccgccaggagaagtgatcctttgcagcaactgctacaagccagggcattttcgtgaggaatgcaccaatgagaaggcctgcaacaattgccggcagagtggccatattgcccgtaactgcaccaatgatcctgtttgcaacctgtgcaatgttgctggccacctggcccgtcagtgccccaagtctgatacattgggcgagaggggtgggcctcctcccttccatggtgttggcgctcccttccgtggtgttggcgttcccttccgtggtggcctcagtgacgtgatctgccgggcctgcaaccagattggccatgcgagtcgtgactgcatggctggtgctttcatgatctgccacaactgtggcggccgtggccacacggcatatgagtgtccctctgtgagtctcattgagaggttcccacctcgccgtttctgaaggacgtccaagggctatccagatgactgttgttttcagcccattgtgtcaagaacactcatttcccttttcttttttttttccaaaccctaatggattctagatctttcagattcttaacttgtcagcactatttgtgattccctaatggattctagatatttcagattgaagacggggatacttgcccttacgaactcaaaaaaaaaaaaaaaagacaaaaaacagaaaaaaaaaaaaagggcggc

SEQ ID NO: 13438 - DNA, 333 bp, Zea mays
  Clone ID: MRT4577_112247C.1
accggaaccggaaattcccggggcgcctcccagggctcttttgttcatgtacagcattaataccgcgggggggggggggaggggaacattctattcctaggccagcgggcacgaaaattgcgccgcctcgtactgtcaacttgctacatctgccaatcggtgggatcatagcgccttccttcagctacaggtgggacgaggaggcttatgcggttctcctataagcaggggggggggggggagtctttattgtccatatcacacctggagatctctctgaagaggaggcaacatacactgcatcatcccttatcaacccgtgagcccgtccta

SEQ ID NO: 13439 - DNA, 135 bp, Zea mays
  Clone ID: MRT4577_112248C.1
cacgcgtccggccactcctgacactcattacattaacataatggttgtaagatctgaattgataagcgtccggggccccccctagccattgtgtaaccaatttattctgaacccctcttacttgaaaacaagtta

SEQ ID NO: 13440 - DNA, 2245 bp, Zea mays
  Clone ID: MRT4577_112249C.1
aagacatcggcacacagatgagtcctgaggatagtatatcttctccaaaagcaagacattcctgctccagtctgccttcaggacatctgataaaggaaccaaatagtcatatacctaaacctgaaattcgggacgtgcaggttgatgaccaagtaactgtgacccggtggtccaagcgacatgtaacacgaggctctgataagaggtcaacaaatattattgaatggaggaagaagaccactgaaacccgaactccatcttttgatgaaaaagaaagagaaagatgcatgtcacagtaagatattgcctatttctgcccatcagctaacaatcccattttgcaccactgcccagttttgaattggatttacacaaaaagaatatattgctccaattgtcatcttgtaactttcaatactccaagctgtcgttgtcgtttatcatgtttattaagaaaggtcagctcaatgttgaagtgaagctactatggctgtaatacctgttcaaattcacagaaaggagtaagtataaaaggtgctgaatgttgattagactattatatgacttgctaatatgctcttagtgttattgagaaatctacataacttgaagtcagggtcagatggtataagttgcagatattgagcttatgtgatgatacactagaaatattttacccattttcatcctacagctagtggtacatgctgacatgcagaatatcgcttaacatggggtcattatgttgaattgagaaccgaacagatgtttgtatattagagcgcctacctgagctttgaaccatggcattcaaagactggtcattgagaactcattgagaactctgattttagcaaaattttcctggccagcgagggtctggtaatcccctcttttaagaatgtcttcggtggactgtgtaaaatagtggacgtggtactgtagatgacaatgtttgcagaatgaattttgtttgcagcgtgaagtttgaaatagaggatgccataggagatgtcataggggagctggcgagctgctgaggacaacctaagaggaacccaagtggatatttttctcgcatggtctagtttttttcccccacaatccattagaagctcagtctataaagtgttgttcattttctagttttcttactgatgaggtggtaaaataaaaaaagcatgggtcaattagaaagtctagtaattcatagaattgatgcgctagtcttacacaatatttttctttgccatttcgaaaaaagagaactcttatactgaggatataaatctgctacattttgtatttagagacctgtttatttgtgttttaaggtgcaaaagggaggaagcaaagatcacagcttgggaaaatctacagaaagcaaaagcagaggcagctattcggaagctggagatgaaacttgaaaagaaacggtcatcatcaatggacaaaattttaggcaaactccgctctgctcagaacaaagcacaagacatgcgaagtgtagtttcttctagtgaaggtcagtgtagtgtgagggcaaccaagaagacatcttcctctgtcaaaactggcaggcctttcagctgctgctttacctaccgtgcttgctagttgtgatacacagttggtgcctgtggctacagcaatggatatagttctactcgttatggacgcgaagggaagtcagttggggtttgactgcaaggcctaattgttaatgagatttgcactgatgaatgagatatcgttatggagcagcagacgaagccatcgagcaccgcgaaatccactcatgtaactgatggagtggactactgcagtctagtatgcgacgatcaatctctgtacacccggtagaaaaagttcatgagcttcatggcagttagaatcaggattgagctgatattcatcccgcttgatgtgtagctagctttcttgtaactggaattgtgtatgtaatgcaaatcatgggcgcattagactttaatgaagaaaaagtcagggctgcgcctttagaatgcagcttgctctacgttttgggtttagttctggaggcttgcggtccagcactgagacttggcttgtttgtttattggttcgcagcgagtggaaatttgtaactgaggcgacaaaacccctatttcccctcctttttggtgaacatgataaacgtcgccagcttccgttagggcaaaaaaatgcacaaataacaataaagggcggccgccgactaatagcc

SEQ ID NO: 13441 - DNA, 428 bp, Zea mays
  Clone ID: MRT4577_11224C.1
cccacgcgtccgccaaaagcagctcctttctcgggggtccggccacttccaggagttcttgcctgcgaagcttgctccgttctttcgcctgcttgccctcactcctctatcgccttggcctgcttattgcccagacagtttctgcttgaccccacgattcttcactgatgattcacagaaagcttggcgagcacgtacataacttgccgatcggacagttgatggacggcacgagcccaaaccgtacaagtccacaataatttctccctccggctccggctccgcctagactcactcgtccatgtcgcgcgccggccgctccctgcccctgcccgtggcggcgctcctgctcgcggtggtggcgctgtgcgcggcgcggcgcgcgcgcgcgatcggcgtgaactggggcacgcagctgagccacccgc

SEQ ID NO: 13442 - DNA, 2439 bp, Zea mays
  Clone ID: MRT4577_112250C.1
gtaatttaaaaataactagccaaattgattacaaactgcaatcactaaacctatatgttacattttagaatgaacgattccatgtgaattttagcacacaaccaactacccctaggtctgtatcatttttcaatttgcaagcacaaataacaaagttttctaatactatcacagaactaatttatcacgatgatgggaaaagtatataatttacgaaaaaaaaatctactaatctatttccatcgaactgaagaatcaagaatgtaaagaggaactaggatgagcttggtttctgcctctcctggctggaggtgtcccaaacatcttgctcctttgggctcgaagcatatgagccacatggcatcccagtgcagccttctacatggttcacaagtgtatgatagaacaaatgattcaccatggaaaaccctagcacaaagggaggagggaggggggagggcaagtaccagccgccaccttacagggagaagaacaatgggaaggagctttgctggcattgcttctagtcttggtcctgttggcgcattggacgcgcgagggtcacatgacaacaaaacccagcctcaagtggcgatgctcctcctttccctctgggttgatgcgaattgggcttagaacaaatccaaccacatcattaccaaattctcttttggccgaaggcagttcctttcctggatgccgtggatctgcccctggaccacgccattccataggcttccaaatgaggcctttcaggacccttgtgacctaccatgggaacttgagcatgctcatagtgaaggttggtgatttttgtgggacatagccacataggattggattttagtctggttttggtgttttgctgtggacagaaagaagaccagaggtttgtgggagtatcgaaggtggtggtgattttgtagcgtggtgttgcagtttggttggaacttggagtgtagagggaagatttggtgatgagcagccgcagcccgccgccgaaggaccgcaggatgcgtactgaacgcacctcataccgtggcgcaccatatcggagggacagccgccatggtccaagcaggtttgagctaatctaagtcaaacaggacgagtgtttggcattgttcttccaaacatcactgcttcctcttgttatcatgtatatatttggctaaatgctatgtgaaattaccataattgttattttatttagatgtaaactttgcctatatttatcccattgcaaccacttatgcatgtatgtagcttaaataagggcacttgatattggttaatgtagcactatttttttttctgaaagtctagtaaaaagtgtatggtaaagtgatctgggattgaaattttttggatgaattcatgttgtgccatggttttaggagaaagcctatgcaggattgtaactagaaatgagtcatgacaagaatggtgaaattacttaaaaatttatgtgaatggaactgtaatatcttattattcagacatttggaatcttatgtatcctttagttatttccctttccattgtgcaggtttcggaatgatttgtgcaacaattgtaagcgtcctgggcattttgctagagagtgtcctagcgtggctgtctgtcatacctgcgggcttcctgggcacattgcagctgaatgttcttccaaaggtacctgctggaactgcaaagagcctggccacatggctaacagctgcccaaatgaagggatatgccgtaactgtggcaagtccggacatattgcaagagactgcactgctccaccagtgccgccaggagaagtgatcctttgcagcaactgctacaagccagggcattttcgtgaggaatgcaccaatgagaaggcctgcaacaattgccggcagagtggccatattgcccgtaactgcaccaatgatcctgtttgcaacctgtgcaatgttgctggccacctggcccgtcagtgccccaagtctgatacattgggcgagaggggtgggcctcctcccttccatggtgttggcgctcccttccgtggtgttggcgttcccttccgtggtggcctcagtgacgtgatctgccgggcctgcaaccagattggccatgcgagtcgtgactgcatggctggtgctttcatgatctgccacaactgtggcggccgtggccacacggcatatgagtgtccctctgtgagtctcattgagaggttcccacctcgccgtttctgaaggacgtccaagggctatccagatgactgttgttttcagcccattgtgtcaagaacactcatttccgttttcttttttttttccaaaccctaatggattctagatctttcagattcttaacttgtcagcactatttgtgattccctaatggattctagatatttcagattaataactcgtcagcaccatttataattctggattttct

SEQ ID NO: 13443 - DNA, 1307 bp, Zea mays
  Clone ID: MRT4577_112251C.1
aggcatctgataaaagaacaaatagtcatatacctaaacctgaaatagggacgtgcaggttgatgaccaagtaactgtgacccggtggtccaggcgacatgtaacacgaggctctgataagaggtcaacaaatattgttgaatggaggaagaagactgttgaaacccgagctccatcttttgatgaaaaagaaagagaaggatgcatgtcaaagtttaaggtgcaaaagggaggaagcaaagatcacagcttgggaaaatctacagaaagcaaaagcagaggcagctatccgtaagctggagatgaaacttgaaaagaaacggtcatcatcaatggacaaaattttaggcaaactccgctctgctcagaagaaagcacaagacatgcgaagtgtagtttcttctagtgaaggtcagtgtagtgtgagggcaaccaagaagacatcttcctctgtcaaaactggcaggcctttcagctgctgctttacctaccgtgcttgctagttgtgatacacagttggtgcctgtggatacagcaatggatataggtctattcggtgagtcccactggcatttgtattatgtgtaatttaacatctaaaactcacactagttcagcattaatgctttactgcttgtaattttgtatttgtgtaattttatcgaatttattaacttttaacctattatctcaatagtttctaatgctagaagtggctatctttctcaagacctcttctcaggcaacagttatggacgcgaagggaagtcagttgggttttgactacaaggcctaattgttaatgagatttgcactgatgaatgatatatcgttatggagcagcagacgaagaaagccacgcgaaatccactcatgtaactgatggagtggactaatgcagtctagtatgcgacgatcaatctctgtacacccggtagaaaaagttcatgagcttcatggcagttagaatcaggattgagctgatattcatcccgcttgatgtgtagctagcattcttgtaactggaattgtgtgtgtaatgcaaatcatgggcgcattagactgtaatgaagaaaaagtcagggctgcgcctttagaatgcagcttgctcactttttgagttttaactgggcccagtattttgaaacttgtttggtacagttctgaaggctttcggtccagcacttagacttggcgtgtttgtttattggttcgcagcgagtggaaatttgtaactgagactacagaacccctatttcccctcctttttggtgaacattataaacgtctccaacaaccgttagggc

SEQ ID NO: 13444 - DNA, 222 bp, Zea mays
  unsure (1)..(222): unsure at all n locations
  Clone ID: MRT4577_112252C.1
cctatagaacagatgtcgactcgctgctagcccttgctcctcagtcaggcctgttatccgagcccctccagctagcgtgcaagacctttcggcgccgattcacaaccgtgcatgctccaccatgcccacacgtccgtcctgcaccaccatgcacacgcccatgcatccttatctcactggacacttcactagtaaaatggacctnntgataatattcagcga

SEQ ID NO: 13445 - DNA, 477 bp, Zea mays
  Clone ID: MRT4577_112253C.1
cctcgagccggcgggacaaagttgtttgtgcatcgcggcggcgacaagggggcgacgaggcaggcggagcgggcggcgactacagcggcagcagatctcacggaatggcggcgaaggcaatctcgagccccgtgccggtggagtggtacccgacgctggccgtcgtcatggtatccgtaggcctcatgttcaccgcctccttcttcatttatgaagcaacttcatcccggaggagccgtagcctgttcgtgcttcttgcaagtggtgtttatgtctgatgactggctatgggccgtgtgtgcttgtgttctgcatcccgagttgtagacttggttatgacagatcctcaaagctgttgtcctaacgaatatacagcatttgaacttattctagaacgatgtatgggagcaaccgagttaaagcaacgtttccttccaggtctgcattatatatcatcaatctaaatccctgttccct

SEQ ID NO: 13446 - DNA, 308 bp, Zea mays
  Clone ID: MRT4577_112254C.1
ctcactcgatcttttacgacaagtctccttactccgttatactaaaccgggggagggtacattgtcaagtggtagtagaattacttctaacatatataaatctgcattctctaataatactaattattttttgaccggtgcatcaaaaacttctattatccttatttccgtgcttttactggtctaaaatatcacatagccaacacccatacacaatgagatgctaaaggattaaatctgtcttgtgcattcaaatgatgtttacattgactcaatacgatctaagtctcgtagcgcggtcagcaaca

SEQ ID NO: 13447 - DNA, 874 bp, Zea mays
  Clone ID: MRT4577_112255C.1
cagccggccccggccgggattattcggatccgaagcccacgaaaactggcgatcgtcccggacggatccatttggctctggtcgtcacaaagttgtttgtgcatcgcggcggcgacaagggggcgacgaggcaggcggagcgggcggcgactacagcggcagcagatctcacggaatggcggcgaaggcaatctcgagccccgtgccggtggagtggtacccgacgctggccgtcgtcatggtatccgtaggcctcatgttcaccgcctccttcttcatttatgaagcaacttcatcccggaggagccgtagcctgtcaaaggagatcgcaacagcagttgttgcttctgttttcttgggctttgggtctctgttcgtgcttcttgcaagtggtgtttatgtctgatgactggctatgggccgtgtgtgcttgtgttctgcatcccgagttgtagacttggttatgacagatcctcaaagctgttgtcctaacgaatatagagcatttgaacttattctagaacgatgtatgggagcaaccgagttaaagcaacgtttccttccaggtctgcattatatatcatcaatctaaatccctgttccctaaaaaaaaaaaaaaaaaaaagccccaaaaaaaaaaaacccctaaaaaaaatccaaacatatccctattaattgtgcgcttggcccccccctcgcttattcccttccttctgcctctatttttcccccccttcaaattcccatttcccttatccttccccccccccccctttccccattccccctatttttccgccctccctttatactcccccaatttcccccccccctttatccccccccttttttattccctccccccccccctccc

SEQ ID NO: 13448 - DNA, 412 bp, Zea mays
  unsure (1)..(412): unsure at all n locations
  Clone ID: MRT4577_112256C.1
aaaaaaaggggcgggggcctccatccatccatccgcccggttttttacccatttaagtctaaaaccctaaactcacggcccatgggtgggggaattcccggggcaaaaaattcattacagggggcccctccggggtacaaccggccgggtcagccccacacaaaagcaaactttttgggggtccccatgttgttggggggggccgggcccccccttggaggggggcctgggagggggccccattgggcccaaatagttgcctacccggacgtaccccggcgcgttgtaccccccaccgggggggggaacgggcacgggcacaggcccgggcacgggccccccngggaactggggctgggagggggggaaatttttttgcaacaaaatgggcccccccccggggtgccttggg

SEQ ID NO: 13449 - DNA, 464 bp, Zea mays
  Clone ID: MRT4577_112257C.1
gtaccctccgggctggccggggctcgcctcgggtcaaaccctaagcagggagttgatttatccgctgcagccatgagtaagttgcagtctgagtctgccaaggatgccatctcccagattgttggggatgccaaggacaagaattggaagcttacttagactgacataacttgagattgacttccaaaatcaatacctacagaacgtccctgcctgcgagattctcgaagcgaaacgcgcggccttctttcttcaacccagcctggcctcctgaccttcttaggtcatgcctatctcgctctcgcgggattcgtcatgcgcgcgcgcgcacttctgggttcttgctgggtccgctcgcggctaagatcgcgggtacgattcgcggccgccacctaagcgacgctccaggtggtcctacgtcctggttcttttaattaggtgccgccgcgatgagcgcgctcgcc

SEQ ID NO: 13450 - DNA, 364 bp, Zea mays
  Clone ID: MRT4577_112258C.1
gtgaatatttttctaaagcttactcaaatagttatgttatggtatcagtttgaaacaatctcttattgtctctgggaactatttatacataatttctggcaagctacctaatgcagttatgcggtatgcctaccaactttctgtattaatagcctgatatttgactatcagagcaagtcagtaaactcactacctttgatgctgttttctatgacaatgttacacccagcttatcggaattgtcataaagaagcttgaactctatcaacccaactgtttgtgcgttgatcaatttatgggagcctttgcctttctaataacttattgtttcaaaacatatatggagacttggtttagtttgcta

SEQ ID NO: 13451 - DNA, 142 bp, Zea mays
  unsure (1)..(142): unsure at all n locations
  Clone ID: MRT4577_112259C.1
cccacgcgtccggatttaagtgtgcagtagtcgtaaatgataggaatttatgttttagtttggtgcccattngatctagagtngattttaatttatttacgactactgcacacttaaatgcgcacacgaagacgatctctgc

SEQ ID NO: 13452 - DNA, 1008 bp, Zea mays
  Clone ID: MRT4577_11225C.1
ggtacccacgctcgggattggtagccccctgtcaacatctcgatttcgaatttcacccagctccgcacgcgcctcaacccttcctctcgggcggcggcgccggcaaggcggcagccaaccggagcgggagctgcgatgaagaagatcttcggcgccaagaaggacaaggggccgcccccctccatccaggacgccaccgagcgaataaacaagcggggtgagacggtggacgagaagatcaagaagctggacgaggagctagccaggtacaaggagcagatccgcaagacccgccccggcccgtcccaggaagccatcaaggcacgcgccatccgactcctcaagcacaagcgcatgtacgaggagcaacgcaacatgttgtacaaccaaacctacaatctcgaccaagttggctttgctgccgatggcctcaaggatgctcagcagactatgaatgcaatgaaggcagcaaacaaggagctcaagggaatgatgaaaactgtcaaaattgatgaaattgataatatgcaagatgaaatgacagatctgatggacgtgagcaatgagatacaagaaactcttggtagaagctacaacatccctgatgacgttgacgaggaagaactgatgggcgagctagatgctttggagtctgatatggaatttgactcagctgcagtcccctcatatcttcaaccagattctgactttgatgctgacctcaacttacctgctgcaccaagtcgccctgcaatggtcccagcaggcgggctgcaggaggatgagctaggattgccagcggtgcctcgggcatcacttcgcagttagaaataatcttgtgtttcgattttaagttggtgtgaaaactctgtagtttgtgtctgagtctgaacaatctaatgcttttcgtcatggtaatgcttcagtttattgcacttcctgttgctgctgacgtttcaggttccttttttttgtcattctggaatttttcatctgtcacctgtcact

SEQ ID NO: 13453 - DNA, 343 bp, Zea mays
  unsure (1)..(343): unsure at all n locations
  Clone ID: MRT4577_112260C.1
cgagaaacacacatatnatnngagaccaactagcaacatagaaagcacaanaggggaccaacaagggcagcnnaaaaannnngcctacgtaagctccnnggacnnacagaaagngcngaaacggcgaccaaaaacccacaangcncacaagcaacaatagnnaaccttattacaccgtacctataaccaacggtgtctaaagaatgtgaaaagcgaaggnttaaaccctacaggatccaacaggaaatggaagatggaatattaccttgatgacagttgtaggtttaacaatgataagatatattacagaattaacattaggaatataaatttgaaaagaaaa

SEQ ID NO: 13454 - DNA, 530 bp, Zea mays
  Clone ID: MRT4577_112261C.1
gggactgattcctcaacatccaactatgacagttttgattcaggaagttcttggagtggatcagaaggagatgatggtattgaaacctttttcagacgctgtggttttcagatactgtctagacagcacatatgaccggtcaaagtttcttagaggtgcatctcttactgttaacaaagatgacttggaaggacttgatgaccgagtctcgttatatagtggatgctcccaccacagaaaccaaatattaatgtcgaagagattgttcacagagggtgctgacacttggaacatgatctcaaagaacaatgaacgtgctttaagggcgggatccattccacagatcagacctgcattggggaacattgtccattctgtgcgtaggggtttatcagagcaggatcttgaggttttaagaggcattgctggttgaggggaggacatatgaagagaagaaattgggtggctatggagcgggttattcccagtgggtactatatgatcgagagagagaaataaaaagctggtgg

SEQ ID NO: 13455 - DNA, 807 bp, Zea mays
  Clone ID: MRT4577_112262C.1
cactggcggggcgatctcggccatgtccagcctgtggatggtgccacagctcatgatcctggggctgtcggaggccttcaacctcatcagccagatcgagttctactacaaggagatcccggagcacatgcgcagcgtggccggggcgctcgccttctgcaacctggcgctcggcaactacctcagcggcttcctggttaccatcgtgcaccggacgacggggtccgggcagaactggctggcgcaggacctcaacaagggccgcctcgacctattctactggaccatcgccggaatcggcgtctttaacttcatctacttcgtcatctgcgccaggtggtacaggttcaagggggccagcaactgatccgccgaggtaaccgtcgtctcacgatcacgacgagtgcgggcatgaatggggctcagctctatgtggtcctgatggcagtttgcttggtggcttgggtaattatgttatggccttggcagagcaacaggaaaaaaaaggggccttaaaataaggtcatgataattattttgtatttaccatagtagttgtttgatatcgacgcctctctctctctctctctctctctctctctctctctgttattattttatatttttgttactgtcctttcatttgaatctataggatggtcaaagtggctgatgaaagaggagaaagaaacaaaacagttggtttcttgttacttgtaagtggttaaactgaaatacaaatggatgtaagattgaatgaaagctttagctcagttaccaaaaaaaaaaaaaaaaaaaaaagcggcc

SEQ ID NO: 13456 - DNA, 343 bp, Zea mays
  Clone ID: MRT4577_112263C.1
attcgtctcgagacgttatatccagagcgtttttcctcttacacagtttgttttgaaatacagaaaaccctttcacattttccacggtggacataacagggcttgctcttgacagaaaaccactgtgggagcgtacataatgctgcgcactaatttgccactacataccgtgtatctagccagacttcatgatgcttacaataggcatgctccaaatttaaagaaggcaagggctcgaccgtctcaaggcagagcagacttactgcgatcggatgggcgcattgttctcatagtccatatacttatcagcatgcacgcactggttctagactttctcaaacac

SEQ ID NO: 13457 - DNA, 646 bp, Zea mays
  Clone ID: MRT4577_112264C.1
ggtacccggccctccctgcggtttttttttcttttttttttttttttttttttttttttttttttttttagccaaaaaaaatttctgactagcaagaagcacaaagcaatttaattatctgctcataatttacaggaccatcaagctaattatgatactcaagccgcctttttaacgcgcgcgcccacacaaatgtaacaacttcaaaacaaaataaaattgacaggggacaggaaacaactaaaacatactcaagggctgcacttaaattatgcatgggacagggggacagggtgtgttgttttcttctgaaaaaatcactgggcagtcatgggtgtaaatgtctggagacgggctcactctgcattcactgcctcgctggaggaactggagaccactaatttcaccggagctgaggatgacaccgagttcctgaagctgctgtttgagtgcaagaacaaacctgagcgaagtttcaataccatccagatcacaatcacacacacacacacacagttttgcgctttggggggttgtcaacccctgcccatatatcagtcaagctattcacaaatcaccgaaggcgcgggagtatcccggcagctagcacggctcagggctgaaagagccgccacgtggcgtcacc

SEQ ID NO: 13458 - DNA, 710 bp, Zea mays
  Clone ID: MRT4577_112265C.1
ttgggtacctcgaggccggccgggaaaatacgcctctgctttagcagtagtttccaaccagaggcaggcacctcgagaggcgggtgaacatggagggcgataagaaggcgggcgccgtggcagagaagaaggcggcggcggcggatcagagcagggaggtggccgctggtgatgtgagcctgaaggagctgtccaggaggctcaacgacttcgccaaggagagggactgggagcagtaccatagcccccggaacctgctgctcgccatgatcgctgaggtcggggagctgtcagagctgttcatgtggaaaggggaggtgcgcaagggcctcaccaactggcactagacaaccaaggactgcctcacaggatgcctctcccactccgtgatcgacaagccgtgcatctgctccttgacgacgtggaggacgagcactaggacgccctcgccaggatccatgtcctcgacgcccagctcaaggcgctgatgcaggagaacgtgcggctgaacgagcactaggtcaagtccaggtgggactacaagcccgccgcgcaggcgcaggcggcgtcccaccaatcctaccaccagctgaagtcggcggccaagaggtatagggaagactcgttggtggctacgacagccgagtcagccaatcatgtctaccgcccagcgtctgagtcaccgccagcggacggctacgatgccctgc

SEQ ID NO: 13459 - DNA, 363 bp, Zea mays
  Clone ID: MRT4577_112266C.1
actcatggcttatacctataaatttcgcaagatctgaagaaatgcatacaatgccacaaacaacgccggggaaaacggccgaatcatggaactgaaccacccatcatatcagaacaccggcccccccgcataataacctacccttctgggagccccggaacgaaggaacccggcctccactaaagaaaatacaatggcctcatacccaatacaccaggggccccaaaggacttggccccgaaagaaacaagccgcaaactctttgcacagcgggcaggagcgaagcaaaaacaaaacacgctgatccaaaaaattagacccccttagggcctgtacccgccactaggcagaccacataccccc

SEQ ID NO: 13460 - DNA, 1088 bp, Zea mays
  Clone ID: MRT4577_112267C.1
ttcatttttaattctggaaagttcacgacctcatccattctttcttgagaaggaaactgcattaaaaaaccagaaggacatttggtggccttccaagttctaccccatggaaaatggaggctaaaatcctgttccagatcttcacacctaaccccatcctcaagcactttcaccaaacctaagaaactttttctaggttttttagcagcatttttagcaaactaagaagcataaaaccctaatccatcagccgccatgcccacaataggcatagtaggtttgctttgcttaggccagacacatttagcagtaacatgcgtttctttcctacaaatctcacaccaaagaggcttgaaacaatccctggcgtgatgcccttcatcgccacatttttggcaaaaaagacgacgaccaatatcaagatccatagcagcaggatgcgtagggggatttttgttacctggatcagcaccctctcccgatgaagagatctgagaatcattcttgatctccgtcttcacatgcggtggtctcaaacgccaacttaaatttctgtgccttccccagggaggtgagttttgtctctgcggcttggagtttgggcgttcccacttcgtgttcttccctttaggatccattcagccaagtctctagggatttgggaaccaatccctactctcggccacggatcagaggaaggaagaggacgaataggggcaaatctccaccccccacagaaactggatttctttttggtaggcagccgccaaagagcagagaggaaagccgtgtgaaaaaatatatgaaacgttgcttttcttaactgccgaaattaccatgactctattggaaatcactatttgcttcagtacaggtttcctgcatctttttggtactgcggtcaggtggcagcaaaatgttggtcaaacactcaaactgtaaataactgtcgtaaagttggttggccatgacctatctgttttcaaaagtaccatttgcagccatgaatggttactgcaagcactaaacttttacatggcatggggattactgatgaaacatcagttctggactctacctcttgatcg

SEQ ID NO: 13461 - DNA, 5052 bp, Zea mays
  Clone ID: MRT4577_112268C.1
agagcgtcctgcgattatctcctatgctgcggcggcggaggaactttctttttcgttcatctccagtcttgtcgctatcctgccgctcaaccgtgtcctcgcccaccccgcgccccttcccgcgctctgcagcgaggggccggtgtccgccagcgctgccacgtgccacgtgctctttcatctctgaggggtttcccgtcttcctcgcctgctctaatggctaaagaacaggatggatcccccaaggtgcgccacccagaattccaaaggatgcgcgtaactctcaccataggtgtcattggcctctgtgtcacagcatacattcttggtgcttggcaaggtacctcgaacggcattagttcccccttaataagtaccagaacccagtgcaaagatcccgtgcgatcatctggtgctcgcctggatttccaagcccaccaccaggtgggcttcaatgaatcggcgcttgctgtggagaaattcccaccttgccagctcaagtacagtgagtataccccttgccaagatccaaggaaagctaggaagttcccaaagaaaatgatgcagtacagggagcggcactgcccaaagaaagaagacatgctccggtgcttgatccctgcgcctcgaaactatagcaacaccttccagtggacaaaaagtagcgactatgcttggtgcaattacattcctcatcgggagctcagtattgagaaggctgttcagaactggattcatgtcgagggagacctgcttagattccctggaggtggcactatgttcccacatggtgccgatgcttatattgatgacataaatgcccttgtaccattaaatgaaggcaacatccgaactgcgcttgatactggtatgtggagttgcaagctggggtgcttatcttatgacacggaacatcatcaccatgtcttttgcgccaagggattcacatgaggcacaggtacagtttgcattagagcggggggtaccagccatgattggagtgatggggactgagagaatcccatatccggctagagcatttgacatggcacactgctcgagatgtttgatcccatggaataagcttgatggtgtctatcggattgaagtagacagggttcttaggcctgggggctactggatcctctctgggcctccaatccattggaagagtcactaccagggctgggagaggacagaaggagacctgaagcaagagcaagatgagattgaggacttggcgaaacggctctgctggaagaaggtcgtagagaaaggtgatcttgctatatggcagaaatctatcaaccacgtagaatgtgttgacagtaggaaggtttatgatgctccgcagatttgtaagagcaatgatgtggattctgcttggtacaagaaaatggacacttgcatatctcctctcccagatgtgaagagtgaagatgaagttgctggcggagtccttgagacatggcccaaaagagcatttgctgtccccccaagagtaatccgcggttcagttccaggcctcacccctgagaagttccaagaggataacaaggtgtggtcagagagagtggatcactacaagaaattgattccaccactgggcaaaagacgatacaggaatgtgatggacatgaatgcggggataggtggctttgcagctgcattgatgaagtaccctctttgggtgatgaatgttgtgccttcaggcttggcccatgacaccctgggtgttatttacgaacgagggtttattggcacgtaccatgattggtgtgaggctttctcaacgtacccgaggacctacgacctcatccatgctgataaagttttcagcagttaccaggacaggtgtgacataacgtacatcctactggagatggaccgaattctaaggcctgaggggactgtgatcatcagggacaacgtagaggtgttggtgaaggtacaagctatcactggaggcatgaggtggaagagccaaatcatggaccatgagtccggtccattcaaccctgacaagatcctagtggctgtcaagacttactggaccgggaagctcgtgcaaaaacaataatcgtcgccttgttactgtttttcgtctgcgaaaatgtaggcatgacttgcctgtcagttctgtcttcattgccatttttttatcctaacttcaggatatctgtatataggaggcatgtgaaccatgtagctggaattggtatcaaacatcattagccacgtagcgtatgtgacacattgcaatggtgtataagatgttcactcatatatttggtgtgatattgcaatctaataacatgatgcttggtgtgaaaaaaggagattgtaattgacaacatgttcctgtcaaaaatacgatgacaaggttgtggtacagacgaattctgaagattatactatggccaagtgctgtgaaaaaagagagacgaattctgagagccaagggctgtgataaaaactgtgtgaattgcagatagtgtctccatgcagatgtgtgctgagataatccatttaaccatcaaaactactaaatgagggctccagtctcagtaggaagcccaggcggctgcttcagggaatgagagacctggaggagcaggagctgatgcaccaccctgatcaatgataccgaagtgtgctaggaccttcgcgaggaggacgcctgcgacgtacgacagtccggagctgctgaatccaatggacaggtagtagaggagggttgtgaggtatgtcctatgcctcttaacatgtgccttcccgattgcgagcagcgcaatgcacaggagagatgcagcagcgaccaccagcactttgttctctctgttgtcgctcgtcctgaatgacagtccgtagatgactggtggcagcagcccgaagaggatgtatgacagtatggctatcaccatgtgcaactggtacttggatcgccttcccagctctagccagtaatgccccacttgctcactgctttcagctatatctcctgtgtttcgtagatcagcaatattgtggtaaagtacaggaagaccaccaataaggtttgctatgcccaggatgaatatatccaaagtcttggcaccacttgctgcagctgctgatacaactgagaggctcgtgattgattcaacaaggccaccatacactacggctttcaggatatcccattcatccctctcagctgatggtgcaggaactagtgcctcggcctcagggactgccaatactctatgaggtggagcttctggctcagctggctgacgaataactgaagttggtttctcaaccgtctggttgtcctccccaggcaaaacttttattgggattgtaagtactggtttaacaaacgatgggctgaaaaatgtgctgttatcagagggcgccattatatcttccagaatatcttgtttgtggccaaggtgcattgaatcattcgcagtatcaccagaaggctgcgagagaggaatttgctcttggcgtgctccatttcgctgcacagttaccacatgtcctgcttctgtttgcgtgaattcttctttgtggcctagatgactggtatcagttttagtatcaacagcaggccgtgagagaggaattttctcttggcgtgctgcgcggccgggcacagttacacaccatgtcctgcctctttgtgtgtggatcctgtcaagtctttaggaggatcatggtatcacgcacgaggatccgttacttcaatcgtcgcagctgtggtttaggatccagttggtgatggtttgtttgattgtctgctttacctattgtgttatcactatgcaatggtgtgttctcttcaactgaagttatattgtcagtcctctgcgaatcacttactagaggttcctccaatgaatctgcattatgtaatggctttggactatctattgtccggaaacaagaaagaagccaacttccacaattttcaacagacgcagaagaatgctgagattgaacttgttggtctacatccctcctttcaaatatgcggaatatattaaacccgcaacctgttgggatgaagaaagtgaagcacgacaagcatctaaatacttccggcgagtcttgattgattgtttggcttggagcattggcgggaggctctacaagctgtggtctttttggtggttccttgcctgtttcttgccttactgttctctttctctttttaaggatgacccttcgagttatgcacgatttgcagttggggcaatagaggtcatgggtttcttgctcgtccagaatcttctcaagatcatactcttcaactttgacgtcgcccttactgacttccttctcaacttcaatttcatgaacctgagatgtgctcgtgctgccaccagaaacgtggtcaagagagccactccaacttggcaagatgtgctgcctgccctcgcggatggttgtgatcagtttgagtccgtccgcaatggtcgtcacgatttcactgctgctggagatctcatgcacaccattagagtgtgaaccattttccaagttgccattactcgaactgtagttagtttgttgagcgctgacattgtcctgtttctcaacttggttttcagcacccagcccagtagcatggtcagaggcttgtgttggatccaagaagatgctctgctgggccgccgccgcctcctcctctactgctgatgctgctgcgttggagtcggagtcggagtcggaggactccatctccaggtccaggtccgccatcgttgtcgtcatcttcttcctcatgctctctctctccctagtgtataggagggcggaggtgtcttcctcctcctcatagtcatcctcctcggcctccatgagcagctgcggcggctcctcctcctccttgagctcccacatcggcctctccacctccatcatcttttcttttcttttcttgtgtgtttactgtaggagtaggagcaggagtgcagtcgtgtagatggagattgagatgcagcctactgcctactgcctagatgggaaatgggattgattgttgccacacaacctccattttgt

SEQ ID NO: 13462 - DNA, 103 bp, Zea mays
  Clone ID: MRT4577_112269C.1
caaagataggacggaacccacacaatttggagcggtgcacgcattcattctgcagtgttgttcgcaatatatattaagttggacaggttatgaaaacggagtg

SEQ ID NO: 13463 - DNA, 770 bp, Zea mays
  Clone ID: MRT4577_11226C.1
tccggagcaggagcagcgatgaagaagatcttcggcgccaagaaggacaaggggccgcccccctccatccaggacgccaccgagcgaataaacaagcggggtgagacggtggacgagaagatcaagaagctggacgaggagctagccaggtacgaggagcaacgcaacatgttgtacaaccaaacctacaatctcgaccaagttggctttgctgccgatggcctcaaggatgctcagcagactatgaatgcaatgaaggcagcaaacaaggagctcaagggaatgatgaaaactgtcaaaattgatgaaattgataatatgcaagatgaaatgacagatctgatggacgtgagcaatgagatacaagaaactcttggtagaagctacaacatccctgatgacgttgacgaggaagaactgatgggcgagctagatgctttggagtctgatatggaatttgactcagctgcagtcccctcatatcttcaaccagattctgactttgatgctgacctcaacttacctgctgcaccaagtcgccctgcaatggtcccagcaggcgggctgcaggaggatgagctaggattgccagcggtgcctcgggcatcacttcgcagttagaaataatcttgtgtttcgattttaagttgatgtgaaaactctgtagtttgtgtctgagtctgaacaatctaatgcttttcgtcatggtaatgcttcagtttattgcacttcctgttgctgctaatgtttcaggttcccttttttttgtc

SEQ ID NO: 13464 - DNA, 222 bp, Zea mays
  Clone ID: MRT4577_112270C.1
tcgcgagctagacgctgctccctctggatttgtccgacactgccgacatgctggggtgggttgatgacgaggaggatgcctctgactatcggtgtgttgagtatgtgaaaaccttgttgttggatggtatcggatacaacgaggagggccagcaggcagtgcacctgtattacactatgacctagtacagcgagagctggacacgacagcgagcacgacaag

SEQ ID NO: 13465 - DNA, 147 bp, Zea mays
  Clone ID: MRT4577_112271C.1
tgcctatggcatttggaggttcccatgagccagcagcttatggggtgccggtttccatcggaggccttaaccctgagtgtaacaagaagcttcaggctggcatcgattttatcctggagctaaaggtgtctgttaccaaatcacgct

SEQ ID NO: 13466 - DNA, 234 bp, Zea mays
  Clone ID: MRT4577_112272C.1
cgacgagtgcaaggtgtacgaagcatgatgaggcccccttgttgtaggccaggggccgccgtgtgctcagaaaattcactagctttgcctcgtgttctttcgatagagaatactatatacagattcgccgaaagagacgtagacgaaaatgtgccgttttctatgagttgtgtatgtaatcactgaactcgtacaggcttccgcttttcgatcatttcctgttgggactcctgt

SEQ ID NO: 13467 - DNA, 317 bp, Zea mays
  Clone ID: MRT4577_112273C.1
caattacctcatctactttagtttggagaactcaacaccatgaatgggctgggctttgcccttgcgtctgctggcgctcgctgcgagcgccgtctacagtacaagcggcggatgtggctgccaaacatcactgcttcatctaccgccttcattctatatgccgtctccgaactatctgccgccgcagcatccaccacagacatggcaataccccactcaaccaccgcaactaaacccatgctagtagttcaaatcctggggcgattacagcgactacaacccgtaccttggccagtgcgaaaagttcctgaggcacc

SEQ ID NO: 13468 - DNA, 271 bp, Zea mays
  Clone ID: MRT4577_112274C.1
cccactcgtacggcgcttcatcctctcgctccatccgcttcacagcgcctacactctcctttccaagtgcggcgtgatttcctagcaagaaggttttttatatcgtacgcgtgttccttatgaactactgctaacactacttccttctcgttgttattgtcgataaggacgacctattcatctacttgtggacaccccccatttgtttatgtgccatataactcaaaactgcttttttttacccacattaatattcgaatttaacctctcc

SEQ ID NO: 13469 - DNA, 277 bp, Zea mays
  Clone ID: MRT4577_112275C.1
ggctccaatatgaccaaaaaaaggagaaacaacggtcgtgccaaaaagggccgcggccatgtgcaaccaattcgctgcacgaactgcgcccggtgcgtgcccaaggataaggccattaagaagtttgtcattcggaacattgtagaagccgctgcagtcagggacatatctgaagcaagcgtcttcgacgcttacgtgcttcccaagctctatgtcaagctgcactactgcgtgagctgtgccattcatagcaaggttgtcaggaatcgatctcgtg

SEQ ID NO: 13470 - DNA, 227 bp, Zea mays
  Clone ID: MRT4577_112276C.1
gtctttcccacaaccccagagcatctgggtgcggatatgcgacggctaaattgagatccacttgttgcataagcaagactatcctgaaaccaaaagaaaagagaacagaattcctcagcgaattccaaagcgacattcacaagaaatgcggaggctgaagcctccatatgtgaaccacacttctgtgccgtggtaccacgcctatccacaatcccaactgaatgaga

SEQ ID NO: 13471 - DNA, 115 bp, Zea mays
  Clone ID: MRT4577_112277C.1
tatcctcactagtactgatcgtcagtcatcgggtttcccaataccgattgtatatcgtgtatatcctaagctggcataggagagacacgtacatcacagtctacgatgtctgcta

SEQ ID NO: 13472 - DNA, 299 bp, Zea mays
  unsure (1)..(299): unsure at all n locations
  Clone ID: MRT4577_112278C.1
ctgctctcncgcacttccgggtcggcaagagagagcgggggtgcagagagatcgagatccggaggtcgcgagtgggagcgctacaacagcgactgctgcaattggcgngcacggtgacggtccccgggtcgtcgacgccctccacgccgctgctcaaggacgagctcgacatcgtgatcccgacgattcgcaaactcgacttcctggagatgtggcggccctcttccagcctacaactcatcatcgtgcagacgggaccgacaagacataaggtgccgagggtcgatacgacttaaacg

SEQ ID NO: 13473 - DNA, 378 bp, Zea mays
  Clone ID: MRT4577_112279C.1
gatacgcgtgccttcttcaagcgtgcccgtgcgtggcgtgggggcaatccctaccgtctggccaacccgtatatctgttccgtgctccagcgacagcagaaggtactacatgacaagaatgaccgtgatgagggctccgatcgaagcggcaacaacggtcactatcaatgtggccatgttcatgccgggcgccagaacgccacaggcaccggcaccatcacccacttgcgaccgctcatctatcacaacaagaatcgtgaacatcattttgctctggggcgtgctgctaagttacttaaaccaatctatgcacacgatgtgccgctacaaggtgttcaaaaccctgctagtcttagcatgtgcatgcacttatcgggc

SEQ ID NO: 13474 - DNA, 193 bp, Zea mays
  Clone ID: MRT4577_11227C.1
gccgcccaagtcctctggccccaagaagcggggcaagacggagatccaggagacgctggtcacgcccctgttgtacaccagggacttcgacgagatggagcgcctgttggacggcgagatcaacaagcagctcaaccaggcggagttctacgccctgctacaggagttcaggacagactacaaccagacccac

SEQ ID NO: 13475 - DNA, 178 bp, Zea mays
  Clone ID: MRT4577_112280C.1
ggccgggatgcctcctcgctcgcttttttgacgcgcctgcttctccccctcctgcctcttcgtgctgcttcctggtatggcggaagggaaggataaggagaaggctgtgtgcgtgctgcgccgataacgcgatgttgtccattgtcaccgaggtatgtaagctcgctggatgccgccc

SEQ ID NO: 13476 - DNA, 223 bp, Zea mays
  Clone ID: MRT4577_112281C.1
cgacgagctgttcctgctcaacagcgtgcacaagatggtgcactccatagtgtggctgcgctggatggactagcagggatacatcaagcacaggaaaatacccacctatttgtgcactcgttttacacaacacctatcaaattagaacaggaacagctgaatgtcttccggttccctccttttgtgacccctataaaaagcacaccgttcccccttgttaaaa

SEQ ID NO: 13477 - DNA, 237 bp, Zea mays
  Clone ID: MRT4577_112282C.1
ccggcctggacctcggcttcttccggatcgggcgcttcgatggcaaccccatgggaaatgccaagtagtgagctatgctgctgctgccatgcatgtagtactaaatatggatcgatggtggtcaataatgaaagtaataaaacattcatattctagcaaaaaaaaaaaaaaaaaaaaaaaaaaagcggtcctcagagctccaacctattgcaccaagtaaagagggataacttggcc

SEQ ID NO: 13478 - DNA, 1903 bp, Zea mays
  Clone ID: MRT4577_112283C.1
gaaacctaaactgacttgcttggctgcttctcaagcaaccgaggatgctaccgtacatgataatgtacctttggctgctgctgacactatcacccaatcagctccagtaccgaattcagctggtacagaggattcgttgaaggtggacatatgtttaaatgatctacagttatcagataagcagcatgtgataattccagatcatcttcaagtttctgagtctgaaaagtatgttctaagctttggaagcttcgacgtcagttttcagcaaactaagggctcttcagatcctgattatgtgaagagctctttaccgaaattcagttcgtctcatgagttggatggcaacattgatgaacttcagtccatgcaaagagatcagaattcaacatctgttgtccaagaggaagctggtcatgttcctcaaccttctgcaaagctagaaaaatgtgcaccctcagcaatggagatttcatctattgcccttatggaatcaaaagactgtgatgacgattcagccacttcaggggatccccaatctacaggaactcatagtgcaccatcttatgtgacatatggatttgcaccacaatcacatgttaatcagattgagaagtccgaatctcattctcagtcgtaccatcccacaactgatgctgatgaacggctgtccccttctcttgctactcaagctgctcacaagtatgggaatatcccagttgttcccacacaaactggccaggatcaagaggggaacgactcacctgtgattatttcatctgtttctgcttccgttgctacccctgctgctggagttctgtcggcttcagttgctatccctcaacagtctgttcctgtatttcgccagcctttaggtgttcatatccacatctcccgatgaattatgtcccttacatcagtacatttcaccatttttttttaggaaaattggatctattttgctcggctccagaccgacggcttgactctgtgggttcctacacctggacgtgatatttctgctctccaggtcaattccttctatggtctcccccctccgggacaccaggtaacatatgcgcctcaggctggacatggtccttatggagggatctaccacccagcacattctgtggcaggagctactgttactccactgctccagccatctcacacaatggctggagctgttgaaatagttggggcacctggtggtgtttaccagcatccccaagctcacatgaattggggaagttactgataggccatgattattgtttctttgactttgggtgtccatgacaacacatttggcagaggtgttcaagttttaacaaaggtgaacttgatcaggagtgtatatatgttctcagcatggctgatctgcagggcgggttattgcttccagaagcttccagattgttgtggttgtatttgtagcagataatggccatgaaattggttgagtttatctgctcaggttccttaatacaattttagcctcctgcgcccatcctgaaacttctgcaaggagcgtgatttcgctatcttgtctgattgagggtatggagtacttgaaactgaaattgagcaagtggattttcgttctttccgctgctttacatgtaaattaaattttggttcgatgtgtgacagctgttgtacttggtatcagttgtggacttgcagctaaccagagtcaaagtgctttgaaggacttactgagcacgtttctgttcctgtaggctgtagctcagagcctagtgcttcgttatattgcttattactcattattactatttattgttcctatgaactcgtattgtttggggttaaagggccagacatttgttagtgcccctttggtataagaaaaaatggcatgcaggctacgtgccgactc

SEQ ID NO: 13479 - DNA, 351 bp, Zea mays
  unsure (1)..(351): unsure at all n locations
  Clone ID: MRT4577_112284C.1
cgggaaaaaatcgtatccagattttgcccctgctgttgtggctaatgttggaaaacaggccctttcttccagacggtggcccatgctcttgagaactggtagtgggtcagcgacattgtgacccctcttaatttgtctgggctgcagcaatatctgaacctttaggacgcattgaggggagtggtgctcactcaggaggctgatagacatgtgtggattcattcttcctctggacagttctcttctaaatcgtgttataaggctttattcttggtttcgattacttttgaaccatgtaagaggctgtggaagacttgggctccactcaaatgcanattttttatttgggtt

SEQ ID NO: 13480 - DNA, 653 bp, Zea mays
  Clone ID: MRT4577_112285C.1
ggccgctttttttttttttttttattctttttttttttttttttttttttttttttttttttttttttttttttttttttttttttggtttttttaggccaaaacaaccaaaaagctttttattggttttaggacttaaaaaaaaaaaccaccgttgttaggcctggaaccttggggaaccacccggccaggcccctttaggcctcaaggaaatgcagggagggggttttcctggccggccaaccccggggtaaccaaagggagggggttttggaaaggttcgttgggcccaaaaaggccctccaacggggaaaacagggggatgccacaatgtggcccaaacaaaaaaaggggaaaaccgggaatcccccggtggaaccccaggaaagatcaggggaaagggggggacccccgggaacccccggggggggcccgcggggggaaaaattaatcagggcggaacaccctggggcaccaccagtttgaaagggaaaaagggggaaacaaggccccccgtctaaaccctgttaaaggggaggcagccaaagggcatttcctgggatgatttccggggtcccccaggggcccccatggggggtataaaaggggtaaaaggaagacaccgaaagccggccagttccaacccaattttg

SEQ ID NO: 13481 - DNA, 878 bp, Zea mays
  unsure (1)..(878): unsure at all n locations
  Clone ID: MRT4577_112286C.1
gnacgactcacctgtgnatatttcatctgtttctgcttccgttgctacccctgctgctggagttctgtcggcttcagttgctatccctcaacagtctgttcctgtatttcgccagcctttaggtgttcatataccacatctcccgatgaattatgtcccttacaatcagtacatttcaccattttttattccaccccctacccttcacccttttatgggtaatgctacattttctcagccaccttcaacaggggtcatgtacccaactcctggaaccgcaagagttcttccacctgtcaaattcccagttccttagtttaagcctggtgctaacattgggagccaggcatctattggagttcctggttgctatggaacatatggttctagtccatcggtttacactaataacgcacccgtgtcatctggaaatctagcagaaaatgacaatgttacttcatctcagttcaaggaaaataacatctattttgctgggctccagaccgacggcttgactctgtgggttcctacacctggacgtgatatttctgctctccaggtcaattccttctatggtctcccccctccgggacaccaggtaacatatgcgcctcaggctggacatggtccttatggagggatctaccacccagcacattctgtggcaggagctactgttactccactgctccagccatctcacacaatggctggagctgttgaaatagttggggcacctggtggtgtttaccagcatccccaagctcacatgaattgnggaagttactgataggccatgattattgtttctttgactttgggtgtccatgacaccacatttggcagaggtgttcaagttttaacaaaggtgaacttga

SEQ ID NO: 13482 - DNA, 870 bp, Zea mays
  Clone ID: MRT4577_112287C.1
gcggcagcctggcgaagtgctggtcgaattgagcatcaaccgcatcgaacctcttgcagatctcatggagtaggaacattgcttggtacacagcatgcagataccggacatcgtggtgaggcaatgatgctcggttcaggaggggcgaactcgcggtggtgccaggggccggagccggagcagacgaggtggagcgggtgaatccaaccggcaaagcttgaggaagattggggacgtagtatgcgccacggttgaggaccaacatcgaacacttggtgcgcgtgttggcaagcaccttctcctttatgcttgaggtagctgctgcacagtcagcagccgacggatcacaccccagagttggtggagtaatcgacgcagccgatggtgtggtagtcgacgtcgccgcccaatagcaccaacagtggaactccatggtctggtcggtgtcgagctcctcgccgaagcagtggccagcaccgtcggacaagagagcggtagcactgtcgacaggttcctcgtcgaagataggccatgcattggagaccggttcgtcgtcgtcgtaccactgtttgaggtgcttgccgagggcgatgcagtggtcgtcgacgttgcgctggaggaagagttctttgtcggcaggcgacgatcgtctggcgaactgaatgtcgaggacgcccgtgcagcacaggttgtcgttgtggtcgggcttggtcagcctaccgaaggcggtgtcacggaggtcgatgctctcgatgtcgatggggccgcgctggacgagctccacgacgttgccaccgagatccacatcgtagtattggtcgaagacgggagcgccatagatggtcgtggatgtggtgaggccaggtggtt

SEQ ID NO: 13483 - DNA, 1899 bp, Zea mays
  Clone ID: MRT4577_112289C.1
cacgatgtccggtatctgcatgctgtgtaccaagcaatgttcctactccatgagatctgcaagaggttcgatgcggttgatgctcaattcgaccagcacttcgccaggctgccgcagccgcaagctgaggaggtggacgaaccatactgtgacgcggtgaggccattgcctcctcttccccttgtcgaggaaccgtaccgcgacgtggtgagcccagtgctgcatcctcccgtcgtctacgagccacaccgcgactggcgcgagcagccacgcgggaacgaggccctcgacgtcgtctgtgagctgtaccgcgaccggcacgagcagacgcacgggtacgaggcccccgatgcgccgtcgttctcgttaggcagcgatgacgacatcgacgtcatggaggagctccacatcccgatgagaggaggccgcccgaagaagcaagtgcatgagtccgcggccaccgttctccctgggcttcaacgacgaagacagcgatggtgacatactcactgccgaccaacactacgagcaagttctgtcctaggtggcgtccggagccccttctccgcgtcatgtgcgtcgagcaggtggaggacatgcgcgacccggaggacgaggtctaggcatcgtcggcctcgtcgacatggcaggggtcagcaagactgcgctgctcaagaagttcaacaatgacctcctcattaactctcatgacatcaacgtcaccatcgagggcgacaggctcggtgtgtcatgggaaaagtggacgccaaaggagcacgtcggtgtgatgaacttcgtgttgttgctagacgacgtttgggaaccactgctagatgattaccggcctccaggaatgcaatctctgaagttcaggaaatttcctctaggaaatatgtcaccaaagatagaagagacaaaaattcagtacactctgaaggtcattagaggaagcccaactgcagttcaagaactttttgtccaacttggtgtcaatgtggatacgagtgactgggagcttaaacctttgggatgtctttcggttactgtggcaacacaagacaagtttgaccacttcccagtcacagtcgctgattggggtgttcaagcgatagtaagcaggctgctttctggttacttccatgatgaggacatatcgattattgccgaagaagatgatgggacactagctagtagcgatggtgcaactttgcttcaatatgttgttgaggctgtcaacggctgcctggttgacgctccaaactatgggcggagattccctgagaaaaagctcggtgctcatgatgttattccagccatacggaaatgcatctctactggaggcctgaaaggaagattttaggtgcttgatcctgtcattgacacccttgggttcgtgataggggaccaatatgctattgctctagccttgattgaagatagagaagttatgcttggtgttcttgagtgcccaaattatccaatgaaggagtggctcaattatcatcaacaatactacatgttaatgtctaaggtcgctcctcctctatcgagaacctggcataaaggttgtgtgatgtatgaacagaaaggaggtgaccaagcttggatgcagcccctggttcatgacttagcaggacttgctcatagtgtaggattcaagcaacagtggcctccacctaaggagtttgagtgcttggactgtacatggcctccgacaacttggcgattatggtcagcggcttgagggcaagccgcatttcaagcggtggggaatgttaggagtggctgccatgtggggccattggcaggggacaagtgggtttctgcagctataaaaggacaattgtataggctaagaggatatcaattaccaattatcagaatacaaacactattatc

SEQ ID NO: 13484 - DNA, 259 bp, Zea mays
  Clone ID: MRT4577_11228C.1
tcctacatgatgtagttcacccacttaaagtttgtctggaagatctttacaacggcacctcaaagaagctctctgtttcgcgcaatgtcatctgctccaagcgcaagggcacgggctcgtaggcagccgccttactgctgtgccctgcgaaccccttcccaccgcccaatggcagcagccgggtggcggcgaagcaggtgacgcgggggaacttggaggctagccctgtagaagctgcggcgacccgtgcgggaggccg

SEQ ID NO: 13485 - DNA, 447 bp, Zea mays
  unsure (1)..(447): unsure at all n locations
  Clone ID: MRT4577_112290C.1
ctctcgttctcgcccagacgacgcgcccgcccccaacccaacaaagaaatccacgagctcttccccctcgtcctcaccccgcccctccctgctctacagactccccgttttagggcccgccccncgcagctacccacaagcacctccggaggcnccaggtacccattttctgcacccggggtgggtcgcccctttttgacacgaacaaaaaaaaccccgngagtaacggagagacggagccatttttagaggggcggagccggacaccccgcccgggagcagcagcagcaggagcaggagcgggggcagcacgcccgngggcggcaagccgccacgccagcagcggacgggcaaccgccaccgcgccagcaacgcccggaacgccgcagacgccgacgaaaacgaaagcaagcacgcagccggccaagccaaccaccccgaacacga

SEQ ID NO: 13486 - DNA, 775 bp, Zea mays
  Clone ID: MRT4577_112291C.1
cgctgcatcgccctcggcaagcacctcgaacagtggtactatacgaccacgacgaaccggtcttcgatgcatggcctatcttcgacgaggaacctgtcgacagtgccaccgctctcttgttcgacggtgctgaccactgcttcggcgaggagctcgacaccgaccaggcacggagttccactattgcgacaacaaccacgtcagagttgacgtcgacatcctccccacctccgagttcgacatcgagcagccgttcttccgcacctcctgcgtcgaggatgcgtatgcgcagccccaccaccaatttctcactaacgggctcatgccccagcactcgatggctccaccatggtgctatcgagcggcgacgtcgactaccacgccatcggctgcgtcgattactccaccaactccggggtgtgatccgtcggctgctaactgtgcagcagctacctcaaacataaaggagaaggtgcttgccaacacgcccaccaactgttcgatgttggtcctcaaccgtggcgcctactccgtccccaaccctcctcaagctttgccggttggattcgcccgctccaccccgtctgctccggctccggtccctggcgccgccgcgagttcagccctcctgaaccgggcaccgttgcctcaccacgatgtctggtatctgcatgctgtgtaccaaaatggtaggagcgagcgttgaagcagcactggttgtactggactgcaagcactgggtgaaatggtggggcctcagtaacgagtttgatga

SEQ ID NO: 13487 - DNA, 1575 bp, Zea mays
  Clone ID: MRT4577_112292C.1
cggacgcgtgggcggaaatgtggcacgagggaaaagttgcgaaaaaagaacaacaaaaaaggaaacgaaaacgagcgggggagctcgcggaccccaaaaccctaaccccgcggacccacctggcggcggcggcggcggcgatggcggacggcggaggagaaggaggacctcctgcggcgtcggcggcgctcaaggaccaggggaatgagcagttcaaggcggggagctacctcaaggctgccgcgctctacacgcaggccatcaagctcgaccccgacaacgccaccctctacagcaaccgagctgcagcattcctgcagttggttaagcttagcaaagcgcttgctgatgcagagacaacagtcaggctgaagccacaatgggagaagggtcatttcaggaaaggttgtgttttggaggcaatggagcgctatgaagaggcgatagctgcatttcagatagctttgcagcacaattcacaaaatacagaagtctcgagaaaaatcaagaggctatctcagttggccagggaaaagaagcgagcccttgatgtagagaacatgcgttcaaatgttgacattgcaaagaacttagaatcactgaagactgagttggctacaaagtatggagatgcagaaacagggcagagtgtcttttctttcattgttaatgtggtagaatcagcagtaaaggtttggcatgatacaggaaaagtagatccaagggtccattttcttctcgatgatcagaagaccgatactgaaaaatatgccccagtagttaacattgacaaggcatttgagtcccccaacactcatgctgagtgcttcacatatctgcggcaatacgcggagaattgttctgcgaaggctgcttgtatggtggcacctaagagcatcatctcctacccacaggtctggaaagggcaagggtcgaggaagtggaagcttgaccagagcgacgggttcttcgtgcaattcgaggcaccggcgctgaggaagatatggtttgtgccaagcacaaaagagaagggacggacattgtgcaggagccctgaggccttggacatcggcatccatgaagtgctcccccgtatattcaaggaggcagcttaagcccaataatggaggactgtccatggattcctgatcctgcacagcgcttgctggatgttctccctgggacctgggaggaggaaagagctcgcccgacatacatttgtgtaaccagtggaatcggctacgctggcagacgcagactcggaagatttgatgctgtcactgtgctatgcaatgagcgtgttgtgtttcgagtggcaccgtctcgtggttagtgcgggtgttttgtttccattttcttttgattatctacctatttaccgaatgatccctgtcaagagctatgctcctttttttttcttcttcaccggaaggacaagatcgctgttggtgcccctgtgggagtggcaagcacacgggaggaagggtgggtgtgatgtaaagcgggatgaacagctatatacctaggtggattgggtgagacagaacagccaaaaaaaaaaaaaaaaaagcggcc

SEQ ID NO: 13488 - DNA, 595 bp, Zea mays
  Clone ID: MRT4577_112293C.1
atatcggagaccgaggaggtgagtttctctctgtcgcgaagcaaaccgaacgaacccaaccgatccgagagctgagcaaggcatacgcggtgcgaccggctgatggagcgcgtgcgcggatctttggcgcctccggcatgggcgcagccgccgacggactctccgctgttcgactcctccgagtagggctacatctcctccctatcgcttctgcaagatgctcaaggaggggagggctggagcgcctatggaagtcatgtgcctcatgctcgaggagctcgtagacgactacaccggcagtgtggccgacgtcttcgccatgcctcacagagggactggtgtcactggcgaggccgtataccgcggcttccagactaacaggcttgacatgcttaagcaaatcggagggccagaaatggttgtcgcctgagatcactcccattgtgtgtttcgatgctgggtagtagggggcacatatcgatactcagcagagttgtgaggattcgaagcaaagagtcgaggctgtggagaaagaccccgtgcatagagttaagtcctaggtgggtatgaatgctttcactaaatctcacgctca

SEQ ID NO: 13489 - DNA, 685 bp, Zea mays
  unsure (1)..(685): unsure at all n locations
  Clone ID: MRT4577_112294C.1
ccgggntacaaggctgcgactattgcnattggaaaatgagaaggaatcagagtttgttgaccctattcgcccaactgttagaatagttggaggatctttttctaaggatgagagtttaccaaagctgactcacagacgaactccaaatcgtaaggtcaaaaggaaaagattggaaggtgaaacaactacaacggaaactacagagaaagatgctgttgcgaaagactcctcccctgtatgttccgcatcaggtatcacaaggaattccgataatatgaaacctccaaagctggagtccaagtgcaactgtataatcatgtaagtaacttcacgtccaaggtcgaaggagttgtgatattggttgggacgaaaatccatgctttctggtttcatgtcacatgcaacttgaagcatgcctacctgcttggttaacccgctgtcagcagcaacgatggagttcaaggcagtggatcttccactagattattttgcagaggtgcatttgctgtgttttttaggtgacagaatgcactgcgagctattcttttgtaaagtcttttcttctctgttgtggaaattttctgcttgtcgtgaggtctattgcggtttgtccaaagtgtgaaagactactagagttgtgctgatagcgtatttacttgcaatgcacgtggctacttgtgaaaaa

SEQ ID NO: 13490 - DNA, 1801 bp, Zea mays
  Clone ID: MRT4577_112295C.1
attgggaccctcgaggccggccgggaaaacaacctcccgcttcacccatctgatctaatcagagatccttggtggggcctacgtctcggttatcttcctggacggagagagaggggaaggccgagccgccgaggcgaggcagagcatccagcaatccgccacgctcgtcgctcgcccggtcgccccctccacccactgccgcttcaactctctcgctccctgtcttctccaaaaccctaaccgccgacggcgatgctctcgacggcttcggtgccctccacctcgttcgccgccgctttcctctcctcccgcgctcgccgccggcgccgcgccccctggctgcggtccgtcgccgcagccgccgcgtccggggtgggggacggagaggtggagaggttcgctaccagcagctccatcaccgactacctccgctaccgccgccccgagcttggctgtgccggaggggcaggcggaggcgggctgccaggcggggagctgcagacggcggtggtgcgcttcaagaagcggttcccgtggtcgcttctccaccccttcctccacgttgatttggtttctacagtccacattgcagacaaagaatactttgatagactgcagcgagagcttgaagattacgattgtgtcctgtatgaaatggttacaactcgggagaatttgagcaatccgaaaggtccaatggctgctaagaagatgaaatcttcacgcagaggatttagtattattggtttcatacagaaacaaatggctcgggtcctttcgttggattatcagttagactgtcttgattatggcaatgagaaatggcaacatgctgaccttgactatgaaacattcaaacagcttcagagtgaaagaggtgaaagtattctcacgtttgccatagacatgacactgaaatcaaccaaagccttggtgcagccaagtaacatgccagatggtcttaacttttggaggtcgaagttactatgggcctcacgtgtgctaccaatgccacttgttgggctactcgtcatcactgggctgtgtctgccagtggaaaagcaagatgggtttccagagctggaggcattgtccaggctagattttggagctgcactgaagattttcttggcaaagcaactgacatctgaattcacagctgtgcctacacccgttgaggagaaatcagttatcattggggagaggaacagagttgctgccgagaagatccgggaagcaataaacggtgggtacaagagaatagcggtcctctacggcggcggacacatgccagacctgggaagacgccttcgagaagagctggacatggtcccggccgatgtgcagtgggtcaccgcgtggtcaataagaagccgggagatagacagcgaatccctccccttgttgaagacgctggctgaggcttcaggctggcctttgaatagatacgagacgctcgccctgctcatcttctcttcggttctcgcggtggatctttggttctgggaactcttctttggcaccgcggttaattgtgcatctctggctggttcctggattggccagctagcttagcggcaaccatagctatatgcctatatatacaaatggcagtataaagaaaaaaaaaatagaaccccccagtttagttttgatttgtccagctgttgctggagtactgcagcaaaccattgtagataagacacttcattccgatcaaagttgaaacgagattgactgctttctctagtcctgtattggtttgctaatatcagtttactcggcgaaaaaaaaaaaaaaa

SEQ ID NO: 13491 - DNA, 226 bp, Zea mays
  Clone ID: MRT4577_112296C.1
gcgtcccgtcgcttccgggtacgtataactcgtacaacgacgtatctaccttgagcatcagctgcgtgcatttacgacactatgcgaacagatcatatgattgcggctatatatatatctatggctcgggtgtaacaataatgaccgctacatttcagagctatagtactatgacgtgaatcatatatagtcagtatatatacggaaggtctgctcgccgtactac

SEQ ID NO: 13492 - DNA, 406 bp, Zea mays
  Clone ID: MRT4577_112297C.1
tccgctattgccgaggcctagggttcaggctccacaggtggaccaaccataattgtcattggagcagaattaccgtgcgattgtggaagcgggccatcctcacaacatgcaactaggcaatcttgtcagagcagcgtcaacgactctcagacatatgccactctcaactgtgggagctatggagatcacagtgaatcgggtactcgctcacctgttactcatcttcagaccagattgccacaggtacattccatggaacatgggaagcagaagcaatcgccagcaattagtgactgtgcaatggactaatggacacaagcagagctgtgggcaagcacatactgatcagatatgcatgagggaccgctagcatactcagacttgtgaagaacacactatgggctgc

SEQ ID NO: 13493 - DNA, 388 bp, Zea mays
  Clone ID: MRT4577_112298C.1
cggccgcgtgggcggacgcgtggggaaaaaaaaaaaaaaaaaaaaaaaaaaaaaaaaaaaaaaaaaaaaaaaaaaaaaaaaaaaaaaaaaaaaaaaaaaaaaaaaaaaaaaaaaaaaaaaaaaaaaaaaaaaaaaaggggggggccggttttaaaaggaacccaattttacttccccggccttgcaacgtaatagtttttttttggggcccccaaaattaaattcccgggccgggttttaaaaacgtggggacgggaaaaaccctggggtacccaaattaaatcgccttgaaaaaaatccccttttccccagtggggaaaaaaacaaaaaggcccgacccgatcgcctttccaaacagttgcccaccctaaatggaaaagggaccccc

SEQ ID NO: 13494 - DNA, 516 bp, Zea mays
  Clone ID: MRT4577_112299C.1
ggggggccaaaccccgcaaacttttttttttaaccggtggccaaaaaattgttttgtttcccccccagaaatcccaaaaactggctgattaaaaatcccccaataaactcctaggacaaattttttgggagggactcccccaaaataaacttcttgggtaaacaaaacatttgcaaccctgcaacggtttggaggaaatccataacccagcaaaaacttttaggaaaactttttggcaacaataactactggtacgggggggaaaaccctaattttggtgttaaacttttaaaaaactttccaaaaaccaattggggggctcttttaaaaggttttgaaacttgaaaggggcaagctttatcctaacaggaggggcccctccaccatttggtttacttgggggggggaaagccattgacctgacccttcacctaaaacaggggttgaaacttgccccccccttaaaaaaaattaatccttattggttccagaaccttggggcacccattttttttt

SEQ ID NO: 13495 - DNA, 371 bp, Zea mays
  Clone ID: MRT4577_11229C.1
ctcccttacctaagcattcgattcgagggaagctgcttatggtgctccgtatgacacattacatgacaggatggaagcatgaagctcaataattgacaaggttgacttttaactagacaatgactgcagtgctgttgataggcctgatgcattgaacttgatgaacctatgagctgactgatgaagtggcactgcctgagggaagtgagatagtctatacattggggacttagacaggtcacagcgcatactgacaccggtgtactggagaaagcaagcactgagtactacagtggtgatgagtggaactcaaatgtccctgttgattttgacaatgaccaaacattgggcaataatatgaaggggaaaga

SEQ ID NO: 13496 - DNA, 652 bp, Zea mays
  unsure (1)..(652): unsure at all n locations
  Clone ID: MRT4577_1122C.1
gtacgcccgcaggttccggtccggaattcccgggtcgacccacgcgtccgatcgaagcggccttgggatgtctctggctgatgagctcttggctgacctcgaggaggcagcagaagaagaggaaggaggaagctatggagaagaggaggaggagccagcacttgaggatgtacaggaggagacccagctggatctttctggagattcagtcaagagcattgccaagctatgggacagcaagatgtttgctgagatcatgatgaagattgaggagtatatcagcaagcaagccaacgcgtcggaagtgatgggaccagtggaggcagctcctgagtaccgagtcattgtggatgccaacaacctgactgtggagatagaaaatgagctgaacattatccacaagttcatccgggataaatactcaaagagattccctgagctagaatccttggtgcccaatgctctggattacatccgcacagtcaaggagctgggcaacagcctggataagtgcaagaacaatgagaacctccagcagatcctgaccaatgctactatcatggntgttagtgtcactgcctctactacccaggggcgncagctgtcggatgaggagctanagcgggtagaggaggcctgtgacatggcactg

SEQ ID NO: 13497 - DNA, 419 bp, Zea mays
  Clone ID: MRT4577_112300C.1
atcagcttggctacacatactcagtggtgggagaggcctatcgctatgatctaaacgcctcaccatgacaaacatctctgtatccgttatgacattgtacctaaaaaatcgtgccagctttcaaacaacagattcgctaccattcctcggcggagaaatcacgttctcaaaacgcgcgactctgcactgagttttacataatgcttagcacaaacagcccaaaagacattcacttatttttaagaagccttgttgaaaaggatgcaaaaaataatattcatactgatcgaacaggccatgctctaacaagccatgtgatcaactatattgagtgtttgtttgactaccattacattttcactcacttcttctggtgactcacaggagcaagcacaggctctaagcttacatatttgaca

SEQ ID NO: 13498 - DNA, 578 bp, Zea mays
  Clone ID: MRT4577_112301C.1
cactttgtttttttttttttttttttttttttttaattacttcttttgttttttgtctttttttttttttttttttttgttttttttttataaaggcccaacttgtgcttttttccctaagggggaccgcccccccaagaaaaagtgagggacggggattaggagcccaaaaggggtgggtccacagggcctcctaacagtgaaattggggggcatggttcacactacggggcaagccaacccgctgctacaagcgactagcagagaggggggcaaaaaaccgaaaaaaaaaagggcgccctcggcccttggggcatccaccaatacaaaacggcgggacacatctagagcaacagggggagcccgctttgagcctacgacccggagtgaacaaaaaaatccttctgggggcagcggccgcttgggggaaaaacagttggggtggccaacacatacgcggacggggggggactacaggggcatcagcctggaccaaaagggattccacggcccttggtgaacggtgccacatgggggggggggggtcatctgcttttatgtatcccactcgccgtggg

SEQ ID NO: 13499 - DNA, 468 bp, Zea mays
  Clone ID: MRT4577_112302C.1
ggagggaaaaaaaaacggtggccgttttacaaaattttccaatcccacccgacaaaatatcaatttataaatatgggggcctggatttccaaaaatgggaactaaaaaaaagcccccttgttgttccacccaaaaagggggaaaaacctttcctttggttttttaaaccaaaccctgggcaattgtttttgacccttccaaaaacgacgggcctttttaaagtcaagtttaaacaattcccaaaaaaagcttggcctcaccctaacggaaatgttgaaagttgtggaacatcccaggggggaaagttttggttgcagccttggccgtttcaggggttccaaaaacgttccaaaaccggggggtctcgtaagaagaacccaacgcttcggggcttccttaaggactttgacccttgaaaagaacccgaaaggtttggcctttaagttcagcctttttacccttggaggg

SEQ ID NO: 13500 - DNA, 291 bp, Zea mays
  Clone ID: MRT4577_112303C.1
atcgtcccgcgaaccctagctcccgcaactgccgccgccactcccacgctcgcagccatgccgcccaagctcgacccgtcgcaagtggcgtaggtgtctatccgtgtgacacgagagagaggacggtgcatagtctatcactggaccgcaagatcagaacgctcggactttcccccgagagatcggagattacatcgccgaggatacgtccaaggactggaagggcctccgcgtcgccggcgagctcaccgaccagaaccggcagtgcaatgtctccgtagtcacctccgc

SEQ ID NO: 13501 - DNA, 517 bp, Zea mays
  Clone ID: MRT4577_112304C.1
ggggccaggaacaattataaacagataatctctcaaaacatacaaaataagctttacagtctgcagtaacttgataagcccactcacattcagtaacattgccaaaaccatcgctacgccaaatcgaactgaacccaaagggttcagccaacaggcaaaccttagccagctcaacgtaccacctagaccaaccactaaccactgcactaacaaaagcaatgacaatctagataactggtgccattacatgcagtaaggcagaaccagcacactggctgagctctcaaacaacctttccatgcacactgcactaacaaaagcaatgacaatctagtaacttgcatttccatgcctgcatgtatgaaatgcgttttttgttgtaaagcctttctttttaaggcagccacatttgtattgtcgaagtgtacatatattgtcattgtattctgaaccccttagttatggtggaatcttcacatcaaacgacctgcgtagcatgctcgaggatacttatgct

SEQ ID NO: 13502 - DNA, 334 bp, Zea mays
  Clone ID: MRT4577_112305C.1
acggttatacatcgccatctaaaactagagacgtttattacaaagccatcaatacctaaccgatgagcaatttgatatgcgagcgtgctcacaaccaccaagggctacaagaactcacctgagaagacaccaactaacgagaactccgttaatagggcaacacccaacaattttataccctgcaagggagacccacataagaacgcaacgaaaaacgctaacaacagcgttgctacttacaagatctacatcttcaaggagctcaagcatgtgcactcatacataagcatctcgaccaaggccatgtgcatcatgaactccttcatcaacgaca

SEQ ID NO: 13503 - DNA, 902 bp, Zea mays
  Clone ID: MRT4577_112306C.1
ttgggaccctcgaggccggccgggcggcacggcctcaccgccccatcactcctgccagttcaaggtgctgcacggcggcgtgcggcgctggcggcgctggcgagcatgggcgcgcacatggcggggtaccgccgcgtcgccggcgtgcagctcagcatcaaccacttccgcagcgccgccctcggcgacaccgtcctcgcgcaggccgtccccgtccacgtcggacgctccacacaggtttgggaggtgaagctctggaagatggatcaatccacgggagagaagggacctcagatcgccgaatccagagtcacgctgctgtctaacctgccgttgccggaggagcacaagagggcaggagacgctctgaagaaatattcatcaaaactgtagagaagaaacttcatgctcatgaaagcccttgcatcttgcaggtttcacggatctgatggatgttgtaattaaaaagcattgcctataataaatatttcttatttaccaccagtttcttctgtacgccgcctgtaccatgtactccatgtgtcccgttgagccttcatcacactaaacaaacaaacaaacaagcagaagacctttcctgttgaaaataacgtcaggagcaagagcaagaggcgtgaggctggcactattcaccatccggcaacaaatcggaaggaggcggtcggtcattccatgcggagtgctatgtggctgagagatgggaccagcgatatgaatctgggagcgtctgatgagtgggccagtgttggctaatgtccgtgtgcgtgtctgactgtgccggtatagagaccggttgtaagggtaatttgccggcacgatggaactgttgagaaaccctaataaagggttatgtggacaaaaaaaaaaaaaaaaaagcggcc

SEQ ID NO: 13504 - DNA, 220 bp, Zea mays
  Clone ID: MRT4577_112307C.1
gggctcgtgtagttgttgtaggcgtcgaacgggcggttcttgaagcggttgctgtgtgggcagctcgagaacaaactcctcgtcggcgcggggttcgagtcgggcctactacgcaccattcgcttactacagctgaactgggagcagatcggggaggacatagaagccggatcgctcaccaagagcgtaacggagaccataagtgcgcgaggaggggggg

SEQ ID NO: 13505 - DNA, 153 bp, Zea mays
  Clone ID: MRT4577_112308C.1
agggcttgctggatcacgcaagctgtttgcttctgttccatcgcgtcgtgcgatctgggtgctacgcactggtgagagagcctggggggcctcatgggcggtcttcccttggtggtcgcagggggagtggtttatgggctctcgcctgtctac

SEQ ID NO: 13506 - DNA, 1222 bp, Zea mays
  unsure (1)..(1222): unsure at all n locations
  Clone ID: MRT4577_112309C.1
aaaaaaaaattaaccaaaaaaaaaaaaaaaaaaaaagtacctcgaggcccattgggtacctcgaggccggcgggggatcggtcagatagataccgaaccgagaccgagagtgcaaaccttccttccaccttccaattccagtagtcccacgcacaaactttccccagctgcctgcgcccgcccaactaccccgcgcgcggcagccggcagcaggtcgtgccatggacgacgacgccacggtcggatcgcggcagcgccagcagcagccggcctcgccagcggcggctgattccagggccatgatggcggagctggacgcgccgctgcacgccctcgggttcgagatggaggagctctccccgtcgcggctcaccggccgcctccccatcactcccatctgctgccagccgttcaaggtgctgcacggcggcgtgtcggcgctggtggcggaggcgctggcgagcatgggcgcgcacatggcgtcggggtaccgccgcgtcgccggcgtgcagctcagcatcaaccacttccgcagcgccgccctcggcgacaccgtcctcgcgcaggccgtccccgtccacgtcggacgctccacacaggtttgggaggtgaagctctggaagatggatccgtccacgggagcgaagggacctcagatcgccgaatccagagtcacgctgctgtctaacctgccgttgccggaggagcacaagagggcaggagacgctctgaagaaatattcatcaaaactgtagagaagaaacttcatgctcatgaaagcccttgcatcttgcaggtttcacggatctgatggatgttgtaattaaaaagcattgcctataataaatatttcttatttaccaccaaaaaaaaaaaaaaaaccgtaccatgtgtcccgttgagccctcatcacactaaaccaaacaaagaaacagaagacctttcctgttgaaaataacgtcaggagcaagagcaagaggcgtgaggctggcactattcaccatccggcaacaaatcggaaggaggcggtaagacattccatgcggagtgctatgtggctgagagatgggaccagcgatatgaatctgggagcgtcttatgagtgggccagtgttggcttatgtccgtgtgcgtgtctgactgtgccggtatagagaccggttgtaagggtattgccggcnnnnnnnnnnnnnnnnnnnnnnnnnnnnnnnnnnaaaaaaaa

SEQ ID NO: 13507 - DNA, 318 bp, Zea mays
  unsure (1)..(318): unsure at all n locations
  Clone ID: MRT4577_11230C.1
gcgcccacgcgtttttccacgcgtccaacagttaacggaaagcggggtcaacggctggcgggggtcctggccgttcaccaccatgcctgaccccaccaccaaacccctttcgccacgcccccgccgtcgccgcaggctatgcggtctatgcctcggcaccgcgctactcgcgctcctcgtcgccgtgctcgtccatgtcgtcgtcccgcttccgcgcgccgcttccgtctccgcgcgcttctccgtcatcatagacagaggcagcacgggcacccgggcccacgtnttcctcacggggcacgacggcagcccgggatc

SEQ ID NO: 13508 - DNA, 205 bp, Zea mays
  unsure (1)..(205): unsure at all n locations
  Clone ID: MRT4577_112310C.1
cagtgatccacactaacgaacgaactcttgtttccatcacgagctagctgaggtcgaccagcccggctgtgctgaacagcaggaagacccctcacgtggtggccgtgctggtggtggtggcgctgctggcttcgtccgcgtcggcgagcatcacctgcgggcaggtggggtcgtcgntggtgccttgcatcccttacgcgtcctt

SEQ ID NO: 13509 - DNA, 256 bp, Zea mays
  Clone ID: MRT4577_112311C.1
gtacaaccaacccccgttgaacttcggggggggtattttaaaaaacttttggtttaatcagccaacgagacagggctatccaccccgcaggatgaagcccatataggagccctaatggggatcagaaacaggccccgcattagccccgataatcgagaatgtggtggacaaccaacgaccacctgttcaactgaaacaacaccttcctattgcatagtaaacaattgcagaacaactacatccgagttcaacatgt

SEQ ID NO: 13510 - DNA, 317 bp, Zea mays
  Clone ID: MRT4577_112312C.1
cggacgcgtgggcggacgcgtgggctaccagactggtcatacatcaaacattgaatctgctccctcagctgagtctccaatttcatgcaaaacacaagttaaaaaagatcattcattgagggtggatgaatcgccaatttctgatatcccaggtcgtcaagacctttcacctatatccatgaatgaagggtttataagttgtgtaatgactgatggacgtgtggaaatcaacaagaccatacctgaagaatgcttagttgaaaatacgcacaagataaattcagctgaaatcaaaagaagatgcagaaaagttgagc

SEQ ID NO: 13511 - DNA, 222 bp, Zea mays
  Clone ID: MRT4577_112313C.1
ttttggggggtttttttaaatttttttttgttttttaccctttttttgttgggcactaaaacaaacagttgaacactgcaagggaaacaaagaccggtcgacaggagattaaaacaggcatgaaagaacatggttcattgggtcctatgcaacttcggaatcatgtcgcgcccaaggatgggggttcagatccacctgaagctgagtttttttggtgggggt

SEQ ID NO: 13512 - DNA, 447 bp, Zea mays
  Clone ID: MRT4577_112314C.1
ccagaatcgcctgacacctgaagaaatcgaaaggatggttaatgatgctgagaagattgctgaggaagacaaaaagctcaaggagcgcattgatactagaaatgagttggaaagctatgcctattctctaaagaatcagattggagataaagaaaagctgggaggtaaactttcctctgaagataaggagaccatggaaaaagctgtagaagataagattgaatggctggaaagccaccaagatgctgacattgaagacttcaaagctaagaagaaggaactggaagaaattgttcaaccaattatcagcaaactctatggaagtgcaggccctcccccaactggtgaagaggatacagcagacaaagatgagttgtagacactgatctgctagtgctgtaatattgtaaatactggactcaggaacttttgttaggaaaaaattga

SEQ ID NO: 13513 - DNA, 612 bp, Zea mays
  Clone ID: MRT4577_112315C.1
gattcccccggcgcacgaagcaacgactcgccggagaagaatcccgtagggaaatcaaaccatcggaggagcttcacgatggcgggggaggggaggccggacgcgcagctcttccagctcctcaccgaccttctgcaggaggtggagtcaatgagcaaccaggaagaggtagaattgagagcaaagattgaagcgctgggcctagaagtcactaaggttccagagaaggcacctaagcaacttggtgagttagaaatagccgcagagctggacagactgtcggcaaggctcgataatgtcgacaagatgatatcatctgccattacatctgacccagaggtgaaatcgcttctgagcagcaccgccgatgtctggatgcccgtcatcaccgcgtctgctgatgaaaggcgggggtttgccgaaacaagcggtgacaaggaagagcaagagaaatctaagtaaatagcttggactgaagcccttgtactcctttgtgccagccttgttctgcattttccttgcatgagtatatgttcatacctgtgtgtatcaaatgttcttttgggcaataacagaaaataaaaaacatgttgttcatgtacttgctattct

SEQ ID NO: 13514 - DNA, 309 bp, Zea mays
  unsure (1)..(309): unsure at all n locations
  Clone ID: MRT4577_112316C.1
ccgggaccgggccggcaggtggcctcgtggcgaagcggctccgccggctcccgtgaagacgcgccccaagtgtcgccgtacgtcagcgctctcggcattggcaacgccgcaggtggcctctcgcgaatccgtccctctcgtctcttgggtcgtgttcagttagagatggcaatggggactcgatccccgattccccacggagaatttctccattagaggatgtggatggngaagaaaatttatccnccgacgggtaaacgggaatggggacggggaagcattctctatctncgttccccgcgtggaccc

SEQ ID NO: 13515 - DNA, 1543 bp, Zea mays
  Clone ID: MRT4577_112317C.1
ctcgaggccggctaccccactcgagctcggcccggtgattattactccttaattaaccagatcgaaacgaaaaggcagagagggagggatctccgtctccacgccgcgtcctcccgcacgaatccgcgctccggccaacgggccaagccctagccacccccgcccattcatggtgggcgggccgtgagatctctagggaggcttgtcggcttcgtcgggcgggaggggaggagatgggcgcccggaacagcgctgccgccacgccggtgctgctcaacgtgtacgaccttacggccgcgaacgattacctctactggctcggcttcggcgtcttccactccggaatcgaagtccatggcacggaatatgggtttggagcccacgactacccatccagtggtgtgtttgaggtggaatcaaagagttgccctggctttatctacagaagaacagtgtggctaggcacaacagacatgtctcaggaagaattccgctcgtttattgaaaaacttgcaggtgattatcatggcgacacatatcatttaattaacaagaactgcaatcacttcacagatgatgtctgccagaacttaactgggaaacccatcccttcctgggtgaataggcttgcaagagtagggtcagttttcgattgccttcttccagaaagcgtacaagtttctcctgtaggtcgtgtcccaacgagtcggcgaatatctgatgatgatttgtattcaatacattcaccaatggccgacaaagatgacaatgatgaggacgaggccaaacacctgctgccagctccatccaacgaccagctttctgtagatgtaccgccaaagctagcgaaagatcttctctgaaccactccatgttcataggcgcctaccatacttcaactcatatagccattggtgctaaagtgatcctcaagatggcttgacacagatagggattgggcatatttgattaaagatgaagctctaatttcttgtggcttaccagtttgcagtttcaccttgctgtctcatctcagcaaacagttgtcatctatggtagtagtggcatgattgttaccctgccatttagcacatctggaaattgccaatttggaatgtggggttccggtacctgttaggaatcaggactgtcgatgcttgttgagccccagtgttgaaggcacatactgtaacatgttactatcaaaaacagtgtacatgtacatggctaccgagtatttgccacgaatccaaatgagcgaatctctgttgggctgcttaagcgcctgtagtgacatggaacatctttttgttccgggctattgaacatcgaacattcgaacccaaccatgtggttctgtcgctgatgcctgttatgctgtaataatgtgagattactttttgctgtcgctgacgcctgttatgctgtaataatgtgagattattttttgctatcgctgatgcttgttatgaaatgatgtatctggttcatctctgtatccaaagacctgggcttatattatagaactagccagttactcgtg

SEQ ID NO: 13516 - DNA, 240 bp, Zea mays
  Clone ID: MRT4577_112318C.1
tggaccaacccttccgaacaataacattcatcaactcaagagggaaaacgagcccgctatccacttggtggccgtccctggccgcacaccatggttacgccttggtgttggacgccactttacccatacaagtggcgtttgcgggttatagttactggcggcgaacgatttaccggcgccggtgcatatgtcacctagggttcacctgctaccttctgtgcatttcccaccgccgttcca

SEQ ID NO: 13517 - DNA, 468 bp, Zea mays
  Clone ID: MRT4577_112319C.1
ggatcaacggagggaggagggatgagtgtccctacctgaaagttttcccacagatgttggcaaaaagccagaaatagagggtatcggtataatgttctaatagtatactccatcacaaaaaatgtgcacttctatttacattgctttaagtcaaacaatcttcggttttaccaacttttttactacaaatatataaaagttatatgataccaaataagtaccattaggttcatcatagaatatagttccatcgtatacttatttgtaatattaagtgttgatattattttgacaaacttagtcaaacttaaaatagttttacttggaccagatctagaggtgccctcttttttgaggaagggttgggggaagtgggagtagtaatggtagttttgaaattggatgtctgtgctgagtcaaatgccatcgctgtttatgaattattatgatgttcttaaacaatctgtg

SEQ ID NO: 13518 - DNA, 545 bp, Zea mays
  Clone ID: MRT4577_11231C.1
gtggacttttttttttttttttttaatgaaacaatatataatgaatatgaacctacaatacatcactactgtgtaagaaaagtatatattacttttccgtccttttcatttgtaatacagacgatgaataaaagaatatcatgaatatgaacctaaaatacatcactacttacaaaatcaactaagatcagtctgcatttggttgatttatgtcataaggcccccttcatccttgtgccacctgcagtagttttcgttccttgctgctgggacaaatcagtcagtgacaaaggggtaagtggcggcgaataaatatcgctgccgtccctgctatttctagcctccaacaatctgtccgcggtgacgatcggtatcctctggctatttgatggtatggagtagctgcgagtcagggtagcaggcggcggtggaagcggcgagggggttcgtgacgctgtcggcgacacacgggctgtggctgcagggatctgagtctgacgcttggataccagaggaccagagtagccgaccaaaccagaaggcct

SEQ ID NO: 13519 - DNA, 190 bp, Zea mays
  Clone ID: MRT4577_112320C.1
ggaaaaaaccccacgggggcagccgtaccatccattgtttattaattcattttatttaaaaaattgtgcacagctttacccagttttgtttgccatggggtttttagcaataaacgacgccctctggttttttgaaaaaatgttttcactccaccgagaaaatgcgttgaaaacggtgtttaaaccccgg

SEQ ID NO: 13520 - DNA, 287 bp, Zea mays
  Clone ID: MRT4577_112321C.1
actaaaggagggaggctatcgtacgctgaacccccacaaaaaaaaaaaaatatagggcgacctatatacatgaaccaggccttcgatctacaatcatgccgattgataaatccttttttagtgccccctaaaatcaatttgcagcccatccccttttaaccagctgactgaaaaaacaatagggtcgcacaaatcaaccttcctaaaagatacgcacccttcatgagtaatgggactcgccaagaagccccgcattaacccccttaccaagaggtggcacacctcaa

SEQ ID NO: 13521 - DNA, 437 bp, Zea mays
  Clone ID: MRT4577_112322C.1
atgattaaaactggttttcttcacagcaacaaatacatactttgggagaacatatgaccaataatttatgtattgtgttacaaaagatatataatatgaataaataaatatatcatataacagatatctatgatcgaggttttaaacagttgatgcatttatacaaaccatgacaaatatgatatttaatgatagataacaaaatagactggacacagtcatgaatcacattattacataaaatgggtgacgcgcgacaaaattccacgcctctttgaagggtaatatttttctgaaaaggctttccgacctgtaattatttaagaaaatggacccattgtttgaaccatatgccagtatttttccgccaagggaaaaggttcacttcacatggaaaccccacactccatgtctcttaaaccgcgtgtacttgttca

SEQ ID NO: 13522 - DNA, 479 bp, Zea mays
  Clone ID: MRT4577_112323C.1
gctgtccgcccttttttttttttttttgagacgaatgtgttcaagtcaaccaatcagccatacatggaagatccatgtcaagatcacacacaagaaaaaggaacagaagctgggcagtacagcgggcagcagctagtagctgaggcgaccatctccgtcgtccgtggtgatgccgatggacggcgacgtcaccgagacgtccacgtcctcctcgggcgcgggggactgctccaccggcacgctctcgatcatcctcaccacgtcgcccatggagggccgctgctcgggcagcggcgccacgcacgccagcgccacgtgcagcagcgccaccatctcctcctcgatgtccctgtaccggagcagctccacgtagaacacctgcgaggtccactcctcccgcaccacggaccgcacccactccgggaggctcaggctcgtcgccgccgtgcccttcttgcgcgcgtagggctgcgggtgct

SEQ ID NO: 13523 - DNA, 436 bp, Zea mays
  Clone ID: MRT4577_112324C.1
aatgaatccaaagatcacgttacaacaacgtacgacaacgcgtgctagcaatcatagatggctactcgtactagcagaggcccatgcattgaaccaactagttgcattgaacttatgatcatattggcaacagcaacaactaccatgaagacgactacctggtgcctacctgcagcgattgctttcatgcagccaagtgtacatgtataactgatctgcttattgacagcagcaacaactattaccatacagtcaggtagctgaagcgagccgtgctacctcattgatgcaagcacagctgttgccgcactaccagaacgctgggcctaacgctggaatcttattacaactgcaacaattgctgccattcaaccaacttgctttgacaaacccagcagcgttctaccaacaacccatcattggtggtgccctcttt

SEQ ID NO: 13524 - DNA, 201 bp, Zea mays
  Clone ID: MRT4577_112325C.1
ggggggtgagactaatgagaggcacattcagtttacaggctatactctttctgtcaactgttcgcgaacacgaaggtacatgaatgacacgttctcttggaaataagacttgtccgttaaagggacaccaggacgtcttgcatatttgttaggatgtcctgctcttgtatgtttagacagcctttctttttgcctttttac

SEQ ID NO: 13525 - DNA, 453 bp, Zea mays
  Clone ID: MRT4577_112326C.1
tttttatttttctccaacaaagaacaaggtttcatgagccaacagttttaccatagcaatcattgtctgaagctagtttgatattaggccataagatacacaatagatttaacttaataaaagagggatctttttatcctcacttagttcgaaaaacttataaaatgtactcgtagttaaaactgggaaaactctcacatgacgatctcgggcttcaaagtgcttgacttgatcttttcatgtgggaaaacaacaccgacattgctgtataccttgtcacacacataaacattcctacccatcatggtcatattttttattcgtgccccttggccaacagttaagtgccaccctatatatgctgatcaatatgcaggcatgcttctttatccccacaccatttatgatatgtgccgcggtaaatcctcacgccatcctccaaaacatattcct

SEQ ID NO: 13526 - DNA, 366 bp, Zea mays
  unsure (1)..(366): unsure at all n locations
  Clone ID: MRT4577_112327C.1
atcgattacgcgnccgcccacgcgnccgcccacgcgggggcccacgcgaccgcgcgaggggagcaggccgcacacacaaggaaggggacaaccacaagcgccaaagaacccgaccaccgcgacgagaaccncgccgaggcggcgaccgacgagggagcgccacggcgccgaggggcgcccccgcgacgcagggcaccgcggcagcgccgctgccgcctctcgcgcggaggaggacggcccgcggggagggggaggccatggcggccaccaacaacaggcgagcacggcggatccctcgcctctcgccgtctaccgcaccgtgacacgctaacctacgcggaagagcgcaggaacctgggagccacg

SEQ ID NO: 13527 - DNA, 1347 bp, Zea mays
  Clone ID: MRT4577_112328C.1
ggagtgggagcgggagcgggagcagttgcagctgcaacggtcgctttgctggctgctggtccggtcggttcctttgcccaccagctcagctcagcactcaattcaacactcttccagcttgcttgcccatctccccaaacatccgccgcgcttcaatacttacaacgagatcgcagcttccatggccttcttttccgaatcccagagaccctctcctttcaaaaaacagaaacaaaaataaataaattccagactccccgagacagacagacacaagagttgggtggcgtggttccttgtttctattctacctccctgggctccgtttctttccctgcgaatgcgaagctggctggctcggcacggcactgcacagaggataccggcggtaactgagaggccctgccgcgatggggaagaagcgagcggcggccgtgagtgctccgttccccgcgcccgcctccgagcccgagtcggaccacttcagcgactacggcttcgacccgcagctcctccacttcccctcccagcctgaggcgaagcgaccgtggggcaggcgccagcgccaccagcagcctgcgcagttgaagcccctggactccgcgcggttcaagctacagaagcccatcgccaagaagcaccaccgccagcagaaacagcagcagcgccgccggtggtggagctccgccgcctctgccgcgctccatctcttcaggaagcgcccctcatcaaccagacccgccgcaggagctccacctccccagtacgggtcgcccgcgtcgccaaccgtgcctatgtacctcaccgactgcgatgctggcggggacgacggcggcggcgcgtccgcgtgcacgtgctgggcaccggccgtgcggtccggccgcctggccgccgccgagctcggcgccgcggcagtggcggttccctacgtcagcctcaggtccactagccttggcactggaggcgctccggtgatgcccatctacctcgtcacctgaagctagctacctcaggccgacgcgggtttcttcttcagaagcttggaccacaagacgtcagtaaattaaaccctgtccaagcgcctggtcaaatatcaactgcttctataattgttcctggttttcttctcccgtctgtggggtattttccagatgtagttgcagcagctgcgtttttctttcaaattcgttgctccaagaaggttgccggctcctatatggaagttctgacttcttcagaaataaaaaaaaaaaaaagcttaagagacgatagattatagtattagagcaattcaaaagaatgttaagaagtttctaaaaaaaaagttgagagtaaactaattttttt

SEQ ID NO: 13528 - DNA, 300 bp, Zea mays
  Clone ID: MRT4577_112329C.1
gccgcgccgtccaaaccctagccgtcggcggcggcggcggcggcatggttggcgtggaccggcccctcgtcttcgtgaaaggcctatagggcgacatggtaacccacgcccccgggatatccttaccccccgtgttttgggcgcccattccccccgacgtggtgagggttacccacaagatgttgtgctgtaaaaaagagcacgactattcagtattttcccgcggcggggaccacaaaatttgggcgtactctggggccccccgcgccccgttttttatttcccccgtgtcccgggggg

SEQ ID NO: 13529 - DNA, 450 bp, Zea mays
  Clone ID: MRT4577_11232C.1
ggcagccctcaggaaacaacaggggggggcgctgcaaccgggacggggaacaaaagtttagtcattcggggggaaaagggttttacaaagctacccttacaaagctgttgctttgtttgtatgggggggcttcaaaaggttcggatttgggataccactaccctcaaaaaagctggttttacacaacagggctcacgagctcgacaggctcttcgcgggaggggttgccggcacccggctgctttgggtcgagttgttcttgttttcgccccagtgccataacatgctctcccaaaaacagaacttttcgaaacaaggtttcagcccccgatcgggtttgttccgtttccaaagccccgcggggaagtttgcctttttgggctggccgcgttcccactccaggcccagcttaaaccttgacccccggggggaaataagtttgaaaacttt

SEQ ID NO: 13530 - DNA, 738 bp, Zea mays
  unsure (1)..(738): unsure at all n locations
  Clone ID: MRT4577_112330C.1
aattcggcacgaggcggctttatatttgtttgacatggttatgtgttgagtttaaagcctaacagatttattttgaactctccacctcccttccctgaaaactttgtttcagcctttcatgctatcctttttgtgcttagtgtaataatctcgttacatgtgtatggcaaaacaatgcctattttgtttgcttaccggtaaaagttataaggatatattttttcatttcaaaaccagttgatcattgacagataaacagtaccttgacacgtcttacgctagatttatcccattccttactaaaaagttaccattctaagtccaggctgatttttggcaatatctgtgtttactttattttagagttataaattcatgtgccagacccatcagggtcctcaacaataatagctgaacactgtctagttcctctgttttgtaaacctattttagagttttgctttttggcttgtcactgcttaactttatagttttgttaattttctaccttctataactcttaaaaaatcccatgtgtaacaagttgagatttttgagctgtatgtttaccgcataggttgtacatggccagatggcctgnatgtaaaaccagctaaactctgcagtttgaatgcacttgttgctgagctgcaattattatcacgataagtttgcttgtcatgattacaatatgtaatacaaacattgattggcaacaggcacataagtacataacct

SEQ ID NO: 13531 - DNA, 168 bp, Zea mays
  Clone ID: MRT4577_112331C.1
aaacctttgccaaagcaggcagtcgcatcatgccgcctggatagagcaaaatggagggtttcacaatacaccccggggccccactatatattgggggtctacaaaaagaacctagcaggagctccttcaacttattattacttccgcctaatcatagaggatcccaaa

SEQ ID NO: 13532 - DNA, 816 bp, Zea mays
  unsure (1)..(816): unsure at all n locations
  Clone ID: MRT4577_112332C.1
aaattaattattttttatttttttttaattaaataaaataaacaaaaaaccgccccaaaaaaagaaaaaacgatacaaagggtcccacgataaaaaaaaaaacaaatcccggggggaggggaaaaaaaaaaaaaaaacccctgggaaagtttaaaaccccacaggaggtttaattgttccaaaaaaattctcctctcatgaaaaaccaaataaccccccccccccggattatacggaaaaagaaaaccaccacggggtaaaaaacttttacctttagggaaaaaaacccatatgaaaaaaaaacctttatcccccgggaaggggaaaaaacaaaaaacacaaaaactttttaaaaaccccccaacaaagagttaagaaaaaaaaagaacatccacactcgtctttggggaagaaccaaaaggaaaatcgaaatatctcttttatttccccccaaaaatataaagagaaagatcactcttcaaaataaccccctaaaaaaataaacacaaaggaagatatctaatttcccaagaaagggaagggttaaaaacccccaaaaaaaaaaaaaaaaggggtaagcgctctataaaaccataaaaaaggaaagttttaaaaaaaaaccaggaaaaaactagaggttcccatcaatgacaaaaaaaagagaaaatttttaaaagagattaaataaaaaattcacaaataaaatataaataataagaaaaataataaaatataaaaaaatagagatgtagnnnnnngaaaaaaataattaaaacaaaaatttcactttaaaaaaaaaaaaattcactttcttct

SEQ ID NO: 13533 - DNA, 486 bp, Zea mays
  Clone ID: MRT4577_112333C.1
ctctaaaacacacctaattcacacccgggtagggcctagcagcaacggggctgggtctaatcctaactctgcgccgccagtacaggccgtcgcgcctacctccgcctcgtccttgcggaggcgcctactaatatctactgtactaccataatcacgatgggtcctgcgatcaacataactgattggtgaagagaataagccaaatgccttagagaaggtctaggattgaaagatatgtcacaaataacagacgatgtgacaatcaattactccatgaaggtagtagaagacgaagatatatacaataaggccatgaaaaaggacaccaatacacaggcattacagcgaagagagcatacactgggctaaaagctaacggtaccgctcttgatggcaatgaacctgactaatacacccgagggacatctacactaaattattttttttgagaataccacaatggcaatcgatgtacacgagccacac

SEQ ID NO: 13534 - DNA, 865 bp, Zea mays
  unsure (1)..(865): unsure at all n locations
  Clone ID: MRT4577_112334C.1
ccggccgggccgggtggcctggaccggttgggtttgcgtgtggactgccatcctactcttcttgctggccatactaggcgcgtgctccatcatcaaccggttcacccgcgtcgctggcgagctgtttgggcttctgatcgctatgctcttcatgcagcaggctatcaaggttggctgcgtggcttcatcgctgactatggtgttccactgatggtgctagtttggactggagtgtcttacataccatatggaaatgtaccaaaagcaattccgcgacgccttttcagtcctaatccatggtcccccggtgcatacgataactggacagtcatcaaggatatgacacaagttccactcctctacatcattggtgccttcataccagcaacaatgattgctgttctctactacttcgatcatagcgttgcatctcagcttgctcagcagaaagagttcaatttgaggaaacctccatccttccactatgatttgcttctcttaggcttcctgacgttaatgtgtggccttattggtatccctccatcaaatggtgtcattccacaatcacccatgcacacgaagagtttggctactctcaagcatcagctgcttcgtaaccggctagtagccactgcacgaaagagcatgagccagaatgcgagcctgagccaactgtatggcagcatgcaggatgcttatcagcagatgcagacaccactggtttatcagcaacagtctgtcagaagaggcttanatgagctcaaggactcaacagtccagctagcttcgagtatgggtaacattgatgcaccagttgatgagacagtctttgacatagagaaagaaattgatgatctgcttccca

SEQ ID NO: 13535 - DNA, 722 bp, Zea mays
  Clone ID: MRT4577_112335C.1
aattcggcacgagggctgctctctctgagcctggcccttgccctcctctccctccgggaaccagccctgctctctatgctcctcttccattcatagcctcggccttcgtcttcctccatggatccgcgctaaatgcattgcgaggttccaaactgaatataccttcagatcttcctgtctgcgaaaagcgacgcccttttggcccgggcaatggaggagagcttcgtgcccttgcggggcatcaaggacgacctccacgggaggctcgcctgctacaagcaggactggaccggagggttccgtgccggtatcaggatcctggcgcctaccacttacatattcttcgcgtccgcgataccggtgatatcgttcggggagcaattggagaggaacactgatggagtcctcacagcagtgcagacgttggcgtccactgccctgtgcggcataatccactccattgtaggagggcagcccctgctgatcctgggagttgccgaaccgacggtactcatgtacacattcatgttcaactttgccaaggacaggcccgacctcggacggaatctgttcctggcctggaccggttgggtttgtgtgtggactgctatcctgctcttcttgctggccatactaggcgcgtgctccatcatcaaccgggtcacccgcatcgctggcgagctgttcgggcttctgattgctatgctcttcatgccgcaggc

SEQ ID NO: 13536 - DNA, 431 bp, Zea mays
  Clone ID: MRT4577_112336C.1
acaatgcatgttttggctagccctgtgctgaagataccactggctgatctccaattctatacagctgcaataagcactgttagtggaacgcctctccgtgcgattactgttacaaatacaatgggtgatctgcctaaagtgacatatggtgcctgataactcacacttgagcatggacgttagcccctgtactggttccagatgaagatatgaacaaatatgatgaatctgaacgaccacatatgtaaggagatgaatgagctgtacctattcatgcgcgcacacattactaaacgcgcgatatgcgattggaactacctacccgactataacgctaatctactaaatgggcaataaggtgacctgatacctaagcgcctgtccatgacattcaagaggcacagtcaacggaaacgactaaacattatgct

SEQ ID NO: 13537 - DNA, 909 bp, Zea mays
  unsure (1)..(909): unsure at all n locations
  Clone ID: MRT4577_112337C.1
attgggtacctcgaggccggccggggggtagcggttacctccctttcgctctactgctctctctctctctctggaccttgccgttctctccctcgtcggcaatcagcccgcttcctgtgctctctatgctccccttccgttcgtagcctcggccttcgtctccctccatggacccgcgctaaatgcatcgcgagattccaaaccggtagcgtttcttcctgctccatccgccgcaagatgtaagcaagggcctcacttcacacccggagtgggagaccatccagaatacatcctcagatcttcttgtgtctgagaaaaaagcgacgcccttcaatggaggagagcttcgtgcccttgcggggcatcaagaacgacctccacgggaggctcgcctgctacaagcaggactgggccggagggttccgtgccggtatcaggatcctggcgccgacgacctacatattcttcgcgtccgcgataccggtcatatcgttcggggagcaattggagaggaacactgatggagtcctcacggcagtgcagacgttggcatccactgcgctgtgcggcgtaatccactccatcgtgggagggcagccgctgctgatcctgggagtcgccgaaccgacggtgctcatgtacacattcatgttcagcttcgccaaggacaggcccgacctcgggcggagtctgttcctggcctggaccggttgggtttgcgtgtggactgccatcctactcttcttgctggccatactaggcgcgtgctccatcatcaaccggttcacccgcgtcgctggcgagctgtttgggcttctgatcgctatgctcttcatgcagcaggctatcaagggacttatcgatgagnctggcgagctgttttgggcttctgatcgctatgctcttcat

SEQ ID NO: 13538 - DNA, 334 bp, Zea mays
  Clone ID: MRT4577_112338C.1
tccactcagccagtatagcatctgtgctaagcgaatcgaagcttgaagctagtcactcagggtctagaggacgatgggcatgggcgacgggatcgatagcgaatctgacaggggtgagttatctgccatggactacacggaccctcctgcggcgccgctgatcgactcggcacgaactcatgtcctggtcgctgtaccgcgccgtgatcgccgagttcaacgtcacgctgctgttcctgtacatcacggtggccaccacagatcaggtacgaagcaccgagacggacgtcgtatgcgtctacgcgctcgacgctgcgctcggcaaggtgttcgt

SEQ ID NO: 13539 - DNA, 1712 bp, Zea mays
  Clone ID: MRT4577_112339C.1
gggccttattgtgtatccctccatcaaatggtgtcattccacaatcacccatgcatacgaagagtttggctactctcaagcaccaggtgagtcatgaaatacttgaaaataccatgtgaacatctgatttctcactcacatggcaaacatttctgttcagatccttcgtaaccggctagtagccaccgcacggaagggcatgagccagaatgcaagcctgagccaactgtatggcagcatgcaggatgcttatcagcagatgcagacaccactggtttatcagcaacagtctgtcagaagaggcttaaatgagctcaaggactcaacagtccagctagcttcgagtatgggtaacattgatgcaccagttgatgagacagtctttgacatagagaaagaaattgatgatctgctgcccatcgaggtcaaggagcagcgtttgagcaaccttctacaggcttcgatggtggtgggctgtgtcgctgctatgcccctgctcaagaagatccctacgtctgtcctctggggctattttgccttcatggccattgagagcttgcctggtaaccagttttgggagaggatcttgctcctcttcactgctcccagcagaagatacaaggtgcttgaagagtaccacacgacgttcgtcgagacagtgccattcaagacaatagccatgttcacagtgttccagacagcttacctgttggtctgctttggaatcacatggattccaatagccggagttcttttccctctcatgatcatgctcctggttccagtcaggcagtacatcctccctaagctcttcaaaggtgcacatctaactgacctggatgcagctgaatacgaggaatcaccagctataccattcagccttgctgcgcaagacatcgatgtcgcattgggacgcagccagagtgcagaaatcctagacgacatggtcacgagaagccggggtgagatcaaacgcctgaacagcccgaagatcaccagctcaggtggcacgcctgtggcagaactgaaaggcatccgcagcccatccatttctgaaaaagcatacagccctcgtctcactgagctccagcatgagcgcagccctctgggagggagaagcaggcctaggacgccatccaagttgggtgaaggctcggcaccaaagtgaataaagcaatgatgcattgcttaagctatgcaactactgggttactggccatcaattatataagtgattttaaagtggtttcagtgttagtatccaagatgtcctctgatgagattactactattcatgtgtatctctagcctctttttctttctttctttctttctttcttttcttttgtgttctcctgattaaaggagtgctatacctgtaatctctgaactagcagaaatattagagtaactactcgaaaaaaaaaaaaaaaaaaaaaaaaaaaaaaaaaaaaaaaaaaaaaaaaaaaaaaaaaaaaaaaaaaaaaaaaaaaaaaaaaaaaaaaaaaaaaaaaaaaaaaaaaaaaaaaaaaaagaaacaaaaaaaaaaaaaaataaaagacccttacaggggggtcaattaagccctcttcgcatgaacgagggaaaaaccccttccctgggccaaagggggggagcgattcacactccccaaaaaaaaaggggcgcggcgtctttaacctaaaaaaaccggggccccccaggggggggca

SEQ ID NO: 13540 - DNA, 324 bp, Zea mays
  Clone ID: MRT4577_11233C.1
cgatagctcactccatttgacccttactattcacggggaggcgcccattttttgtgtgttggtgctctcatatcaaccttcattcctcaacaaagaagcagcatcttagaagttcccaatctgtccagttctaggtgaaagcaacagcttccttatccgctactgagcttcatgtatccatcatgttgctctccacacagtgagcctttttttagtaaagcgtgcatacccacagcaaatgcaacgacatcatccatttcctttacatccacaacggctgacctggatgctcttcaaaacacccaaaaatcaactttcgaccag

SEQ ID NO: 13541 - DNA, 441 bp, Zea mays
  Clone ID: MRT4577_112340C.1
ggaaagctgacacacatgcagataccattaccgaatttccccgttgccccaaacactttgttacacaccttgatccacttcctacgtgaagcataacctaaggagcacggtgggccctctttgctgaccctgcttaatgatcttaccgacaactagcccaatcacggcccacttgtgccatcggttgtcatggaaatatcaacattcagataggagctatgcccaacatacatgaatgagcgcatatactaccggacctatttttcactcgtacacagccatatagatgcacttgagaagaaatactttgagctgctgaaagtgttagcagctcaagagcaaaggtttcccttaccaagcattccatgcatctacaactgcagaaccgtaagacacaaaagtgccatgcaagaccgattcgacaaatccagaacatgacct

SEQ ID NO: 13542 - DNA, 2770 bp, Zea mays
  Clone ID: MRT4577_112341C.1
tttttttttttttttttgagttaatggttttttttttttttttttagtatcaatgattatagacaattaaagaatgataatatgctagtgacatgaattttcaagtagccactctaatattctgctagttcagagattacaggtatatcactcctttaatcaggagaacaaaaaaaagagaggctggagatacacataagtagtaatctcatcagaggacatcttcatataaggatactaacactgaaaccactttaaaatcactcatataactgatgaccagtggttgaatagcttaagcaatgtatcgttgctttcattcactttggtgctgagccttcacccagcatggacggcgtcctagggctgcgctcatgccagagctcaatgacacgagggctgtatgctttttcagaaatggatgggctgcggatgcctttcagttctgccacaggcgtgccacctgagctggtgatcttcgggctgttgatgcgtttgatctcaccccggcttcttgtgaccatgttgtctaggatttctgcactctgggtgtttccgaatgcaacatcgatgtcttgcgcagcaaggctgaatggtatagccggcgattcctcatattcagctgcatccaggtcagttagatgtgcacctttgaagagcttagggaggatgtactgcctgactggaaccaggagcatgatcatgagagggaaaagaactccggctattggaatccatgtgattccaaagcagaccaacaggtaagctgtctggaacactgtgaacatggctattgtcttgaatggcactgtctcgacgaacgtcgtgtggtactcttcaagcaccttgtatcttctgctgggagcagtgaagaggagcaagatcctctcccaaaactggttaccaggcaagctctcaatggccatgaaggcaaaatagccccagaggacagacgtagggatcttcttgagcaggggcatagcagcgacacagcccaccaccatcgaagcctgtagaaggttgctcaaacgctgctccttgacctcgatgggcagcagatcatcaatttctttctctatgtcaaagactgtctcatcaactggtgcatcaatgttacccatactcgaagctagctggactgttgagtccttgagctcatttaagcctcttctgacagactgttgctgataaaccagtggtgtctgcatctgctgataagcatcctgcatgctgccatacagttggctcaggcttgcattctggctcatgcccttccgtgcggtggctactagccggttacgaaggatctggtgcttgagagtagccaaactcttcgtatgcatgggtgattgtggaatgacaccatttgatggagggataccaataaggccacacattaacgtcaggaaacctaagagaagcaaatcgtagtggaaggatggaggcttcctcaagttgaactctttctgctgagcaagctgagacgcaacgctgtgatcgaagtagtagagaacagcgatcatcgttgctggtatgaatgcaccaaggatatagaggagtggaacctgtgtcatgtccttgacgactgtccaattgtcgtatgcgccaggggaccatggattagggctaaaaaggcgccgcggaattccttttggtacatttccataaggtatgtaagacactccagtccacactagcaccatcagtggaacaccatagtcagcgatgaagccacgcagccaacctgtcccatagcgccatgatcgtgccttcctgctcctgagggcagtgagtaaaaggccaaacgacaagacaattgcgaacatcccattggcgaaccgccatgatggaacaaactctagtgcctttgtgttttccctctcaggaacgcggaactcgtcgacaagtcccttgatagcctgctgcatgaagagcatagcaatcagaagcccgaacagctcgccagcgatgcgggtgaaccggttgatgatggagcacgcgcctagtatggccagcaagaagagcaggatagcagtccacacacaaacccaaccggtccaggccaggaacagattccgtccgaggtcgggcctgtccttggcaaagttgaacatgaatgtgtacatgagtaccgtcggttcggcaactcccaggatcagcaggggctgccctcctacaatggagtggattatgccgcacagggcagtggacgccaacgtctgcactgctgtgaggactccatcagtgttcctctccaattgctccccgaacgatatcaccggtatcgcggacgcgaagaatatgtaagtggtaggcgccaggatcctgataccggcacggaaccctccggtccagtcctgcttgtagcaggcgagcctcccgtggaggtcgtccttgatgccccgcaagggcacgaagctctcctccattgcccgggccaaaagggcgtcgcttttcgcagacaggaagatctgaaggtatattctggatggccagtcggagtgtcaagtgagggcgtgaggccgtgcttacatcttgcggcagatggagcagggagaagtgctaccagtttggaacctcgcaatgcatttagcgcggatccatggaggaagacgaaggccgaggctatgaatggaagaggagcatagagagcagggctggttcccggagggagaggagggcaagggccaggctcagagagagcagcagagggaagagctaccccggcccggccgcgaggtacccaacggggctagctggagggtacccc

SEQ ID NO: 13543 - DNA, 733 bp, Zea mays
  unsure (1)..(733): unsure at all n locations
  Clone ID: MRT4577_112342C.1
acntcacaacgtccttctccccctccccacctcctctgctacgccgcctccaaaccctaacccgcgcgcttgcgtcctccgccccgcagcccatggcgtcgtctcctcccctgaagaaggtgctggtgcccatcgcgaacgggacggagccgatggaagccgtaatgaccatcgacgtgctgcgccgcgcgggggcggacgtcgccgtcgcctccgtcgagcctggggccgcgcaggtcgccgcatcctggggcgtcaagcttgccgccgacgcgctccttgccgacctggccgaagctgattttgaccttatctcgcttcccggagggatgcctggggcttccacctttggagactgcaaaattttggagaatatggttaaaaaacatgcagagaagggcaagctttatgctgcagtatgtgctgcaccagctgtggcgctgggagcttggggtttgctcaatggattaaaggcaacttgtcatccttcagtcatggacaaacttccttcagagatgcaagctgtacaatcaagggtacagattgatgggaattgtgtgactagccgtgggccaggaacaaccatggagtattctgttgttttggttgaacaactgtatggcaaagaaaaggccgatgaagttgctgggccaatgttaatgcgtccccagcatgccgcagagttttcaatgaaggagctgaattccaccagttggaatgttggtgaaaatcc

SEQ ID NO: 13544 - DNA, 280 bp, Zea mays
  Clone ID: MRT4577_112343C.1
gttacaaatcagccaacccgtactgcctagagaggatcgttgaacagaacagatcgaacaggacatcgctctcgtaccgagcctgactctatcatctgccagtgcctatgcaataaaaatgccctacccctgcgcaggactagaaggcttgtacaagccgctgtctccggactgactacgatgattggagcctgcggtttgttccccttctcggagtaactgaagcagtcgcaatgcaaccatttggcggaggagccctactacaccggcagtgggcaga

SEQ ID NO: 13545 - DNA, 325 bp, Zea mays
  Clone ID: MRT4577_112344C.1
aggccacgcgtccggcatctgatgataacaagactgtcaatgtgatcgcgacctgatgtgtctcaagtaatggcggctaacgaatttgagtccaaagatccaatggatggctctatgtccaagcaccacggcatacgctacctattcggagatggttcacgactggtgttccgtctatacataaccgtgcatgttgagtgccaccatccgtgtctacactcgacgatacgagaacgattccttcaagaccgtcagggattcacaggatgcccttgctccaatggatgatgttgcgcttaaacttctccaaaatccaagagtacac

SEQ ID NO: 13546 - DNA, 166 bp, Zea mays
  Clone ID: MRT4577_112345C.1
ggaagggtgctcgttggggaggtgcctcgtgctgtcccagctaccgcatatggcggcacaggccgggcctgcggcgaagggcggcgtcgggctgatgcacagcgcacaagacgttgccgtggacggggtctgcacgagccggtgctgcctgcacgattccgacgcc

SEQ ID NO: 13547 - DNA, 294 bp, Zea mays
  Clone ID: MRT4577_112346C.1
cttgccagtcacgctcagataagtgccagattattgtggagtgtgttctttattcaaatcacgtcctcttccagaagcagatacaggtatttatagatgcttatctgggcctaatcgcctggatctattacacggtcttggaaccctaatgggccaccccaacagttaatctgtcttgtttaaccggcttacttttttttacaagttgttgtagcagcagatttaccaggggccgtttctttttccccccctagaacacttgcttgacccccaagcaagataatctgggaaccc

SEQ ID NO: 13548 - DNA, 267 bp, Zea mays
  Clone ID: MRT4577_112347C.1
gtggggtgtttaataaagctatttgataataccaccccagcacggaccacccgggcaaaacgcgacaccggaggactcgacgtgagctgcacaccaagccacgcaacagccttaaggcactgggtgctaaccaggacccgatcctagcaggcgtacaatcgctagaccccagcctacatactgaagcaaaaccgccttgatggcaccaacagagacaattccagaactccagcaaaaacccagggtcgtattgcacaaaagaggcga

SEQ ID NO: 13549 - DNA, 516 bp, Zea mays
  unsure (1)..(516): unsure at all n locations
  Clone ID: MRT4577_112348C.1
ctggggaacttgtgccctttgccccctggccaaacggaaggggaaaaaagccaacggcccaacaggaaaaagggaaaaacaaaccccccagggaagagggggcacctgggaattttgggggcgcgcaaaaaaaaaggaaaaaaaaaaaaggggggggggaggcggccccacgccccccggaaaaaaaaccccaaaaagccccccagagggggggagnnccaaaaaaaaaaaaaaaaccaggaccccagggggggccacccgcccacccccccacccccaaaaaaaccacccaaaaggggccganccccaaaaggggaaaacagaaaagggccccccccaaaacgggcgcgaaaagccggggggccaacgggcaaacgggctaacccccccccccaaaaccggggggccaaacccgccaaccccaaaaaaaaaaagcaaaaacgccnaaccccaaaaccagagggaacccgggaacaagggccccaaccccaaaacgcgggggggaaaccggaaaaa

SEQ ID NO: 13550 - DNA, 351 bp, Zea mays
  Clone ID: MRT4577_112349C.1
tctcaccggagcattaggctacgaaggtcgcgcccatgacagggtgtggagttgtggtagcgtgcccacaccggcgagaaattgcggaggcgacccgggcacccaccaccgaacttgcctcgatgaggttctacccacgccaatggtcaccccaaccctggtttgagctccgagcagcaccgcttgccaggcatcagcggtggcgctcatctctggattccaccaccgtgcacaacgaaggtgttcaccggctagtctttcccatggctgggttcattaggttaggtggtggtcactcgtggctggttccagagaccggagcgcggtgtagcccgatcgacggtggtgaca

SEQ ID NO: 13551 - DNA, 173 bp, Zea mays
  Clone ID: MRT4577_11234C.1
gcatcattaacacttcaattctaggtctattgctatggtatagtagcactctttcaatctttcatgtgcacagctgatgcttatgtgatctctcctgctttagtggactaacactggtgagctgtgtcgatgcctgctcaaatcagtaaagagagagaacagtcagggactcg

SEQ ID NO: 13552 - DNA, 301 bp, Zea mays
  unsure (1)..(301): unsure at all n locations
  Clone ID: MRT4577_112350C.1
cactgcagcctatcactcgngaagagggttcgccttgggcatgtcgatcacagctcggcctgcgtgccatcgtcagccctcaggactntttctacggggctgactggcggtagctttactgcgnaacatgatccagacgactgtcgcagcgcggcggggcttaccttgtcactgttggactgacggccttcgcgaaggctgggcgtancatactccgtgcatgatgcgagcacttagacaagccacctcgttggcttcttcctggggcccaccccaggggtctgccgttgtcctgtccttg

SEQ ID NO: 13553 - DNA, 509 bp, Zea mays
  Clone ID: MRT4577_112351C.1
gacaccccaagctagtcttgcgtccaaccaaaacaacaacaacgacaactactacaactcgcaggtcgcaacgccgcagcagcagcatatggaggaggaagccggcagaagctggacgacggatgagagaggagacgacgacgacgacgacgacgaccagctgcgcgggacgacggcggcgacgggcagccggagggtgggccgccgccgcaggcggcggtggtgccgagatcgagatgctcagccggaggccgccgccacggtcgtcgtcgtcggtggcggggccttggcgtcggcgtcggtccagcagggaggaagcgacgcggatgacgaatgcggcttccagcagacaccaaattggaagagatttctaacacatgctggacctggtttcctcgtttccttggcctacatcgaccccagcaatgtgcaaactgatttgcaggctggatcaagtcacaaatttgaggtactatggggtctaattcttggattctttttcgatttgg

SEQ ID NO: 13554 - DNA, 416 bp, Zea mays
  Clone ID: MRT4577_112352C.1
cccacgcgtccgcccacgcgtccgcccacgcgtccgcggacgcgtgggcgcgacttctggggccggcggtggaacctcgtggtgtcggacatcctccggccgtctgtctacggccccgtgcgcgcgcgcgccgggaaggcaccggccgtcctggccacgttcctcgtgtccgggctgatgcacgaggtcatgatttactacctcaccctgcgatcacccaccggtgagatgacggccttcttcctgctccatggcgtctgcttgtattggcgaggagtcgtgcgcgcggcggaggatgcagtggggttggaggccgccgccgcgacccgtggctacgctgctcgtggtggtgttcgtggccggcaccgtattctggcttttttttccgcaaaattgcctggaaggaatggaggagt

SEQ ID NO: 13555 - DNA, 499 bp, Zea mays
  Clone ID: MRT4577_112353C.1
tttctatgaggccacactccacgactaatggattcatagacgttcctacgagctcgcgcataagaggactgaatgcctgcatcatcaacatacatagatgccgttcaagatgagagggccttctacctatatgctcatagaaattacatatgactggtactatggggctgtataacgtggaggcggacacttactaatcacgcacctgaaatttacacgatccttgtgtatatgagacaaaaaacagcccttcctgaataagggctccaactggcgacacaaagacgcatgactacaccccagctaggagcattgtgatgcatgcgctaatgccaaaccggctcaagactgtactgtctgacagctaaacgaaccatcgaaccacatggctaaacagacctgtatcgactgtcatgagctggtcaccacagatcaaatgacgaccacctatgaaacatctgcagaaccagagcagaacagatgctctagacgatgttaa

SEQ ID NO: 13556 - DNA, 503 bp, Zea mays
  unsure (1)..(503): unsure at all n locations
  Clone ID: MRT4577_112354C.1
tgctgggactcgcccttaagcagnggcaacaacgcagagnacgcgggngcccnggctttatctgcangaagaggaaggggggcgctcctccagagaggaagnacagngncnggagcggaggaaccatcctggcanccctcagcaccgaccagcagaaggggaacgccaaggccgagnacgacgagaccggcccagccagcggccacaggaaaagcnacaaacgcnaagggcccgagaaacgcaagccgagggggagccgnnaccgacgccagccncaccggcccccgtttttgttgccgcgtgcccattagcgcgaacaaagttctgagccggactagcggccgccgctttcctcccctattcatcaagacggcaagaactggcgctacctatgctgctcacctgggatanggggacacaataggttaaggtccattcaaggctaaggagacgcctgatgaggctacgagcaaacancaccaagtngacggatgggcattgga

SEQ ID NO: 13557 - DNA, 397 bp, Zea mays
  Clone ID: MRT4577_112355C.1
gagacagaggagcctatttgagtatatcgacaaagtcactgcctggatgaggagcatctcgggactaactccctcagagctgtggagttctacgccttcgtctcaaaacctttcctactgctatcactgaacatcgcaacacatactcctgtaattgcataaacgacgctgataaagtgccgagtgcttccttgcaccaagactattatcatccacacttgacaaacgctgattatatgtacagtctgtattactggcttatgtaatacttatgacataaccattctacttatctacatatacaaatcaccatcgggtaactagacaaatgaaactggtgcatcgatgtacatgaatccctaaaggctatatgactgtccacggaggctataaggag

SEQ ID NO: 13558 - DNA, 346 bp, Zea mays
  Clone ID: MRT4577_112356C.1
tttttaatatttatttatttaggtatagttccatgttttttgaattttttcggccccctcccgctagaaatgaaaacaatttcggtttttttcggtttttcgaaaaccgtttttgattttttcgactgaaaccagcagtaccggtttttttcggagccggcatcggttatcggaattttgtttcaaaatcggtatcgaaaacaatataagatttttccgaccgttttaatcggttcccgttttcaaacgaaatttaccgaatttaggtatcggaatttttccaaaaacaaaaaattaagtaggctttttaaaagcccacactcaataatggcgcacgcagtgggtc

SEQ ID NO: 13559 - DNA, 571 bp, Zea mays
  Clone ID: MRT4577_112357C.1
gcataatgctactactaattaattagtacaccgacagaagcaaacatccgagaaacgctccctatgtacaacaacgcatcaccgtgcccgttcaattcgaaccatgaaccaagtgctgaaggcgggagggagactctcttaatccccccacagcttctcagcacacgctgttcaaatacttaacaatgtcatcatctactactcggtacgctctcaactcaactcaactcaactcagtctcagcaaactaaaccctcgtcttctggtccgtctggagccgccgcagctcgaccacgacgacgctgatgttgtccctgctgccgcgggacatggccagctcggcgagcagcgcggcggcgtccgcggcggtgcggccggccacggacccggggaacctggaggccgcgcgcccgctcaggcagctcctggcgatcttgcacgccgcctcgttggagaccacgtcccacagcccgtcgctggccaggatgaggaactcgtcccgctccgtccgctccaccaccgtcacctccggctccgcgctcacgtacgggttcaggtagtagtcgccgat

SEQ ID NO: 13560 - DNA, 938 bp, Zea mays
  Clone ID: MRT4577_112358C.1
agggattctaacaaaggttgccaaactatgaaattgcaaacctagggctctaaagtactcaaatcatggtccaaagcatctatgagcctgtttgtttcagcttctggcagcttctggccactaaaagctgctacggactgccaaacgctcagcttttcagccagtttctataaaattcgttggggcaaaaaccatctaaaatcaacataaacacataatcggttcagtcgttgtaatagtaggaatccatcactttctagatcctgagccctatgaacaactttatcttcctccacacgtaatcgtaatgatactcagattctccccacagccagattttcaaaaaagctggttagaaaaaagctgaaccaaacaggccctcgtctgccgatgtaagggtgacactgctggaacgagctatgcagggttctcaactacagcaagctcaaaagacagtgtccatgcatggtgcacagaatgagttgctgccacttaaggtcttcatgcagatgctcttctatgagaaagcttgtgtggtgacactatatagtccatcacagcaggctgcagcaagatttggaacctaaatgagagtccccaaactattatagtccatcacaaggtcaagaacctctctagtgagccggacaacaatagtttggagatcaaaatgagagtgacatattagtttatgggccggccgtgtagtttactcttataggagaaactactaacatcaataccaaacaaatgaacgtccaatacatattttaatggtggatgttggtgcctttttctatacacttccaagacaaatataaggttaaatcacgagaaaactaaaatgacttttatttttttggaagaggtagtatttgctaatggttttttgtataaaatagaattcttggatgaatcatttgagagactgtaatttt

SEQ ID NO: 13561 - DNA, 438 bp, Zea mays
  Clone ID: MRT4577_112359C.1
aaaaaaaaaaaaaaaaaaaaaaaaaaaaaataaaaaaaaaaaaaagaaaaaaaaaaaaaaaaataaaaaaaaaataaaaaataatatagaaaaatttaaatttatttaattggccaacgttgctctccgttgttgggggccttttttcggtgcctttcggtgcaatctcttggcttttttttccggtttctgtcggtggtttacccggggggcgcctggcgttgctcgccttgtgcaacccccgcttttcccctttttctactgttgcgggcccttcctcttgccctttctccccttctttgtgaggtttcgcgcggtttgtcgtctccacttgccggcgcctttttttggcgcttttttcgcggtcttttttcggtttcttccctttttttttggtttttttttccggcctctaactccggttctttcccctgggtt

SEQ ID NO: 13562 - DNA, 222 bp, Zea mays
  Clone ID: MRT4577_11235C.1
gaatcagccaacagtccactccactataggccatgtttaccagttcaataccctaatccgtggcgatgtgcactaaacacacgggaggtggaacgtcacctctaccactgacgcaatgagccagctcattaagcacaacgatacttgcataggttgcggacacttacagccttcaatagaggagcacaccaccatcccaatcctacataattccgacacctt

SEQ ID NO: 13563 - DNA, 322 bp, Zea mays
  Clone ID: MRT4577_112360C.1
accacgcgcgcgcgcatgactacaaagcgtgtgacttgagagagggtgtgtgaggtgcaaccaagcgtgtgcttatgaagggagacgacctccaactgtttcggggtaagaccatgacgcatgatgcgtgtgacgtacttgcctatgacaatgatggtgccactaatcatgacactactctattgctctcatgggctataagagagacaatgcttggcgtgcggcgaaattagttacccatgttgggtactatctatgtactattattatatccaaaactatagttgtcctggctgaattgaacttaaaaggggtttgtttg

SEQ ID NO: 13564 - DNA, 447 bp, Zea mays
  Clone ID: MRT4577_112361C.1
gctggatgaccaggaagaagaggaagcggttcaagcaccgccgtgcgagcaccagcttctgctgggagcgcttccgtgctgatgctgttctgtgatacggcgctatcctcgccgagcttattcctcgacttccaacctattcaccaccgctgtcagaacccttcttgtgacaaaaagttaagcgagcgtcttcttgaccttgcaagactttttgtccggagataatctcctacgaattaccctcttgcatcttgcgactacctctcctcgtctcgcgcctgtcgatccttccatccctctcgtccccgtctatccctcttgagcttggaacactctcgcagctagtagtagctatatattattggtttcctttcacctactttcgcatgaactactctgctatttgctggaataaagctaagttttccggtgcattgttcttttgca

SEQ ID NO: 13565 - DNA, 631 bp, Zea mays
  Clone ID: MRT4577_112362C.1
tcgggacacacctctccctccctgctccatcatctgtacttgtccatcacgcccccaagttccatggccatcgtaccggttgtcccctgtcccctccgttcagccttcaaccggtgagccccttctccattcgtagtgcacccggcgcttccgatttgccagcagcgatgtcatgcttgccgtcaggtcggggcatggccctgcaggtcccaaccaactaccttgccttcggctcaaaccctaggcgtagtatttccctaaccatcctcaactccctattttcccctccctttccattcctcgctgcacggtgctctctctgttcctcactccgtgaaaccaaggaagaagaagccatcttgggtctatgacacgtgggccctagttgctaacgtactccttggatgatttggttgctggtgtgacttggcctccatccctgccaccgggatagacgaccgagtgggttactgcttccgcaggagagaaccaggaggagtagcgtggccaggcttcgccatgttattcggtttcctccgttagttatttccgctgcattaaaacttatggttattatttctgaaactccgatattgtaatcactaatgatactttcttaatttatggtatt

SEQ ID NO: 13566 - DNA, 178 bp, Zea mays
  Clone ID: MRT4577_112363C.1
acaagatctggtcataaacagagcaccatggtccctatacaagcggccgcgagatgatggactgttatgctctcaaggcttatgttaaagagctggtgccacgatcatttttgcccaaaccaaacaatgacgtatatcttcctgttcttctaccgaagatgtgagaagacatgtgttg

SEQ ID NO: 13567 - DNA, 359 bp, Zea mays
  Clone ID: MRT4577_112364C.1
cccacgcgtgcgtttagacacactcaccgtcttgaaaatcataggctgatgttactacgacggtgaggacggtctgaagaacgactacttggagaacatgacgctgagggagcacctgtacactatcgggaagccggcgcttgacgtggagcgtagcctgctcgtggaacgacataaagcgcctcacgtgggctgcactagcttcagactgatggcctgtacaccgtcatgcacctctacactaagacgaccagcatgctgggggaggatatctgcccgtgacgggttgcgacctagtgtttgtccaatgccgggcttgcgggaactaacgatacccacgccacaaccatggctaaagg

SEQ ID NO: 13568 - DNA, 536 bp, Zea mays
  Clone ID: MRT4577_112365C.1
cctcgaggccggccggggaatggtacatatacttgatacctcattgccgcatcgcgtggaagcagaatccttgtgacaactcaaaaagcagatgcagttggagctcattagcagcgcatctctaatgcctggtctgatttgtaagcaagctaaggtctagttgtcattgttgatgcatcatgcaggaccatttgcagctgacgatgaaaatacgacaacagaagccgatgaattaaagccgtagcgaacaaaagccgatgaattaaagccgcagcgaacaaacgagtgtgtctgcagtgtatagaactcatcaacatgtcttcggcgttactctgaacttgatttataagcaacgtctagtttgacattgttgatgcaacgtctaggttgatatgtgtccacgcactcaggccaggtgtgaacaacgtctaggctggttttcaaagtttgaagtttttgtttctccatccgtagaaacatctctaggtcattaaaacacaagttggtttgacaaaaaaaaaaaaaaaaaagcggcc

SEQ ID NO: 13569 - DNA, 275 bp, Zea mays
  unsure (1)..(275): unsure at all n locations
  Clone ID: MRT4577_112366C.1
gtgagntgaaattgttgcgggacagatttttagaaagggagtaggattttggaacaactaattgtttgtgcacattgtgtgtggattattgtagtggggaantgaacaatataaaagtttatacaggcatattgggggggggggggtgaaaaaagaaaggnatgtagtacattatattatattgtacagtggttttgtgtaaaggataaggatacgtttttaccatgtgggatggatgggataaatacacatggggaaagttgaagttgatgagt

SEQ ID NO: 13570 - DNA, 551 bp, Zea mays
  Clone ID: MRT4577_112367C.1
caaaaaaggaaccccaaaccctttttgaatttcaggggaaaaaaaaaagggcgggattcacccgttagggcccaacctttacggaaacagaggatctgggggggagatccccccacaaaagcaaaaaaacccccctttggccctacctgggaaaggaccccaagggggaaggaccccccccgggggaaaaagctgggggcccctgccccccccagggaagccgtttcctttttttccccaacaaaaatgccgcccccgtctggggaccccaaccccggccgggccgaaaaaaccggaaaccccaacccggcctccggaatttccggccccaggggaaaaaaaacccccccccccccaataggggggggaaggaaccccacctcccccccgttgtggacctgcccggaggccataagcgacgggtggggggcccctttgattttggcccccgccgaggggtgcctgattattgcccggacctccaaaaaaatcccttgaaccccgcggggaaccaaaagttggggggcctccccaagggagtcccaacgggg

SEQ ID NO: 13571 - DNA, 340 bp, Zea mays
  Clone ID: MRT4577_112368C.1
ggttgttcttgcttgactcagcaggtggactggggtattagtggtctatggggccaacactagctgatagcttgcatattaatttcaaagatattcatggcataacctgcctccattgctgctgcctttggacgacatgagagtactagggtgtacgcttataggactagggacgcaactactgtatcttatacaaaaccaactcctcttacccatgcaagtacacccgactatcttggactatataatggacaaactgggatatttcgcaaaattgacataatgatctctgaccagatatcatcaggtcctctaacggtaagaacctaatatggctcaa

SEQ ID NO: 13572 - DNA, 372 bp, Zea mays
  unsure (1)..(372): unsure at all n locations
  Clone ID: MRT4577_11236C.1
ctacnccctagactccaaaccttcagccccacgctatggccctcgcactgcgcctccgtcgggtcctcgcggcggcctccaccgcggcacccctgctccgcccgtccacctcggtcgcccggccttgcccgctcgttcccctcgcctccccggcggcggctgcgcggggcgggaccgactatgggacggacgacagcaagatctcccccgacgagatcctcttcgagggctgcgactacaaccactggctcatcaccatggacttcccggaccccaagccgtcgcgcgaagagatgatcgagacatacctccagactctcgccaaggtcgtcgggagtcatgaggagcgcaagaagaggatgtatgttttca

SEQ ID NO: 13573 - DNA, 409 bp, Zea mays
  Clone ID: MRT4577_112370C.1
cgtagcgataagatgcgcgggctggggcacaccggaaaggcggccacggggggctccgtggcgctcctcggcggcgcgcgccttcccgcacggtgcgcgctccgcccttctccctcgtagcagcaaatggcaggttctgttccaatatgcaccgaggctctacgtgctgggggggggggccgattccaaggacacatcggcctccgacgacgagggggtcgaggacctcaaagcgaagggggacgccgttcaggacaagcccaccgaactcttgtacgggagcggcgccgactgcatcctttggctgacatatcgaggtatggggctccataaacacctggccagtgatctcgaacatcctgaagctaactggactcagatacactggctgggtccagtcccggtacct

SEQ ID NO: 13574 - DNA, 399 bp, Zea mays
  Clone ID: MRT4577_112371C.1
aaacagccataattattctcaataacccggtagcaatgcaggggaattaacaactcttacaacatcaggggttgtaaaccacacaatacttcaaaacagacacacataacacgatagcgggagcaactcacggcccatcacgggataagggcagcacactggcctgatgctgcgtaatcagcaaacttctttagtactcgacaccctcgtcgccatcctcgccctaatggaactaaacgccaaccttctattacaccttttcgagcgccggcaggtccttaagggcctaagaaaactcaccttactgcataccctgaccgcaaacccagtgcacaaaggcccacttggcgtccatgaggtccaacttggggacaatgcggaagaacacctccacaacac

SEQ ID NO: 13575 - DNA, 3877 bp, Zea mays
  Clone ID: MRT4577_112372C.1
aattcggcacgaggcggagaccaaacttgccatgccagcgcagtagccagtccagtgaacacaacgcagcgcagagcagaaaagaaaagggccaggaagccaccaaaacctgatccttaactgccctccgaacgcaaactcctcccctcccccatccttccctgccatcctcgacgccacgccatctctctccctgccctgccctgccttgcgttgtcttggtcggtttcgtttcgatcccgctcctgaacaggacgtcagcaacttggaaggggcagcgctgcctgcttcttcttgctcacgcgaagggaaggggtagccgatctcggcccgcgttgatccggttgcgggggcttgtctctcgcttggtcctccaccgcgcggcgccgcaccgtgaatcgacgaccggccacgatgttcgtcaagaagctcgtggagagggcctccaagaagcaacatatcggcagcatcagctcccttcgccccgagaacgtcagcccgcggctagccttccactacggcgtccctgcggacgccgccctccttgcctacgaccccgttctccacgtgctcgccgtcgccaccaggaatggacagatcaagctgttcggccgcgacaacacgcaggcgttgctccagtccccctcccctctcccttccaggttcttgcagtttgccgagggccaaggggttctgctcaatgtcaatacccagaaccagatcgaggtttgggacattgatgcgaaaaaactctgttatctgcacccggctgaaaaggcgatcactgcattctctgtgctgcagaagagcttctacatatatgttggagatagttctggaagtgtgtccccattgaagcttgatttggctcagagatgtctagctgacctgccgtactggattccttttactgaatcttatggttccactaccagtgccggtaatgatgtggaagtagtatttgtttcaccccagcctttgtctgaatcgaacagggtgctcattatcttcagagatggggttatgagtttgtgggatattaaagctagcaaagcagtatccatatctggtaaaactacgcagcagcaatcacagaaggaggctaaaaatgtaacatcagcatgctgggtttgtgccaagggaagcaaaattgctatcggatacgataatggcgatttatacatttgggccattcctgaggttacaagtacacaaaattcctcatctatgggtggccagaatctacctattcagaggcttaacctaggatacaagctagacaagttgccaatagtctctttgcaatggatccctagcgatggaaaggcaggccgtttgtatatcaatggtttcaatgatcatggacacctatttcaggttctgattctgaatgaagagagtgagtcgcgaattgtaaagatggttttgcctatcgctgaatcttgccaaggaatggaacttgttacagggcttagtgacccaaataagcacagacaaagtgcccttgcactcttgttgaaatctggtcacatctgtttatatgatgattcagaaattgagcgctatctccttcactctcagtctagatcccctggcacgcttccaaactgttcatatgtgaagcttccttatggtgattcaggcatcagtgttgcaaagttctatacaagtaaccctgcagcgttagcttctttggacgaggattatttttcatcagctaccaaatatccatgtctgttttcaatgaagggtaaaggtcagactttaacaagttttaccaacattcataagacccggaacctctatataactggacatctagatggaaccataagcttttgggatgcatcttgtcctcatttgctgcagatttttatgataaagcagcagaataaagacgatacatcaactggtaaccctatcacatcattacagtttgatatgtcctctagcattctattgtctggagaaaggagtggaatggtccatattatcacattcaaaaaggactccagcgacaacatattctcctttttaaatgcaaagcaaggagacaactatgatgtcagaagtataaagctcaaaggtgctgtaaccacaatgtcttctatctcaaaatcaaagcattttgctgttgggacagaaaaaggaattgtatcagttatcaacgtagaagatgctacaatattatatcaagaacagtttgagtgtcgactgcctggtggaatcgcctctttgcaatttgaaatctatagccataatggatatgacaaggacattttgataatagcgatggaagattcatctatttttgttatcgaggaagaaacggggaaacttttgaaccccaacccagttcagacagacaaaccctctaaagccatccttctgcagatgttggagttatcgcccaatgacacaccagcagtttcagataaccaagatacagtatcgaaggaatcattgctgctactttgcactgaaaatgcgatccgtttgttttccttgggccacgcaattcagggcacaaagaagataatcaataagaagaaattgagcagctgttgttgtttcgcctctcttattcatagttcttctaatgacattggacttatactcgtcttctccaatgggaaacttgaaataagatccctgccagacttgtccttgttgaaggatgcctttttacgaggttttgtgtactcaagaaacttgaattcaagtagttccataacatgttcatctgatggagaagccatcttgattaatggagaagagacctattttttctctacgctctgccaggatgagatatacaggcacgtagacagcattagtacagtgtacagaaaagagaactcaaccagggaagactcttcttttgtagtgaaatctcctaaagaaaagaaaaagggtctgtttggaatgattatgaaagataacaaaggaagcaaatcaaaagaaagtgatgcaattggcagcgaacaatgtattgcaacgacttctgaagagctggcttcaatattttcatcaactaactttgctccgccatctgagggaaggaacagttcactacgagatgatgaaaatgccgagctggacataggtacatgctattatttttgctattacttgtgtagcagtatatacttatgtttatagtatatactatttgtctgaagatgatatcgacattgatgacaacccacagaagccaaaaggtccacatttccctggtataagcaaagataaaatcagcaagggactccaaacccttaaaggaaagttgaagcccaagactgaagaaaagataagctcgggaaacaaaaaaactgaagatgaaacatcagtgagtcaagtcgatcagataaagatgaagtatggatatgcaaatacaacaaatgatgactcaaccagtgtcacaaaaatgattgggaacaagctgcaggaaaacatgaaaaagttggagggcattaaccttcgagctgccgatatggcgagcggcgcccagtcattctccacaatggcaaaagagctactccggacaacaaagaacgagaaggggacctcataatcacctacaccaatttcccctcctttgtatagttcgtcttttccttttttttcatccctggatcgtggatctgacgatctggacctccccgttgtcagactctaaatagtgaatggagtgtaagtgactgaagtaccctttacatcttggtatagggtaacagcagggacttcacatagttaaaaaaaaaaaaaaaaaaaaaaaaaaaaaaaaaaaaattttttgccgcggcaatgtcgactctaccgtctacactcgaatgaggattgataccaaatatttgttataaagaaaggtgttttc

SEQ ID NO: 13576 - DNA, 807 bp, Zea mays
  Clone ID: MRT4577_112373C.1
cattgggtacctcgaggccggccggggagcaaatttctccggccacaccttggagcgacggcatctccccctttccgccccaccgtccagctccccctcccctagcgcacatgtccccaccacgctcgaatccttcagctcgcgcgaccgcgactgtgaccccttcacctccctctgcaacatgcatggcgaagagtttggagttgtccttaggcttagtattggattgagcgggttcgggtagctgcgggagaggcggacgtgcggcgcgtccccctgcggcgtgccgaagatcttgacaactcgcatggccatctagggttggggttgagcgggttcgagtagttgctggagaggcggtcgttgttatacgtccctctgcaacatgccgaaggtcttgacggtgagcatggccatctcgtcgagctggtcctgcagctacgtgatgatgtcaatggtgaatccccacctctttctccttctcattctctccttctacttcctctgtcccctcagacctccgtcttatagacttgcagaacagtgactttattgtagcaggctgatttcatctacgaatgcacctgcaggattcaacccacatagcatggaccaggccagatctaaaaaatttgtgtcagtacgtgtgtttcttaataaaacctggttttaatagcttatgtcgtctctacaaatgctggttctagcttgtgactgtttaacgaagctgccattgtcttttgggtttctatgtttgatagtgagtgtgttgtgcattttactatggccatttctgttaaattttta

SEQ ID NO: 13577 - DNA, 1743 bp, Zea mays
  Clone ID: MRT4577_112374C.1
tatatttaagcatatatctcatggattttacttcatttatacgtggctcagatttgttaggctctatctgatcctaatggtctaagccaacaaaatcctatgatgtcacaaaatccatgtttcaggtatcagttatcaacgtagaagatgctacaatattatatcaagaacagtttgagtgtcgactgcctggtggaatcgcctctttgcaatttgaaatctatagccataatggatatgacaaggacattttgataatagcgatggaagattcatctatttttgttatcgaggaagaaacggggaaacttttgaaccccaacccagttcagacagacaaaccctctaaagccatccttctgcagatgttggagttatcgcccattgacacaccagcagtttcagataaccaagatacagtatcgaaggaatcattgctgctactttgcactgaaaatgcgatccgtttgttttccttgggccacgcaattcagggcacaaagaagataatcaataagaagaaattgagcagctgttgttgtttcgcctctcttattcatagttcttctaatgacattggacttatactcgtcttctccaatgggaaacttgaaataagatccctgccagacttgtccttgttgaaggatgcctttttacgaggttttgtgtactcaagaaacttgaattcaagtagttccataacatgttcatctgatggagaagccatcttgattaatggagaagagacctattttttctctacgctctgccaggatgagatatacaggcacgtagacagcattagtacagtgtacagaaaagagaactcaaccagggaagactcttcttttgtagtgaaatctcctaaagaaaagaaaaagggtctgtttggaatgattatgaaagataacaaaggaagcaaatcaaaagaaagtgatgcaattggcagcgaacaatgtattgcaacgacttctgaagagctggcttcaatattttcatcaactaactttgctccgccatctgagggaaggaacagttcactacgagatgatgaaaatgccgagctggacatagatgatatcgacattgatgacaacccacagaagccaaaaggtccacatttccctggtctaagcaaagataaaatcagcaagggactccaaacccttaaaggaaagttgaagcccaagactgaagaaaagataagctcgggaaacaaaaaaactgaagatgaaacatcagtgagtcaagtcgatcagataaagatgaagtatggatatgcaaatacaacaaatgatgactcaaccagtgtcacaaaaatgattgggaacaagctgcaggaaaacatgaaaaagttggagggcattaaccttcgagctgccgatatggcgagcggcgcccagtcattctccacaatggcaaaagagctactccggacaacaaagaacgagaaggggacctcataatcacctacaccaatttcccctcctttgtatagttcgtcttttcctttttttttcatccctggatcgtggatctgacgatctggacctccccgttgtcagactctaaatagtgaatggagtgtaagtgactgaagtaccctttacatcttggtatagggtaacagcagggacttcacatagttattttttgccgcggcaatgtcgactctaccgtctacactcgaatgaggattgataccaaatatttgttataaagaaaggtgttttcaaaggt

SEQ ID NO: 13578 - DNA, 392 bp, Zea mays
  Clone ID: MRT4577_112375C.1
cctttcgtgtaatctcgggcgagttaaaaaaatctgggggccccgaaacccataacggggtgtccttcaacatgaagcatgatctgcacattggcctcatctttaaactaacaatgcatcaccttcacgaaattctgcagactaagcaaccatctagccatatcttagcccaagcccgacaaaacatgggcacgcacattctatgaccccatatcgcccactctataaacctatcgatgactcgatgtcacaacttacatactgtgaagaactaaagaaaaactccgacacatatcgcactctatgacatcaaaggttgtgtcagcgaacattaaaatctgaccttacatccagctacaatttcctcactcctggatatgtctcttggatgt

SEQ ID NO: 13579 - DNA, 599 bp, Zea mays
  unsure (1)..(599): unsure at all n locations
  Clone ID: MRT4577_112376C.1
ngaactactgatattctaagtccttgtataaaattgtgtgacagagttatcgcccattgacacaccagcagtttcagataaccaagatacagtatcgaaggaatcattgctgctactttgcactgaaaatgcgatccgtttgttttccttgggccacgcaattcaggtatttgtatccctaattatatgccacctttttctttaacatgagttgctgttgttcttatgattctatactccattcagggcacaaagaagataatcaataagaagaaattgagcagctgttgttgtttcgcctctcttattcatagttcttctaatgacattggacttatactcgtcttctccaatgggaaacttgaaataagatccctgccagacttgtccttgttgaaggatgcctttttacgaggttttgtgtactcaagaaacttgaattcaagtagttccataacatgttcatctgatggagaagccatcttgattaatggagaagagacctattttttctctacgctctgccaggatgagatatacaggcacgtagacagcattagtacagtgtacagaaaagagaactcaaccagngaagactc

SEQ ID NO: 13580 - DNA, 644 bp, Zea mays
  Clone ID: MRT4577_112377C.1
aattcggcacgaggaatcgacgaccggccaccatgttcgtcaagaagctcgtggagagggcctccaagaagcaacatatcggcagcatcagctcccttcgccccgagaacgtcagcccgcggctagccttccactacggcgtccctgcggacgccgccctccttgcctacgaccccgttctccacgtgctcgccgtcgccaccaggaatggacagatcaagctgttcggccgcgacaacacgcaggcgttgctccagtccccctcccctctcccttccaggttcttgcaggtaccaccgcgccgccctcccgtcgccaatcccactgcttagtttgcgtgtccaatgtcgcgtggcgagacttggaggcgactcactctaagctgtcccgtttcagtttgccgagggccaaggggttctgctcaatgtcaatacccagaaccagatcgaggtttgggacattgatgcgaaaaaactctgttatctgcacccggctgaaaaggcgatcactgcattctctgtgctgcagaagagcttctacatatatgttggagatagttctggaaagtgtgtccccattgaagcttgatttggctcagagatgtctagctgacctgccgtactggattccttttactgaatctt

SEQ ID NO: 13581 - DNA, 687 bp, Zea mays
  Clone ID: MRT4577_112378C.1
atggaggacaaaagctgccagatagcacttggaaacctccgatcggaggttataactttgaggaacgaagctcttgcaaaggataagattatctttggtcgaaaggctgaaatccagttacagaaaaatgttgaagagcttcgtcaagctaaggaagagtgcaataatgttgctacagaatgtgccaagaatttgaagaatagcttttctaaagttggcgcattttccacagagcagaatttcatctgcggtgatcctgatggggtcggctgcgaacatgctaaggctgtggttcagccaggattctcgtttttagcttatgacattaaaaactctccgatcgatgctactgcattaagcagaaagttctattctgaagtatggctgaagggtggccgagagatagctgacaaagctattagaagaaatgagaaagagtctcacaatgccttagaagaggttaagagagctgaagaaactgttgaacacgccaggcttatagctgagctttctccccctccagagtcatacgatcctaaagctgatccatctctaaagggggcgctcaacataattagaattgctaacgaggcagttgacgaagctgtcaacagactgttgaacgaagctaccgataaagtcttaaaagaagagtttagggtctttgtatgtagttttcatttttga

SEQ ID NO: 13582 - DNA, 867 bp, Zea mays
  unsure (1)..(867): unsure at all n locations
  Clone ID: MRT4577_112379C.1
caaaaaggcataagccttcttcgtgttacctttgaaaacacctttctttataacaaatatttggtatcaatcctcattcgagtgtagacggtagagtcgacattgccgcggcaaaaaataactatgtgaagtccctgctgttaccctataccaagatgtaaagggtacttcagtcacttacactccattcactatttagagtctgacaacggggaggtccagatcgtcagatccacgatccagggatgaaaaaaaaggaaaagacgaactatacaaaggaggggaaattggtgtaggtgattatgaggtccccttctcgttctttgttgtccggagtagctcttttgccattgtggagaatgactgggcgccgctcgccatatcggcagctcgaaggttaatgccctgaagaaagcacactggtccacgttaactgtccgtctgttgcttcttttatcaggtgacagtagcaagcattctatatttctccaactttttcatgttttcctgcagcttgttcccaatcatttttgtgacactggttgagtcatcatttgttgtatttgcatatccatacttcatctttatctgatcgacttgactcactgatgtttcatcttcagtttttttgtttcccgagcttatcttttcttcagtcttgggcttcaactttcctttaagggttttggagtcccttgctgattttatctttgcttagaccagggaaatgtggaccttttggcttctgtgggtttgcatcaatgtcgatatcatcttcagacananatatatactataaacataagtatatactgctacacaagtaatagcaaaaataatagcatgtaccctatgtccagctcggca

SEQ ID NO: 13583 - DNA, 1691 bp, Zea mays
  Clone ID: MRT4577_11237C.1
cattgggtacctcgaggccggccgggacgccatcgtaagcctaaaccctactatacccccgtactcggcggccccgaggcgggaacaaaaaaaccctagaactccaaaaccttcagccccacgctatggccctcgcactgcgcctccgtcgggtcctcgcggcggcctccaccgcggcacccctgctccgcccgtccacctcggtcgcccggccttgcccgctcgttcccctcgcctccccggtcgcgccgctcccgctgccgccgtggcgattcctgcccggcggcggcgccgggttcaggtccacggcggcggcggctgcgcggggcgggaccgactatgggacggacgacagcaagatctcccccgacgagatcctcttcgagggctgcgactacaaccactggctcatcaccatggacttcccggaccccaagccgtcgcgcgaagagatgatcgagacatacctccagactctcgccaaggtcgtcgggagttatgaggaggccaagaagaggatgtatgcttttagtacgacgacttatgttggttttcaggctgtaatgaccgaggaaatgtcagaaaaatttcgcggtttgcctggagtagttttcattttgcctgattcatatctatatccagaaacaaaggagtacggaggagacaaatatgacaatggtgtcatcactccaagaccaccacctgttcattatagcagaccatcaagaactgacaggaaccgtaactaccgaggaaactaccaggatggccctccacagcaaggaaattaccagaacaaccgtcctccaccagaaggtggttaccagaacaacccgccgcagcaaggaaactaccagacataccgctcgcagcaagatggaagaggctatgccccacagcagaattatgcacaaggtggtcaggatggtagaggttttggaaggaatgattacacagaccgttcaggctacaatggaccacctgattttcgaagtcaaactcagtaccaagggcatgtaaatccagctgggcaaggtcaaggttacaacaacccccaagagcgtagcaacttctcgcaagggcagggaggaggttttaggcctggtggtccttcagcacctgggtcttatggccaaccatcagcacctggatcttatggtcaacctaatacacttggtaactatgggcaggtacctccatcagtgaatcctggtggtaacagagttcctggtgtgaatcctagttatggtggggatggcagacagggggctggaccagcatatggtggagataactggcaaagaggttctggtcagtatcctagcccaggtgaaggacaaggaaactggcagggaaggcagtaagagctgacgtgttccactgaagacaagaatggcacttgagatttagaaatctccatctgtaaaataaacgactgtgatgcattactcttttttttttcttgcatttgaactctaaacttatgggcatgcgttattaccaaacctacggatgcaaattcattttagttttttgggccaaatgttggcatttttaaatggcgcagaatgtggaactcccctttgtcttcgtgtattgtttgcaggtatgctgtcactgtaaaacacgtgctaattactatagtattttggtgtagtttctcgttttgtttcaaaaaaaaacccaataaa

SEQ ID NO: 13584 - DNA, 400 bp, Zea mays
  Clone ID: MRT4577_112380C.1
cccggtcgcccaccgtccgccccgcgtccgcccacgcgtccggcaggtgcgggaccatggcggagcgtgggcggcgcgtgacagcgcgtgatcgtccggaaaacggacgttccagcggtcgtccgctttcaaatagggtgttgtttattaggaccagttttatgccgtctggggggggggaatccctgctgtgcctgtcaacaactcctggggagatgtggcagttggacatttaaaatcagaacgtttcaagattattctcccatctctcatcctctcgaagaaatggtcctgctgtacttcactcgtctttgatgcttggatcatgctggaaactttacgacaggataagatatgttattttctggctagaacattgagtgagaagggatcggaggat

SEQ ID NO: 13585 - DNA, 398 bp, Zea mays
  Clone ID: MRT4577_112381C.1
aaagccccggggtttgcccccgaaaacccgggggaaaaaaaaaattttaaaatttttttaaaaaaaaaaaaattggggggccaaaaacaaaaaccctaggggggagggccccccccccaccctaaaatgagggggcccgtcttaattggggtttacccccccgaaccttaaatttaaaaagaatcccccggggggggaaaaaaaggccttaaacctggataaacaaaagggaacacggggggccctttttttgggtggaaaaccatcttgaggggggggttgtaaaagagcccctaaaagaaccccacccccccggtaaagttgtttcgtgccccaggggggcgcccttgggaaaataatatgggccggctggggggggacaaaaccgggtaattggg

SEQ ID NO: 13586 - DNA, 502 bp, Zea mays
  Clone ID: MRT4577_112382C.1
gagaacttcctttccgacctgccggcacacctgcagcgccagctcgagatccgaagcatagttcgatacggtcgtccctccatgtcggcgccggcggcggcgccggcgccgttgaggagcgtgctgctcagctcctgctgtggcggtggcgtcaccaggaccagcaggtacgacgatgagcaggattacgcggtgtcgaccgccaccctcctcaagcatcgcatggacgcgctggtggatttcgtcaaagaactccctaagctataccggctgaatgtgctggacctgggaggctgcaagggcctaaggcgccgccacctagtggccttgaccgagctggaatgcctcaggtacctgagccttcgggacacagacgtacccggactggttcccgaccgccatatgaacaggttcgagcagttggagaccctggacatccggggaacacgcataccgccttgcgacaccaagaggatctacctgcccaagctcaagcacctgc

SEQ ID NO: 13587 - DNA, 432 bp, Zea mays
  unsure (1)..(432): unsure at all n locations
  Clone ID: MRT4577_112383C.1
tttggtctgatttagtgcttgataccctcagagagtcaagaatgccgcactacaggacaccagggaaagtataggaatctcctcccccttacgaatccagtttcggaagtcgtcctccttccttatacggcgtcaggacacacaataaatcgacggatcctacgtgataatagcatagagacagaggacattaagaggcgccgagtttaaacacccataacacgtaatcacgggaaatcctcggatatgttgtanatcacaaggagaatacgcccgcccccgagactgagaaataggaacccggatccaagttaacgaaccgcttaggatatcgctcaacgcccgtcaacagggcctggctgcatagagagccgttctcctgtacggtcgaccccggagcgtcctacagaaacgagtccagcggcgtctcca

SEQ ID NO: 13588 - DNA, 254 bp, Zea mays
  unsure (1)..(254): unsure at all n locations
  Clone ID: MRT4577_112384C.1
ctgtactntggaatgggtnctgacanttntgantcnaacggggcatnacggctcagtatancnaagcnnagcgccatgttagaagccggttacccacttcgagcctttattgnggagctgttcattgccacagnttctgttantataagccngatgctctanggnagacatggcanggaagaatnnnaaaggattggcaaacttctgganaaatcccccaccaganggtggntttggggnttaagnccnggggg

SEQ ID NO: 13589 - DNA, 309 bp, Zea mays
  Clone ID: MRT4577_112385C.1
cccggctagacccacgcgtacgcgcggacaaccagctttccggggacattcctccggggatagggaacctgaccgattggcaggtgctggatatgtcgaataaccgattgttcgggtcagtgcctgcctgacttgcacgctgcttccagcttatggacctgcagcttgtggggaaccagctctttggggcactccttccggagctagacgcactatctagtctcaccgttctagatttgtctaataacaagatctctggggagattcccgtagcgttggctgggtacacgtctttggaggtcgatgact

SEQ ID NO: 13590 - DNA, 243 bp, Zea mays
  Clone ID: MRT4577_112386C.1
aaaattttccaggataccctttgtaataataataacaaaactgctgtaatctgcagtaggcatgatcgctgaataaagtattcctttgtaaaaaaaaaaaacaaaaaaaaactataaaaaaaagacttaatctctcaacaggaccaaggggggagggaggaagactgtgcgtcgtttgaatgctaccctgccaatgcgatcatccaaagggcagactgtacctgaccgcccccccactcgaag

SEQ ID NO: 13591 - DNA, 558 bp, Zea mays
  Clone ID: MRT4577_112387C.1
cccacgcgtccgcgtcgatatccaacccggagaggataggcagcgttggtggaagtggcgctgcggcggtgtcggttggagaggaggcggcgctacggcagtatcggtcgaagaggaggcagcgttcgaggaagcatcttcgtggtggccatccgctactactaggcgttgttcgactcgctggacacgagctacggcgcgagctacagcgaggacagccccgagcggcacgcggtggagcagctgctgctatcgcgggagatccgcaacctgttggtcgtgggcgggcccgcgcccaccgacgacgtcaagttcgacggctggcacagtacaggttccacgaggcctcgctcgccagtagccccgcggcgcaggcgtccctgctactcggcatgcccctctatgcctgctcaccgcgtcagcttcgtggcattaacagtcgtttgtgagttcagttgccacgcagggctaaatcatcagttgttttgcatctgtaactagctgctcgatttggtcaccagttgggagaaaagaaaaggcggagacatttcttctgat

SEQ ID NO: 13592 - DNA, 208 bp, Zea mays
  Clone ID: MRT4577_112388C.1
gatgtcttctagtcggcggccgccctctgatggcatgatgggagagagacgaccgttggatttccatcccggcccagccgcgcgcaccggggaagacgactagacactctagaatggagggagccatcgcagacgttgcgagtctggcagccgcagtcagaggaggcctcctttcacggatttggatactgtatgcagggctggtacc

SEQ ID NO: 13593 - DNA, 420 bp, Zea mays
  unsure (1)..(420): unsure at all n locations
  Clone ID: MRT4577_112389C.1
ggttttggttttttttttttttttttttttttttttgggttttttttttttttttttttttttttttttttttttttggaaaggaaaacccaaaaaggggggaaaaactttattgaaaaattttataaggtgtttttaaaaaaaaagggggggggggaaattgtaaaactcaaaaaaaaaaaaaaaacaacttaaaaacttatttttttttgaaaatgaaaacgtccgttcaaaaaatgataaatgaactcgcaatgttaaaaaaaaaccaatgggaaaaaactttttcaaaaggtgaaatttcctggcctgggggaaaagaatttttgattggggttttgaagtaaaaaacgacnatgtagtttgagttggaaaaaacataggggtgggcgctttaaaaactaagnttgggctnaactc

SEQ ID NO: 13594 - DNA, 289 bp, Zea mays
  Clone ID: MRT4577_11238C.1
cggacgcgtggggaatttgttaattttgaacgttaccgggatttgattaagcatcgtcgcagaggatgtcggtacctttttggtttctctgttctacttgctgttgctgtagaaatttcatatcttgcatccatttacatcacttgagggattgtcctaatgcacactttaattgtttctaaattggtacagaaaaagggtgctatttcttaattcaaagcactagttaactgaacatttacctagcttcttttcacagtttctgatgaggccggtttgcagcatgttg

SEQ ID NO: 13595 - DNA, 1903 bp, Zea mays
  Clone ID: MRT4577_112390C.1
cggccgctcgaactggcggctttgatcttgagataataaccttgctcttttgcataaataaacctgattgagctgctctcctcggccgccaacccccgcgcacggcaccaccaccaatccatccatccttacgcattagctacactccccggcgtcgagcccccgcgaaccctagaccgccgccctcgcatctccgctcgtcgccgcggggtactccctccacccgtctggtgggagtcgcggcgggacgtccccgatccgagctctctccgccttagggtttttggggccggccatggactccatggagcagccggagcccaaaaccgcgggccactactacgcccttcaggttggctccgttttcctgacgggctactacaacgtcctgacgaaccagccgcacctggcgaaccagttctacacggacaacagcagtgttgttagactggactgcgagacgggtcggtggtcgtttggagagacggtggaggttatcaatgatatgatgatgtccatgaaactaagcaaggttgaggttaaaacagcgaatttcttagagtcatgggctggggcgattacgctgttggttactggcctagtgaaattgaagcactaccctgttcgcaagcgatttgctcagaatattgttcttgctccaaaggaagatggatattttatattcagtgacatctttaagctcatttgtgatgagtatgatgatcagtaccctttttctgattacaattgtgctgacaacatgccccaagtggaagcgtcttacacaatggctgaaatagggtctgattatttggatggagaacctgaggcacaggagactgttgatcctgctgaaaatcatgtgcagcaccaagattatttggaatataaggctggcaatgtgattgatgatgaaactcatttggaagagcatattcccccattccccagttcaacggatgttaaaagggattcacctcttgctcttccccaccctccatcacctaccctcgaagaacctgtggaagaagcacccaagacatatgcttcagtgttgcgaacgaaatcaaaggcaacgctggcgattacagagtcacagcaggctcaacagctggcccagcagccacagtctgcctcagtgcatgaaaagtctaacctggacaaccaccgggatgttagcgtccctgaggatgaagaagagtttctttcggtttatgttgggaatctttcgccatctacttcggtctttgatcttgagaaagtgttccaggcttttggaagaattaaacctgatggagttgctatccgaagccgcaaggaggctggagtattctttggctttgttgagttcgaagacatgtctggtattcagaatgctttaagtgcatctccagtagagttaaatggccgttttgttcatgttgaagagaggaggcctaactgcggattccctcgtggaagaagaggccgtggaagagctgatttctcaagggaccaagctggtgggagatacgacggggagtatgctactcgatcgaaaggaattgggcaccagaaaaaaactggacgccagtatgactactagttatgtaccgctctgctggtaaatggccgtgtaccattggtgttctctacttggtgctgttctggccataattttgctaaaagtcacaatgatgtcgggactagtatttctgctttgttgacattcggcggagtcttttttgggggatgggcatctgttaccattttgttgcgtcacagtagtttttggttctcagttaccgtgaccagttacaaatggatcatgctaccgtcggtgtcaaactttttaagcaatacctaggttgtacttgtaccgatgttaatagttggtattcttagattgacatagtttgcataa

SEQ ID NO: 13596 - DNA, 487 bp, Zea mays
  unsure (1)..(487): unsure at all n locations
  Clone ID: MRT4577_112391C.1
cgggccggaaatnccggggcggcccaacccgtccaacaatttaattggtttttttaaggaaaaattttttattttaaaaaaaaaaaaaaaaaaaaaaaaaaaaaaaaaaaaaaaaaaaaaaaaaaaaaaaaaaaaaaaaaaaaaaaaaaaggggggggccctttaaaggaaccaaagttaactacccctgcatggcaacgaaaaagttttttaatagggcccctaaaataaaataaatgggccgtgttttaaaaacgtgggaccgggaaaaacccggggttacccaaattaaaagccttggaaaaaaatccccttttcccaagtggggaaaaaaccaaaaaggccccacccattcccctttccaaaaattggccaaccctaaagggcaaagggaccccccctctaaccggccaataaaccccggggggggtgggggtaaccccaaggggacccgtaaaatttgcaaggccctaaggccccgttcttt

SEQ ID NO: 13597 - DNA, 216 bp, Zea mays
  Clone ID: MRT4577_112392C.1
acccactgggggcccgttctatggggtccgctctcgggcccaacccggggggaaaaaagggcacagccggctcccgggggaaattggtcaccgcgcacaattccgcccaacatacgatcgggaaccctaaaggggaaaccctggggggcccaatgggggagctcacccacattaattggggggggccaactggcccctttgcaggggggaaaccct

SEQ ID NO: 13598 - DNA, 487 bp, Zea mays
  unsure (1)..(487): unsure at all n locations
  Clone ID: MRT4577_112393C.1
aattcaaaatttatatatcattagtactccgcgcatgtatgcaaaaagattctatatactacctaagtataaaacatgtcggcatatcgatcgagctaacttgtaaaaaaactgtgaattaaagaccacaatgaaattaacagggaaacctaattaatatactgatgaatagccgaatcggatgagagggaggatgaagaaagatggatgcatggggccgcatgtcaaggaatgcgccctacagatggatcgatggatcacgcgacggctggcatgtccttgagccaatcgtcgagcggcttgccgatagcgtagacgacgaagccgatctcccggagcttggcggngtcgacgacgttgcggccgtcgaagatgaaggctggcttgtgcatggcgtcgaacatgcgcttgtagtcgagcgtcctgaattcgtcccactcggcgaggatgcagacggcgtgcgcgtcgcgcgcggcctcgtaggccg

SEQ ID NO: 13599 - DNA, 368 bp, Zea mays
  Clone ID: MRT4577_112394C.1
ggcatcagctgagctgagctgagctggtccatggagagggattactcgtccacggacggcgggggctgcgagatgcccgggaagaaggcgaggaagccctacaccatcaccaagccccgcgagcggtggagcaccgaggagcacgcccgcttcgtcgacgcgctgctcatgtttggacgcgactggaagaagatcgaggagcatgtcggcaccaagacgacagtccagatacggagccacgcgcagaaatacttcctcaaggtccagaagcttgggctggccgccgggctgccgccgatgtacccgaggcgccacttcgccatacagcagcagcagagctcggtggccgatggtagcagcgcggccgc

SEQ ID NO: 13600 - DNA, 652 bp, Zea mays
  Clone ID: MRT4577_112395C.1
ggccgctttttttttttttttttttctttctttttttttttttttttttttttttaccaagagggcccagaaatttatagcacgattttatttggcccggcaagacttttcccaagccaggttgcaagaatcaaagccctggcactaacacaacaatacgaggaacgctcctgttattcacttgctttctagaatatcgagagactgaaggttatcgagggccccgactttgtaccttccttccggacggcatatgaaacgctggtgccatgcctgttcccaccgtctactttgctaatattcttccgatgctgccacctactggtatccagggccaggctcaatttcgggggatcattgaaaccgagtgacgcaggtactttttgaacataaagttgttggacatgaaaaaggcatctaataaagggagcaggatacgccaaatcgaaggcacctgtaggcgtttttttgcaaaacgggaccaaaagcaattttcaccgacaatattgtcaagctgctattgcaaattgggcacattcttgtgattggactcatattacgcctggggaaccttggccgccttcaggctaataacaaactcaagttcttgtggtaaaaagaacagtacagcccttcctttgcctttttgacc

SEQ ID NO: 13601 - DNA, 503 bp, Zea mays
  Clone ID: MRT4577_112396C.1
ggagtctttagtcggcggccgcgccttcacaggcgacggcgtggccaccgccggatgatgctggttctgctgcgcgcggtgcatcggcgacgacgcccccgcgtgacgccgcggcgtcgagtacgagaagggcctcgccgtgtccatctccagcgtcttcaccggctcgcggtgctgctccatggacgcgcgcccgggcgccgccgccgcggccccgcgtacgctgctgcggctggtgtcgaacgacgcgcgcgacgccatccaccgctccgcccaccggggctgcccgtccacgtccacgttcacgttcatgtccgtcgacggcgccgctgggttcctccgaatctttgttttgtttgcaaccataaacgaacgatgggtgatgaactgatgatgacgacgacgttgctatcactatcagtatcactacctgccaacctagcacctgcggagggaaataatactgctcgtatacgaaaaaaaaagaaaatcatgtcttacct

SEQ ID NO: 13602 - DNA, 393 bp, Zea mays
  unsure (1)..(393): unsure at all n locations
  Clone ID: MRT4577_112397C.1
caaggttgctatcatccaccacaaggcaagagctgcagacgtcaatccagaatacgaggctgcagggatcgatacctggccagaagatgagggagcaatcgtagagtcatcagacgacgcaaggcactggacgtcagacaacgttgcaatgtccaagtctagaatgtcagctcattggtcagaacagatcggctgcacagaacgctagattgatatcagcacaaagacagctcatccattcctcagaattcaaggcctctcgtggagtacaacagtatacagtacaaagaaggatatccagtgatgacagacaagtaatgcatagctatcacaaatttgctggcaacgacgatgaagacgatagtgacatggaaactgattttgctancatac

SEQ ID NO: 13603 - DNA, 575 bp, Zea mays
  Clone ID: MRT4577_112398C.1
tttgtttactgtttttgaaggtgctcagcttccttccaccccccatatttcttgaacacgcaggagaagctgaccttaggaaataagctaattgttaagtaaatgtgttcaaccatactcattattttttcctcttctaggactatttagatgttttagcatagtagctattcattctttttctcaaacacaacgctttttactgcatatgcatagtgagtgcatttgtatgtctttagtactttcaatggtaatatatttaaatcaggtcaaccatgatatagtggaaagcaattatattaagctatgttctgggccttttgagttggtcttccatgtttctgagaaacttacaacttcccttttgttttatttttccatcaaactgtacccttggtttctgatatctgtaagaatgaccgcaagatgcttactgagtgtactcatttactttccagaatcctgtatctttaaacatagtaatcagtacaacgctcttctctatcctccaggtcctctggcaggtttgctcctaacccctgtgatgtaatgtcagctctttctcttgtgctttt

SEQ ID NO: 13604 - DNA, 182 bp, Zea mays
  unsure (1)..(182): unsure at all n locations
  Clone ID: MRT4577_112399C.1
cgcacgcacgtaactgagcatcgagcacggagatctacaacaaaaacatgtagctacgacgcgattgtaccttgggaatcgcgtcgtagctccttgttcnnncnntttttangtcgtcctgcgctccttctgttgcgngcgccgttttgtgttctgtgcttgcgtggtgggtgcggggtttc

SEQ ID NO: 13605 - DNA, 327 bp, Zea mays
  Clone ID: MRT4577_11239C.1
aaaaaaaagggcctccaatgggtatttcttcatttcccgggggccaccttttataatcttgagagccaattgaaaagggctgctccggtcgcccagtcccttttttttccaacccaaatttcccccccaattttccccttttttcagggtctcttggttaacaaaaaacaagcctcccccatttttcccaagggggacccctttttgaatccttgggggccccatttttcttcaccccccttttttttttcttccacggggtcatccttggaacccccaaagggcccctcatttttggtaacaggcccattctccacaacccatttt

SEQ ID NO: 13606 - DNA, 194 bp, Zea mays
  Clone ID: MRT4577_1123C.1
tttttttttgataaaaagtttatctagtttatatatagaagctgatgaatgtaatgtcatgtgctccaccctccactggtacgagtcaatcaactaaagctacccccggattgatgaggaacatcccgcgcgattagtgggggggggggttacattcatcagcttctatatataaactagataaactttttatc

SEQ ID NO: 13607 - DNA, 523 bp, Zea mays
  Clone ID: MRT4577_112400C.1
acaagcttttttttttttttttttttttttttttttttttttttttttttttttaaaaaaggaccctggcccgcaccccccctaggggcaaatcccaccccatgggcgggccgtaccatagggaacccaacctgggaccaaacttgggggaaacaagggcaaaagttgttcccgggggaaaatggtatcccgttaaaaatcccacaaaaaaaacaacccgaaaccaaaaagggaaaacccggggggcccaaagggggggccaacccaaattaaatggggtggccccaacggcccgttttcaagcgggaaaaccggcgggcccactggattaaagaaaccgcccaccccccgggggaggggggttgggtaatggggcccttttccgtttcctggttaattaactcgttggcctgggccgttcggttgggggaaggggtttaagttaactaaaggggggaaatccggttttccacaaaatcgggggaaaccccagaaaaaaccttgggaccaaagggccacaaaa

SEQ ID NO: 13608 - DNA, 635 bp, Zea mays
  Clone ID: MRT4577_112401C.1
tttttttttttttttttcgacttatataatgatttcattcctttgtaaagtacactctctctaaagggaatgataaataacgataagagattgctattcaaaacctagatccaaatcttgaaactaaagttaaaattgaaactatgggacaataaatcaataagtaaaaggcacactttcaactttataattaaagcacttcttaaaatattcgaatcttgtttggaatggaaaatctgaaatagaaaagaataggaaaaaagaaaataaaaaagaagaaagctctccctttgttctatgggctaaaactggccgacccattaacctcgttactgcgcttgcccggctgggggaaaccagtgacgacatgtgggcctcgcctaacagttgctggatctctatgcattacgcgggttggtgataggtgggtcccacctgtcagcttgatgttctaccgtaacaaaatcgctctcctctgcttgagatcgagcggggtttttggagatcgcccatgcggatttctcgtcctaatccaaacagctagtgtctggattctctctgttgcggtgtataaatacgagcccttgccctccgttcaccagcatcggtagccgccgagagagagagagagtcgt

SEQ ID NO: 13609 - DNA, 667 bp, Zea mays
  Clone ID: MRT4577_112402C.1
acaaggaaactgcaaatggcgaccccatccgagagcccagacaataaggcagagaagctcgtggtcatctacgtcccggcgctgacgatcagccacctgttctcctcggtggagctcggcgagctgctcgcagcgcacagcctcggggtctccatcgtcgtctgcggccggacagccgacacggccgccggttcatttgccgaaggcctcgcggctgcgcacccccagctctcctttcacctcctaccgcacgtcacgcgcccgcgcgacgtgcctgcccacgatcacgtggcgcagaccttcgggctcgcccgcgcctccgactccgacttccgcgaattcctccgtgtcgcctccccttccccgtccgccctcgtgctggacttcttctgcggcagcgccgtggacgtcggcgccgagctgggcatccccacgtacttcttctttacctcatccatctccggcctggcggaactgctataccacgccttcgccttgatccacgaacaagcatctcctggtatctcccaccagaacctcgggggtgaacttttgcacgttccgggtatcccgccgatatccgcggatgacttcccggcggcatggcacgaccgcgacagcctttggcacagactcttcctcaccctacccgaccagatgtgcagtt

SEQ ID NO: 13610 - DNA, 356 bp, Zea mays
  Clone ID: MRT4577_112403C.1
gcgatgctgcaggcaaaaggttaggtatggacaagcaacttgtgcaactatgggggcgtcatccagcaatcccagtaacggatgctgagcgtgagtcaacaacgcacgacctttggaggattaaaactgaagccgaaacacctgcagatgacactgtcggcagcgctgtatatatactcagaggatatcaacactacaaagatcccatcttacccgacatgatgcagagtaccaagcttcctgtgctcaagtacatgtagcatcaatcacagttgcctgcaattacacaagttcactgtacacgtacacatgcagaggcattacaagttgagagccggagcacaggccatctagat

SEQ ID NO: 13611 - DNA, 586 bp, Zea mays
  Clone ID: MRT4577_112404C.1
caatttccatgtaaattgatctgggatatctggctgtaaaaggtgtcctctatatgctggcagatgaggatctcaggcgtgccaccgaaacctgccctgctctacagctgggggtggacacaagaggcgatggttgctccatctcaccaccttcctcaacctggacttgcctggccctagcgtaatcatgtggacgacgactctaacgcccagcgccgcaagaagagataacaccgccacactccctgccagattcagtagctcgagttgtacatgcaacaacagtcgtcctacactgaatttgtgagctgagcgcctttgcacggttcagatttactcgattctccgatccaatttcgagtcgttgcagggacggacagctaaagtagctgtggaatatggaagtaagtaagcgctccagagacggctgatcttaacatgcctgctaagacgccgattgagactgaaaagctgctagcccagttagttgagactgagatgaacagatgtttgaaggaggacacttacaaaggaaagtgtcctatgaaatctgtcacttcttgggctaccaagctaggggagcact

SEQ ID NO: 13612 - DNA, 730 bp, Zea mays
  Clone ID: MRT4577_112405C.1
ggtaccctcgggctcgccgccgacatctgctcctagctagcataaagaagcgttattctctttctcaagcagcaagcagctacacgcttgctacatatataggcaccggactcggagagcgagagagaggccgcgcgtgcacctcgtcctcggtcgtcgccatggggaggtcctcttccacggagaagctggtgtgcttcgtcctggcggtcctggcggtgctgtccccgctgtacatcgaccggcggcccgtggcggagcgagaggaggaggacgaggacgacggcggcggcccgtcggcgctgtggctgccggcggtgctcctcgcgctcatcctcgccatcaacgttacgtgcttcatggaccggcgcgtggtcaggttcgacccttactggatccaccgcgtgtgggggtcctccggcggcctcctcgccatgctgctgctcctcggcttcgtgctcaggtgcaaggcgtccctgctgtataccagctactaggtggtagctcggtcggtcgtcgtcatgggtctttttttccttccaccccccaccccccgcccgcggaccggagaggatgcgtgcgagtgcgacaggatcacaacgtgttttgccacacaaatttgtacgtaccagcgagcagcgaccttggatcctcagcaagtcttgttcaggttcaggctccgcgaatgtgaatttgtttcagacattgacttcgaaaaaaaaaaaaaaaa

SEQ ID NO: 13613 - DNA, 540 bp, Zea mays
  Clone ID: MRT4577_112406C.1
atgcccacctgtctgctgaccttgcctgtggccttgctgggcttgctgcaggcatggccattggcatggccggtgatgctggtgtcaaggctaacgctcagcagacaacgcagcatgcgggcatgatcctgatccttattcttactgaaacgcttgccctataccgtctcatctacggcattatcctctggatcattgcctgccactcccccgcacattacaggcccgattaaaatgtcaacaccgagccgaccacagttccctggacagaggtctgtcatgttctatatccatgagacaagacactagaccactttctgaggctcacttagatgctgactagtatgccatctactgttgcatctagaaaacaagaaaggctgcgtaaccagaggatgactcaaaccatgacgccaacctttgccctgtccttttgcctggcgggttgcggttgatgcttatttatacacagatttatctacagtcgttgctggggctggggctgggactttggcttaaactggtgaataatccagtgca

SEQ ID NO: 13614 - DNA, 951 bp, Zea mays
  Clone ID: MRT4577_112407C.1
cattgggtacctcgaggccggccggggctctaaatcagcaaatcctatcttgtccgctgcccccgccgccccgcggttgggtcgtgtcgtgtccccacctcgtcttcgttctgctcctaccaattccagtcccagccatccgcccgcccgcccaactatggcggcaacggctctgctcctccccagcctcgcggcgcccacggacacgccgcgccgcgcccacaggttgctgcagccgcagctccagctccagcgcggctcccttgtctctcggtccctccggcctccgcggcgtcggcggctcgcggtctcggccgtgcaagagacgaaggagggggaggccaagacggccgacgagatcaccgagaagtacgggctcgagttcggcctctggaaggtgttcagctccaaggaggaagagggaggcgaggggaagaagtcgcggacggaccaggccaaggaactcctggccaagtacggcggcgcgtacctggccacctccatctcgctctccatcgtctccttcactctctgctacctcctcgtcagcgccggcgtcgacgtgcaggacctgctcgcaaaggtcgggatcgtgacaggagaaaccggagggaaggtcgggaccttcgcgttggcctacgccgcgcacaaggccgcgtcgccgatcaggttcccgccgacggtggcgctgacgccggtggtggccagctggattggcaagatcaggaagggcggcgactgatgcgccgccactcaagtacacttctcactgaatcatgtagtctatgcaaatagctatacataagcttatataggtgttctactagccggtgccagcgaatctatctggtgctgcttttgtaaaagctgttcgatgacgattttgaacaaccagtaatgaatgacgagtggagagagtttttgaactaaaaaaaaaaaaagcggccccta

SEQ ID NO: 13615 - DNA, 385 bp, Zea mays
  Clone ID: MRT4577_112408C.1
gcaagtgttgaatgattttattgctcagacccgatagcaggccacatggaaccgcggtagtactctttatcccccacgcatttgaatagaacggcttaacgagacaacctttagtcaaggcctatgcctgcccgagcctataattaacgggtgggaggtgcgtgacgacattacgccgccttacgcgcaagcgcctatcctgggcgctacccggtggacaggcggagcctccggggggcgtcgtatttgaactggtaggaccgacccgggtggacctgagacgaccaacgcctgaggggcgctcacgcgggagatcttgggcgcctgctggaacatggcgacggagatgcgcggctcggtcgccacgcaccgagaacaggtgctt

SEQ ID NO: 13616 - DNA, 390 bp, Zea mays
  unsure (1)..(390): unsure at all n locations
  Clone ID: MRT4577_112409C.1
gcttggaacctttgggctgatttagtgcttggactcgcataacacgaagcatctgagtcatccaaatgatgaattaacgttggacgtcgtactggaaaaggagtagggaaacgagcaccctaaatagaagaagcctatcgacgtcaccgaacgtcatcttagaagcaccgggtcgctcttcatagtagctatacccgtaaacagagtcacggtacactccaaatcaagaagacctaaggaggtagaggatgaccgtatcgaagtctcgaactcggacgactgtcacaccaaagtacatctatgttgaaccatcgtatgaaaagaatccgggaagtcnaaggaggtaacggacgacgtcgaaaccgtcactagctccgacttaaataacct

SEQ ID NO: 13617 - DNA, 362 bp, Zea mays
  Clone ID: MRT4577_11240C.1
acccgtgtctgggagctgcactaccactactacccggttcataaaactccggttgaacagtaaattgcccattgtcctactgcgtatgctcgaacctcttgctgagaaaaccttgatctaagcctcatgtatccatgatccattaattgtactatcgccacgcttatgaacgaacttggacatgcttgtatcacaacgcatgatcactctgtattcttcctattgatatcttaaatttactcaactggtgattccttttcagatttttttatatatgctctatgtttacgcgactacgccggctttctgcaaacagatctcgttctccgttacttagtaccattttacaaataatagttctt

SEQ ID NO: 13618 - DNA, 310 bp, Zea mays
  Clone ID: MRT4577_112410C.1
ggccaaaagtggccccattttttacataaaaaaaatttggaatacatagggccaaaaaacttttgggggaaccccaaaaaaagcaaaaagcttttggggggaacccacccaaagaaaattaaaataaattttggggccctaaaaattttagatcttggcccttggcagggcttttccgggaggaggtggcccccggggtaaaaccaacaaatggtcatccaattggtttttaccacacaaccctcaaatatctgccccccatttggggattttttacgaaactcttgggcttaaaaatggggggggggcc

SEQ ID NO: 13619 - DNA, 208 bp, Zea mays
  Clone ID: MRT4577_112411C.1
cgcaagggctcgggggggggagagagaagaaggagagggagaagaagacacacggggaaaggcagaccgagccgcccggaaccaagaaggggagcgggcaagctgccagaacatcaacggaggggggccaacgcccagaagcaccgagcgagacgacgaagccaggacaaccagccgggcaacccacaaggccacgggacgaggaccc

SEQ ID NO: 13620 - DNA, 656 bp, Zea mays
  unsure (1)..(656): unsure at all n locations
  Clone ID: MRT4577_112412C.1
gtgcttgaaatgttccagnaaaaaattcagattaccaagcgatatgtgaattgggttctaccattggtgcggtggaagagattgatgtagaagctctggagacaaaggacattgttagattcaaagtgaatgtaaaaagtgtatcaatgattccctcggttatagaaattggtattaaaccttttctatacgacatttttttcaaagtggagtcattagatgaagaacgatggaatgatgatactgtttgcttgggaaaaagagctactatcgagtctcttcaattagatgataatattactgagaatttgatgaaaaaagtcaagagtgaaaaagggaaggggatggcagatcatatgcttactggcattttggaagataactctttcaaaggtgggaagtcaggtaatgctcagaaagtgagtaaagatggtgagaaagggattgagggttatagtgaagagaaggtggatttcgatgggagtggggatgatctccttagctctcatgagcttgaagatctggtgaaagaggcaaatattgagatgagtgcttcacaagagattgcaggtgtagacaatacagatcctgggatgtccaaagagttgcaagctgccaagattaaaaaagcaaagggaagatgattgaactagtgg

SEQ ID NO: 13621 - DNA, 207 bp, Zea mays
  Clone ID: MRT4577_112413C.1
gaccccccctgtaggggccctttaaccgcggcgggggtgggggtttcccccagggtgacctttacatttgccagcgccttaccgccccttcttttgggttttttcccttcttttccggccagggtccccggttttccccgccaagttttaaagggggggctcccttatggggcccgattaagggcttagacggccctggcccccaaa

SEQ ID NO: 13622 - DNA, 4015 bp, Zea mays
  Clone ID: MRT4577_112414C.1
ccggccggctcctcccagtccccccatctctgtccctgtcccccctcctcctcgccttttaccccgcatcgcctcgccgcctcctgcccgtctcgctgaaaccctcttggtcaccgccgtggtcgatccgacccggcagtagccgcagcatcctacgagggccgttggcggggtcgtcgtcgtcgtcgtgttcggcggcgggaattggatgcgccacggagcgggcgaggggacctagttgagttgaatacggcagcgacgggaggacgtgatgccgggggtggcgtcagcagcgggatcggggatctggtcgcgccggcgggacgagatcacgttcgatcgccttcagaagcagctcatttgtactgtctttgcgttaattctagtgtattgctctgaagatatgttctgggatgacttgcctcctcaagcacgggaggaactcctcaaattggataagcaaactctcattgaacaagcacgcaagaatttctactgctcaaggtgcaatgggttgcttctggaaagtattgcataaattgatatgtatgggaagtcattgcagcaagaagcttcagatatttgtcatctgaggacagctattgaatcaagaattacgcaaggagagcaagatggggctcaggacccatcaatccatccctggggaggcctttcaaccacaaaagatggcttccttacgcttcttgactgctttataaaagcaaaatcattatgtggtgcttcagaatgtctttgacaatgcacgggcaagagaaagggaacgggaaatgctttatcctgatgcctgtggtgcaggtggcagaggatggatcagccaagggatggctaactataggggtcatggaataagagaaatgtgtgctctacacactgcccacctttcatgtactacactggtggatttctggtcagcgcttggtgaagaaactagatcatctcttctgcggatgaaggaggaagatttcattgaaaaacttatgtacaggtttgatagtaagagattttgccgagagtgtcgaaggaatgttatccgtgaattcaaggatctgaaggaactgaagcgcatgcaaagggaacctcgctgcaccagttggttttgtgttgcagatactgcttttaagtgtgaggtgtttgaggatgctgtcgtaattgattggcaccagtgcttatcagagccagatgaatcttatgaccactttgaatgggctattgggacagatgaaggagaatccgatatttttggctttgaaaatgttggaatgaatgcacaagtccacagaaatggaatcgatcttgatcagtttgaggactacttcataacgttgcgagcttggaggcttgatggccagtgcacagagctgtgtgtaaaagcacatgcattgaagggtcaatcatgtgctcaccacaggctagtggtgggtgatggctttgtgactatgacaaagggtgaaagtattagaaatttctttgagcatgctgaagaggccgaggaagaggatgaagacgatgccatggacagggatggaaatgattttgatggtgatgatgcccattcacagaagcatgccaagagccctgaactggcaagagaatttcttttggatgctgctgctgtgatattcaaagaacagattgagaaggccttcagggaaggtacagcacagcaaaatgcacgtagtgtttttgtgacccttgctttaaaacttttggaacagcgagttcatgtagcatgcaaagaaattattacgttggaaaaacagaacaaacttcttgaagaagaggagaaagaaaagcgtgaagaacaagagcgcgggatgaagaggagaacaagagagagagaaaagaagaacaaaagaaaagacaggctgaaagaaaaggatcatagtaaaggaaaaagactagttgaatcaaagtcaccagacaatatttcatcttcagctccaagcaactccacagcatctatcaatgattattcgacaaatactctggactcaagagattcaggtacggaagaggaatatagtgctgaaggtgtgaatctgtgcactcctgacagctgtgtgaatcaatcttcatgtaaaaaaattaatggagaaaacagtgtccactgcaatgcagtgacagaattttctccaatggacaacagtgacatttctacatcagatcaacccaagtctttgagacgaagtccaagatcaagagattattttcctcaagatcagtcatgttggtatgatgactgcggagatgagtctggaagaattggtgaattacgatggaagtcaagggaaaagaaaggccgcatccagctttagagccatgcctctgtcactgccttttcaaaacggacatcggcaggctgctagtcttactcagagagacatgaatctagaaaggcgccctgcaaagttgactaagccgacaggcaaggatcccccagaaaacaagaacaagtcgggcctaaaggatctcccagaagacaagagcaaatcatgggatgcggatgcatccttctcgttgttccaattcaacttgccaatagcttcgcctgtaacaccatcatcaaaagataagagcggagagctggccgcaaggacgccactggctcaggtgcaagctcagctttgctcgagggaacaagcagatgtcaaggagtatagcctgttctcctcgaaagataatggcatattttcgtttatgtagataaaagaaaaacggttacaagcctcaggcttctgaaagttccagggatgtttgtaattcagatcaaagatgtgcaaatggtgggagaaatcaaactacttcctgtgctagtactcttatggtaaataaacaaaattgttactcagaaaatgatgaaggctccaggcatgatgtagagctgatgacgaactctgctagttctgatagcacctcgtcatgcatgagccagggagatagggaaagcagctccagcagtacaacctcttcgagcgctcaaaatccggaatcatcttctgaatctgaggaatcaccggagagaataaacagcacagtaggtacacaatcatcaagagctgctgcttcacggtctttgcttgaagcatgtgcaggtaatggtttcagagaataccaacccaaggcaaccggcctagctcacaatgacatgtttgggtacaatgtatcccctgtccaggaccagctgctgcattaccaaagcacgcatccacctcaacaaccgccaataacaatgggatttcatgaccgttcttgggctgcaccaacgaatggaaactttcagtatgctcgaccatcccacttatattctagtccgctcgtattcggaatacctggaaatcattttattgattatccttacatggctcccgccttcagccatatacctccagagcctattcacaaggccgcatccagctttagagccatgcctctgtcactgccttttcaaaacggacatcggcaggctgctagtcatactcagagagacatgaatctagaaaggcgccctgcaaagttgactaagccgacaggcaaggatcccccagaaaacaagaacaagtcgggcctaaaggatctcccagaagacaagagcaaatcatgggatgcggatgcatccttctcgttgttccaattcaacttgccaatagcttcgcctgtaacaccatcatcaaaagataagagcggagagctggccgcaaggacgccactggctcaggtgcaagctcagctttgctcgagggaacaagcagatgtgaaggagtatagcctgttctcctcgaaagataatggcatattttcgtttatgtagataaaagaaaaactgtgacaaacctgctacccttcgtttctggtgtctcttgctgcacttcgtgaatgctttgtgttctccggagcaaaataaaggatgttgccattttcttcaaaaaaaaaaaaaagcggtaccaacatcaaagggagaaagccttaaaaaaaaaaaaagaaaaaataaaaattg

SEQ ID NO: 13623 - DNA, 131 bp, Zea mays
  Clone ID: MRT4577_112415C.1
cacctagcaggccgtacctagctttcatgctatagtgacgtcgtacttagcagcttcggcgtcacatcatgggtcatcagctgtttccctcgtgtgcaaatctgttcatccgctcgacaattgccacacaa

SEQ ID NO: 13624 - DNA, 243 bp, Zea mays
  Clone ID: MRT4577_112416C.1
gggggccccaaaatttaaaagtccccccccccgcggcttttattttatcccaatttgaaagttttttttaaaaaaaaaaaaaaagggggaaaatttggggagttttgggggccccttttggtaaaagggcgtggttacttttagaaaaatgttctaatttaaaccccggcctttttttggggttttataaaaaagggctaggggggcgggggtttttttctttgtaaaaaaaaaattttttaa

SEQ ID NO: 13625 - DNA, 2236 bp, Zea mays
  Clone ID: MRT4577_112417C.1
ggtcctcagcggcgggcgggataacaggttgagaaggccttcagggaaggtacggcacagcaaaatgcacatagtatttttgtgtcccttgctctaaaacttttggaacagcgagttcatgtcgcatgcaaagaaattattacgttggaaaaacagaacaaacttcttgaggaagaggagaaagaaaagcgtgaagaacaagagcgcaggttgaagaggagaacaagagagagagaaaagaagaacaggagaaaagaaaggctgaaagaaaaggaaaataataaagggaaaaaactagttgaatcaaagtcacgaaatgatattccatcttcagctccaagcaactccacaacatctatcaatgattattcgacaaatactctggactcaagagattcagttaaggaagatgaagatagtgctgaagttgtgaatctgtgctctcctgacagcttagtgacctttgtacatcagatcaatccaagtcttcgagacggggtccaaggtcaagggaggattttcctcaagatcagtcctgttggtatgatgactgcggagatgagtctggaagaattggtgaattacaatggaagtcaagggaaaggacaagaagtattaatagaagtcgcaacgcagcatccacctcaaacaacaggacaagagagaggcaatcatacaattcttgcagctgcggccatctggaagactatggagtcatggacagctgtttcttgccaacagctagatctggcaaagagacgaagatagcaagaaaatcaggagttgagaaacctagggtgcagtaccacagatgctatacattggatagctttatagtgtcaaaaggaaaccgtgctggttctacacagaaaaatgctatcccaaagcaaatatgggagcctatggatgctcgaaggaagactaaattacacaatacagttcatgattcaggttcagttaacgatgttgattcactgaaacatgtggtttttgataacagtggatctcaaaattttggagtaggatgtgaatcacagcctcaggcttctgaaagttccagggatgaatgtaattcagatcaaccatgtgcaaatggtgggagaaatcaaactatttcatgtgctagtagtactcttatggtgaaccaacaaaactgttgcgcaggaaatgatgaaggctccaggcatgatgaagagctgatgatgaactctgctggctctgatagctcctcgtcatgcatgagcgagggagatagggaaagcagctccagcagtacaacctcttcaagcgctcaaaatccggaatcatcttctgagtctgaggaatcacccgagagaataaatagcacagtaggtacacaatcatcaagagctgctgcttcacggtctttgcttgaagcatgtgcaggtaatggtttcagagaataccaacccaaggcaaccggcctagctcacaatgacatgtttgggtacaatgtatcccctgtccaggaccagctgctgcattaccaaagcatgtatccacctcaacatcggccaataacaatggggtttcatgacggttcttgggctgcaccaacgaatggaaactttcagtatgctcgaccatcccacttatattctagtccactcgtattcggaatacctgggaatcattttattgattatccttacatggctcccgccttcagccatatacctccagagcctattcacaaggccgcatccagctttagagccatgcctctgtcactgccttttcaaaacggacatcggcaggctgctagtcttactcagagagacatgaatctagaaaggcgccctgcaaagttgactaagccgacaggcaaggatcccccagaaaacaagaacaagtcgggcctaaaggatctcccagaagacaagagcaaatcatgggatgcggatgcatccttctcgttgttccaattcaacttgccaatagcttcgcctgtaacaccatcatcaaaagataagagcggagagctggccgcaaggacgccactgactcaggtgcaagctcagctttgctcgagggaacaagcagatgtgaaggagtatagcctgttctcctcgaaagataatggcatattttcgtttatgtagataaaagaaaaactgtgacaaacctgctacccttcgtttctggtgtctcttgctgcacttcgtgaatgctttgtgttctccgaagcaaaataaaggatgttgccattttcttc

SEQ ID NO: 13626 - DNA, 277 bp, Zea mays
  unsure (1)..(277): unsure at all n locations
  Clone ID: MRT4577_112418C.1
ccaacataattttttaaatgtncaaagctaaaggggggatttttgagcgggttttttcaaaacaaaacccccggggcatttaacttgttcaaaacatgtttaaaagctgaatggacattgccaacggactcttggnagacccccaaaaaaaaaaacaataatttcaaaggaataaacctaaaaaatggggggaaacaaaaccaaaacaaacatgccggacgccttgatctgctcaaaaaaaaccaaaaataacttcccgcgcaccccacctcttttt

SEQ ID NO: 13627 - DNA, 750 bp, Zea mays
  Clone ID: MRT4577_112419C.1
ccttcccggcccaaaatctctgtccctgtcccccctcctcctcgccttttaccccgcatcgcctcgccgcctcctgcccgtctcgctgaaaccctcttggtcaccgccgtggtcgatccgacccggcagtagccgcagcatcctacgagggccgttggcggggtcgtcgtcgtcgtcgtgttcggcggcgggaattggatgcgccacggagcgggcgaggggacctagttgagttgaatacggcagcgacgggaggacgtgatgccgggggtggcgtcagcagcgggatcggggatctggtcgcgccggcgggacgagatcacgttcgatcgccttcagaagttctgggatgacttgcctcctcaagcacggcaggaactcctcaaattggataagcaaactctcattgaacaagcacgcaagaatttctactgctcaaagtgcaatgggttgcttctggaaagttttgcaaaaattgttatatatgggaagtcattgcagcaagaagcttcagatatttgtcgcctgaggacagctattgaatcaagagttacgcaaggagagcaagatggggctcaggacccatcaattcatccctggggaggcctttcaaccacaaaagatggcttccttacacttcttgactgctttataaaagcagaatcattatgtgtgcttcagaatgtatttgacaatgcacgggcaagagaaagggaacgggaaatgctttatcctgatgcctgtggtgca

SEQ ID NO: 13628 - DNA, 452 bp, Zea mays
  Clone ID: MRT4577_11241C.1
taccggtcgtatatctcgggggctcgaacacgcgtcaagagaatggcatcaccttctttacaagtagaacaacgaccagtcacggaaacctattgtatggtctaatatcggagtgggtgcagttcttcaactgtttgaagttactactcgtggacagccgtttgaagttatcaagacacagcttgctgcaaatcgaaaggacagcatgatttctgctttgaagactatctattctagaggaggcatattgggcttttaacaaggactgattccctgggcatggattgaagctagtacgaaaggcggtgtcttatttttggcgcataatgaagcttctacctttgttgcgtcgttgggattttctccaaccgtttcagatacggtaggatgtacatttggtggtgtcgcacaagcttatactactatggggttctgtacgtttatgaaaaccg

SEQ ID NO: 13629 - DNA, 302 bp, Zea mays
  Clone ID: MRT4577_112420C.1
aggaaaaggtattttgaatgaatggaaattaaaatttggccatgaattcataagatattaaaaattttgggggtgaggaaattttggatagggtaacaaaagcccaaaagtttgatgggaaaattaccatttaaaaaaaaaaacgaaatagctttattgggccttccataaaaggtggaaattaaagtggaccctctttttctttcttttttttgggtgcccttaaatgggggttaaaatggacttttttgggtttgagggaatttaaaaattaaggggggggaaattactatcccgggaaa

SEQ ID NO: 13630 - DNA, 334 bp, Zea mays
  Clone ID: MRT4577_112421C.1
accaaagaacaggttgagaaggccttcagggaaggtacggcacagcaaaatgcacatagtatttttgtgtcccttgctttaaaacttttggaatagcgagttcatgtcgcatgcaaagaaattattacgttggaaaaacaggtgcttattatacctctagataaaattaagatgaggttgacttgatcgtatttgtcaacatcaaccgtggctgaatttattgcagaacaaacttcttgaggaagaggagaaagaaaagcgtgaagaacaagagcgcaggttgaagaggagaacaagagagagagaaaagaagaacaggagaaaagaaaggctg

SEQ ID NO: 13631 - DNA, 417 bp, Zea mays
  Clone ID: MRT4577_112422C.1
ggcgggatagcttccataccctgcgatctctctcctctaccacttcctctcttcctagcatcgcggtattcccaccctcgtccgtctgcacggggccacgcggcgtacgcccatacgtccgcggccgtctccgtgcttcgcgcgctgcgcgtcgaggcggccaccctccccgtgctctgcctcaacggctcagatggtccgggagctaagcctcgacctcgaatccgcggcaccctccaccgagggcgctgctgtcgaccgcgatatcgttgccgatcgacatcacgggcgtcgacggacctcctacacgctcactcgtagatgaactcctagtggcacggcggaagccctgtcgcataggaatccactgcatgctgagccgtgtggcgcagcttacgtctctgcttccctgaggtg

SEQ ID NO: 13632 - DNA, 299 bp, Zea mays
  Clone ID: MRT4577_112423C.1
cacgatggctgcgctgcgcctcgcctacttcaccctccgccccgccgctgccgagttctccgcctccttcggcgcgaccccagccgcgtccggctccgtctccttcgcccgcgcggcgcgggggctagccctccctccgcctggccccgccccgccgccgcggggacctcgccaggccccgcgccgcgcgcgcggttttagttgaagagggcttaatgggttttttgatttcgaaactccgagctcgggggattgaattgagcccccccaagatcagaattggagcagcggtgtttttt

SEQ ID NO: 13633 - DNA, 582 bp, Zea mays
  unsure (1)..(582): unsure at all n locations
  Clone ID: MRT4577_112424C.1
aattcggcacgaggctaaattacacaatacagttcatgattcaggttcagttaacgatgttgattcactgaaacatgtggtttttgataacagtggatctcaaaattttggagtaggatgtgaatcacagcctcaggcttctgaaagttccagggatgaatgtaattcagatcaaccatgtgcaaatggtgggagaaatcaaactatttcatgtgctagtagtactcttatggtgaaccaacaaaactgttgcgcaggaaatgatgaaggctccaggcatgatgaagagctgatgatgaactctgctggttctgatagctcctcgtcatgcatgagcgagggagatagggaaagcagctccagcagtacaacctcttcaagcgctcaaaatccggaatcatcttctgagtctgaggaatcacccgagagaataaatagcacagtaggtacacaatcatcaagagctgcttcacggtctttgcttgaagcatgtgcaggtaatggtttcagagaataccaacccaaggcaaccggcctagctcacaatgacatgtttgggtacaatgtatccnctgtccagga

SEQ ID NO: 13634 - DNA, 1066 bp, Zea mays
  unsure (1)..(1066): unsure at all n locations
  Clone ID: MRT4577_112425C.1
ccggaaaaacccgtttccactctccactccactcgcgcgtccgttccgcctccactgaacatctccttttaacacccggctccggcgactcgccccttcctccactggtgcatccaccattccacctaccccacccccacaacccgctcgcgcggctgtccaatggcgggaggcggggcgccgtcagcgtggggcccgagcccggcgctggtgaccgcactggtggcgctgcttgggctcggcctcgccgcctacatcgtcggcccgcagctctactggcacgccgcggaggtgctcacggcggcggccgcgtgccccgcctgcgactgcaactgcgacgcgcgcccgctcctcgaccttccggaagattgtgctaaacacttcaaaggggtcaagagtcgcgcatctggtgaagagacagaaaagagtttcacagagctgcttgtagaagaactaaaacagagagaagaggaggcaacacaagctcagcaagaggccgatgttaagttgctcgaggccaaaaagttagcttcacagtatcagaaggaagctgacaaatgcagctcaggcatggatacctgtgaagaaactagggagaactcagcggaagcattggtccaacaaaagaaactgacttctttgtgggagcgaagggctcgggaactaggatggagacccgagaatgccaaggcacgtctaaagtagtaaaaccagtggatggtgttggatactatgtgtagcaatagatctcattgtaaaaccagtggatggtgtgggatactacgagctcgagatgatgaggaaacaaatgagttcctggttggactcgactctctttacacgccatggggccttattgttcatagtaaatttatgttcagtttgtagtggactttcattgttctttgtgaaccctgttgtgtgttgtacttgggatggtcataggattacattgttcagtatttcctggatgttctaaaaaggagaaaagtaattgtctgggggtggtggaaaaaaaaaaaaaaaaaaaaaaaaaanaaagtactctgcgttgttaccactgctt

SEQ ID NO: 13635 - DNA, 521 bp, Zea mays
  unsure (1)..(521): unsure at all n locations
  Clone ID: MRT4577_112426C.1
ccacgcgtccgctccaagcaactccacaacatctatcaatgattattcgacaaatactctggactcaagagattcagttaaggaagatgaagatagtgctgaagttgtgaatctgtgctctcctgacagctgtatgaatcaatcttcatgtacaaaaattaatggagaaaacagtgtccacttcaatgcagtaacagaattttctccaatggacagtagtgacctttgtacatcagatcaatccaagtcttcgagacggggtccaaggtcaagggaggattttcctcaagatcagtcctgttggtatgatgactgcggagatgagtctggaagaattggtgaattacaatggaagtcaagggaaaggacaagaagtattaatagaagtcgcaacgcagcatccacctcaaacaacaggacaagagagaggcaatcatacaattcttgcagctgcggccatctgggaagactatggagtcatggacagctgtttcttggccaacagcttgantctggccaag

SEQ ID NO: 13636 - DNA, 902 bp, Zea mays
  Clone ID: MRT4577_112427C.1
taccctcgcggcctgccgggagttatttctaactcatatcacttttttgttctatgtgcattcttatgttttgcgcaactgacataccaagcaatgccgagagctagacgcaacaataataccattcctcaaagtagatctttactattatgccatgatatattcaaatcatcttctcaagaaagattgtgctaaacactttaaaggggtcaagagtcacaccaatggtaacaacgcagaatacgcgggcacagagctgcttgtagaagaactaaaacagagagaagaggaggcaacacaagctcagcaagaggccgatgttaagttgctcgaggccaaaaagttagcttcacagtatcagaaggaagctgacaaatgcagctcaggcatggatacctgtgaagaaactagggagaactcagcggaagcattggtccaacaaaagaaactgacttctttgtgggagcgaagggctcgggaactaggatggagacccgagaatgccaaggcacgtctaaagtagtaaaaccagtggatggtgttggatactatgtgtagcaatagatctcattgtaaaaccagtggatggtgttggatactacgagctcgagatgatgaggaaacaaatgagttcctggttggactcgactctctttacacgccatggggccttattgtccatagtaaatttatgttcagtttgtagtgtactttcattgttctttgtgaacactgttgtgtgttgtacttgggatggtcataggattacattgttcattatttcctggatgttctaaaaggagaaaagtaattgtctgggggtggtggcaataaagaaaagattgcctgcagttcttctttcaaaaaaaaaaaaaaagtactctgcgttgttaccactgctt

SEQ ID NO: 13637 - DNA, 443 bp, Zea mays
  Clone ID: MRT4577_112428C.1
agattacacagactgcatttactgacaatggtaggctgtgccatctgcatatcactgtgactgacgagtacagagcaaacatgaaggcgacggtctgctcggaaggattttagagcattgctcgcgaaactgattaatatgatccgaatttccatttgaagagatggaccatgatatgggaaggttaacacgtacctaaataacaccatgtggagatgaaaccaccattttacttggtcttgttggcagcctttgacaaggagcctgacataactaccgttgcacaatgtgctaccctaaggtggctatctaaacaactggacaggatgctggatcagacagggatggcgctgatctgtgaggaccgcaggcaatacaaaagagttaatcgtgtgagccagcagatgctgaggagaacgcgcattgatccttggaatgagaaa

SEQ ID NO: 13638 - DNA, 1100 bp, Zea mays
  unsure (1)..(1100): unsure at all n locations
  Clone ID: MRT4577_112429C.1
taattcggcacgaggccgcgctcgtcgctgtctccttcctcgccttttgccccgcaccgcgtctcgcttgaaaccctctcggtcaccgccgctcgtccgggagacccggctgtagctcagggaccccgtcgctgcagtatcctccgagggtcgttggcgggggagtcgtcgtcgtcgtatttggctgccggaattcgatgcgccacggagcgggcgagaggacctagttgagttgaatacggcagcgacgggaggacgtgatgccgggggtggcgtccgcagcgggatcggggatctggtcgcgccggcgggacgagatcacgttcgatcgccttcagaagttctggaatgacttgcttcctcaagcacggcaggaactcctcaaattagataagcaaactctcattgaacaagcacgcaagaatttctactgctcaaggtgcaatgggttgcttctggaaagttttgcacaaattgttatctatgggaagtcactgcagcaagaagcttcagatattggtcatctgaggacagctattgaattaagaattacacatggagagcaagatggcgctcaggacccatcaatccatccctggggaggcctttcaaccacaaaagatggcttccttacgcttcttgactgctttataaaagcaaaatcattacgggtgcttcagaatgtctttgacaatgcacgggcaagagaaagggaacgggaaatgctttatcctgatgcctgtggtgcaggtggcagaggatggatcagccaagggatggctaactataggggtcatggaataagagaaatgtgtgctctacacactgcccacctttcatgtactacactggtggatttctggtcagcgcttggtgaaggaactagatcatctcttctgcggatgaaggaggaagatttcattgaaaaacttatgtacaggtttgatagtaagagattttgccgagagtgtcgaaggaatgttatccgtgaattcaaggatctgaaggaactgaagcgcatgcaaagggaacctcgctgcaccagttggttntgtgttgcagatactgcttttaagtgtgaggtgtttgaggatgctgtc

SEQ ID NO: 13639 - DNA, 793 bp, Zea mays
  unsure (1)..(793): unsure at all n locations
  Clone ID: MRT4577_11242C.1
ccggccgggagtgaatatcgatattcctttagagcgatgcttgaagaatgtggttctatgcacttgtacgtgtatgagcgacggctatccagtccaagctttcaacaatgctgggtcgcctatgcttgaggcctctcgattggaccatgagtactttgtggtatcgtgggcaattaatcgaatgtgatcatctctgccagttttgcctgaaacacaagacgccgtctatcgcaatactcatcaaatcaatggcgcttgccaccatccctgttgctcaccgtccgcggcatagcacagaagccatcattgtgcatgcagtatggacttggagatgggagtttgttgcttgcttggtaaggggacaaaaggacaccaccaccaccaacaacaacaccaacaacaacaacaacagcaacggtgagcgcccgctgggggccgcacggtgccgctacagcgctttgatgcaggataaattcagtagagttgaacatgaggataaggatgaggattaggtcaagcctccggagaaaggctgcagatgaatacgggaataggcagactaaaccaggggcagccatccgagccgcagaagccgcttgttgacagctcaagagccgtttcaagaccaattgcaacggcccagcgactaaagaatatgccactaaaatgggcacatgtataatttctttacacgggcagagactgaagtgctgaaagtggtgtttgtatgtgtcaaaacgatcttgtgactggtagtaagtcataggtgccggtaggtaggtattgctancac

SEQ ID NO: 13640 - DNA, 670 bp, Zea mays
  Clone ID: MRT4577_112430C.1
gtgcattcttatgttttgcgcaactgacataccaagcaatgccgagagctagacgcaagaataataccattcctcaaagtagatctttactattatgccatgatatattcaaatcatcttctcaagaaagattgtgctaaacactttaaaggggtcaagagtcacgcatacggtgaagagatagaaaagagtttcacaaagctgcttgtagaagaactaaaacaaagagaagaggaggcaacacaggctcaacaagaggctgatgttaagttgctcgaggccaaaaagttagcttcacagtatcagaaggaggctgacaaatgcagctcaagcatggataacctatgaagaagctagggagaactcagcggaagcattggtccaacaaaagaaactgacttctttgtgggagcaaagggcttgggagcttggatggagacccaagaatgtcaaggcacttctaaagtagtaaaaccagtggaaggtgttggatactatgtgtagtaatagatcttattgcaaatacgggcccactaagagctcgagacgatgaggaaacaaatgtgtttctggttgagcggactcgactcacttgacatgccaaggggcctacttgtccatagtaaatttatattcaatttgtagtataattccattgttgtttgtgaac

SEQ ID NO: 13641 - DNA, 463 bp, Zea mays
  Clone ID: MRT4577_112431C.1
aaactgcacgacctttattggctgttccaaaggccacccgggaaaaaccaaaccaatgcccctttacttgaacactctgtttacaaacaaacaaaaatgtccctggtggcggggggtgccaaaggatgttgaccaaaacagtaactgacacaggcggacggggtttctagatctattgcacacccaggtaaaacgagacccaggacctttcgggacaacggccacagcggtgactgctagactaacgtgaaaaaacaaggttcttcaataataaagcaccccctcaaagatgtgacctccccggagacaggtacaaacaagcgaatattgttaggggaccttggatcacaggcttgttgaccaacgcgacccaggccaagtgtttatcaacacaaacagggaattcttctcataaaaaaagaccatcttaaaagctttctaggcagccccaaagaccattaat

SEQ ID NO: 13642 - DNA, 402 bp, Zea mays
  Clone ID: MRT4577_112432C.1
ttttttttttttttttttttttttttttggtatgttttgtttttttttttttttttttttttttttttttttttttttttttttttttaaaagggccgctgggaaatttctttccatcaaatttccttgaacccccccagttgggataaataccttgtaaggggcccgtttttttccctgaaaatcacccccctttggaaagggggaccttttaaaagattgcaggggttggggcccccataatggggccccccgcctggaaccctatttaaaaggggtccccgttttttttgtctggttttgcggaatgaaatccccaccatttggggggaagggggggcccccatttttttggggaattcgtcaaagggaaccactccccgtaatcagaagggggttggg

SEQ ID NO: 13643 - DNA, 433 bp, Zea mays
  unsure (1)..(433): unsure at all n locations
  Clone ID: MRT4577_112433C.1
gcagaggcgtagtggatccatatatgctggcgctgtcgctgtagcatatgcgccgaatgttctattttatatttcccgcatgcaaaattttttgggggggggggggaacctaatnatcatnnttttttacattatcaaaaacattaacctttacgacttaaagaaaactgcttatcaactgaatcaaacatgaccgtaggatgtgcctgttctgaccgagtaaaatagtcaactctactacaggatgaatttgctggtatgaatgagcaagcacattctcaaatgtcctatgtgatgtctggtgctaacatgtttaataagcacgtaaactgtcttcatatccaatgcaaagtatttgaaatacatgatagtaaatataagacttgctataggataagttacaaaagcatgaccattgtctacgtgttcatac

SEQ ID NO: 13644 - DNA, 363 bp, Zea mays
  Clone ID: MRT4577_112434C.1
ggggggaacaagagatagattacccagcccccgtatacaattcttttaacgtcaagccggggggaagcatatatcctaacggtcgggccccgcccgaaaacttaaaaaaaacaaaggaaaaacagaaacattctgggcggggtataaaaccgggataatacggaaaagaatgggattttcatcataactcccaggtttgaaaactcaaaacgagcccactgggagctaaactcagcagtcctggaaaacccccttttcaaaaaatacaacgttccccggggccacaaaaaaataggcacgagggcacttcaccttactagaacttgcccgttgtgtcaaacaaccttgtgaacaggaaggggg

SEQ ID NO: 13645 - DNA, 361 bp, Zea mays
  Clone ID: MRT4577_112435C.1
cagcgcatgtatacgtatcatcatgcgcctggccggcttagcttggcacttggcaggcatagttcatatatttaatgatgaagaagaacagactacagagtacacaggtgatgtgtttccgcagatgatgatcatcattccgatctgccgacatccccggccaagactactccggcgacggcacaagcagcagagccttcgcactgcgacgtggacctacgggccagttacaccggcggcgcccagcagcagcagcagcagcagcaccgaaccactcgtgccgccaacagctcgtcgaagcgctcggcgaccgaaccagaagagaaaggagcagaaggcggcaagaggagccgcaaggcgc

SEQ ID NO: 13646 - DNA, 240 bp, Zea mays
  unsure (1)..(240): unsure at all n locations
  Clone ID: MRT4577_112436C.1
gaaaacgcctttacataaaaaataataaacatttttattttacaaaaaacacatatgaaatctggctgtttttattgaatgcaggcacccaacngacaaaacaaacttacaatttccatttccttttcaaagtcatgtaacgcaatcctgtagtgtgtatttgattcatcaaccattcctgaccatttgaatctcttatcaccaacaaaaaaaaaaaaaaaaccctttcctatttatatt

SEQ ID NO: 13647 - DNA, 298 bp, Zea mays
  Clone ID: MRT4577_112437C.1
aattcggcacgaggctcttcgctcgtgggctctctctctctctctctctctctctctctctccgcgctctcgctccaggtcgtgtacgatccgccagttttacgggccccggcggcgctcgtgcgcgggcgacaacatgtcctcggcggcgggcggaggatacggggccggcggcgcggggcatcagcacctgttgctggggcaggccgcgggcgcggggcagctctaccacgtgccggaacacaagcggcgcgagaagctgcggatgccgcccgacaacagcgggcgactcgccccc

SEQ ID NO: 13648 - DNA, 2068 bp, Zea mays
  Clone ID: MRT4577_112438C.1
ggtaccctcggagtcttccgggctttcttaagaaagaacgcagacgaaatattcaattaggcttgttttgttgttcagaagattttaaatatgctgcttcattcagttgactgaatttttcaaaattctcacaactaggattttttaaaatccgctttctgaaatcatctaaaagaaagcagtgactcacaaattagtagagaattttgtgaaattattcaaaaaaattcaaagtattcaatgagtcactgagatctttgaataatcgatgatgcttcattgctctttcaaacaagtgttacaggagtcatttataaaaccgtggaaaaactttagataaaattcccatgaaattagtgtgaagcaacgcagaacattaacctattgtgcactcatgcaaggaacagagcacccagtactactggttcttagataaatggattaacacccagtactgcaaggaacagagcatccgtgcatacctgttggcaacaaagccttctgttgcatcattatgcattcacttttgcaatgatttttttgcactgataaagagaagtagtcttttatgttattttgccaccatttgcaatagttctagctttactcgtcggccaatttatcagttgcaggtactaacggtgccaggctaccagctttgactatgtgatttcattacttgttgtatttagaaaatctaatattatgaaggtcaactttcttattttactgaaagtctaaaacacactacctattaacatattagtgcctgctcaagtgcagaaaaatggtcaaaatcttccttgtgttgtcttagcaatgctttggcactccatatattctattataattaggcagggttggagaagaaaagcgcatcacaggggatatctatggcacttttatactcatgttcttgtgtttcttgtttacagcctacacaaatctggagtttgaacacacgacatgtaatatgcttatcttttgtggatggactattcggttggcttttgctgattgaattggagctgcacttgtagtttggtaacgtttatatacataactatgcggattgcgttagctagaatatgtcttccagtaccagggtgacaatgggctctaaattttacactaaaatttacgaatccgatcgggttatgatcaggttatatttatatttattattgaactaaaattaatttaaggccctatcaaattgtggagaaacattttgaatcgtgatccattatcacccctaccagcaccacatacatacctcccgttgtggtgtttaaccctacgtgcagaccttgtcaccttattttggatcgattccctgttgtatgtggcttgtgctaaaacaagaaacacttgcaactttactagaaattatggtcagactctctttctctgtgttcgtttgattgttgctctggctgtctcctgctaaccaattttgtgggaaattcaacctttgaagcatcaatgtggtgaataatttctcaaaccctcagtatgttttccctaatgctggataaggcgctctcaaaaagcgaggctgtggtcagcgccttcgcctccatgacgccgatgctcatcggctccgtcgtgctggactccacgcagggggtactctgcggcgtcgccaggggctgcaggtggcagcacctggcggcgtggaccaacctggtggccttctatgtcatcggcttgccgctcgccatccttttcggattcacgctcgccttccaaaccaaggggctgtggatggggcagatatgcagcctcctctgccagaactacgtcctcttttttatcaccctgtgaaccaactggcaggagttagacctgaccatgttcaacaaggacaacgattttgtgtgctaggaatctagaaagagtttttattttcttttttgccatgtgctgttgctgaaacattgaaccatcagcatcaggcttcgacagagctgtctggtgtttgctcatcaattcatcatcagtgtaatactacagattataacatttggaatctcgaagataggaattaaaaatgttctgatacgcc

SEQ ID NO: 13649 - DNA, 573 bp, Zea mays
  Clone ID: MRT4577_112439C.1
accaccaccaccaccaccaccacctcgtctcccctccctcccaccacctccgccaccgcccagctccagccctagctccgatctcgccgccgccgggccccggatcccgccccgtgacgagacgcgccccggcctcctggtcctgggcacgacgctccctcctcccgctccgccttgcgtaaaggtggcagcattggggggacaattttgttctcaccctgtttggtacgtggcacgtagttttggcgttctgaagtatatgttggcggagggtataatccggatatattactcttgattctgcaatggcaaggagatgaaagtaccgcgggtgtggcagcggggcagcaaggacatgacagccatgccacatccgcgccaccgcactgccaagaagcccatgtggataattgtgctactgtcaattgtttgtgtttcgttgattggggcttatgtctatcctccacggcgctactcgacctgttacttctttgcttcaagtgtttgtactcccttcaaggattggctccctgctgtgacccggcgggagccgaccgatcaagaggttttttc

SEQ ID NO: 13650 - DNA, 327 bp, Zea mays
  Clone ID: MRT4577_11243C.1
gcgtaaaaaacagaaagatgagaatgaaaaaatattaaagaaagaaaaacaagtaaaggctaaagaaaaaaaaaaatgctaaagctagtctttaaagataatcaagaacaaactgagaactgagacacaaacaaggggtgcaacggttttcaggattcgagatttcttgtcccatggttgaaagctttaaccatctatatcgggtcagttaaataagtgcaatggccttgtttttaaaaacctgttaatgggaaaaccctgggggtttccaaatttaatccccttgaaaaaaatcgccatttgccaggttgagaaattttgaaaaag

SEQ ID NO: 13651 - DNA, 374 bp, Zea mays
  Clone ID: MRT4577_112440C.1
ggcgtatcagaacatttttaattgctatctccgagattccaaatgttacaatctgtagtgttacactgatgatgaattgatgagcaaacaccagacagctctgtcgaagcctgatactgatggttcaatgtttcagcaacagcacatggcaaaaaagaaaagaaaaactctttctagattcctagtagacaaaatcgttgtccttgttgaacatggtcaggtctaactcctaccagttggttcgcagagtgataaaaaagaggacgcagttcttggtttggaaggcgagcgtgaatccgaaaaggatggcgagcggcaagccgatgacatagaaagccaccaggttggtccacgccgccaggtgctgccacccg

SEQ ID NO: 13652 - DNA, 3067 bp, Zea mays
  Clone ID: MRT4577_112441C.1
ctcgaagccggccgggatatgtttgcctagcctgaaaaatccgaaacatggatatggataaagaaacattaagtaaagaacagtgtggtctctaaatgttaatagaatattcagttaggcttgttttgttgttcagaagattttaaatatgctgcttcattcagttgactgaatttttcaaaaattctcacaactaggattttttaaaatccgctttctgaaatcatctaaaagaaagcagggaatcacaaattagtagagaattttgtgaaattattcaaaaaaaatcaaagtattcaatgagtcactgagatctttgaataatcgatgatgcttcattgctctttcaaacaagtgttacaggagtcatttataaaatcgtggaaaactttagataaaattcccatgaaattagtgtgaagcaacgcagaacattaacctgttgtgcactcatgcaaggaacagagcacccagtactactagttcttagataaatggattaacacccagtactgcaaggaacagagcatccgtgcatacctgttggcaacaaagccttctgttgcatcattatgcattcacttttgcaatgatttttttgcactgataaagagaagtagtcttttatgttatttttccaccatttgcaatagttctagctttactcgtgggccaatttatcagttgcaggtactaacggtgccaggctaccagctttgactatgtgatttcattacttgttgtatttagaaaatctaatattatgaaggtcaactttcttattttactgaaagtctaaaacacactacctattaacatattagtgcctgctcaagtgcagaaaaatggtcaaaatcttccttgtgttgtcttagcaatgctttagcactccatatattctattataattaggcagggttggagaagaaaagcgcatcacagggaatatctatgacacttttatactcatgttcttgtgtttcttccccgcaaagaaagaaggcaagagttctcggcttctcgcaagtcgcgacagagaaagaggcggagttgcggagaagatgcagagcagcagcatgaagagggagatcagcgaggcccacaacaccattcgcttcggcatcaacgccggcgtcaaagcggacctcgccccgccgcacccgctccagtctaccatccaatcggtaaggattcgtcgctctccttcgtttcgtggttcacgcgtggtgtcgcatcgggcggctcgacgaggcggacaaagccggtggccagtgcgtccaccacctaggggcgcgaccgactcgtcttccccaccggtctggtgctccatggaggtggctgtctccattggtaccacgcagggccaggcttgttccactggctgcagcgtggacaatgacgtgaagccgaagctctagacggcgatcaaagcagaggaggaacaccagctgagactactctacacccgagtgtcacagtggtggcccatgaatacgcaggctggagctgcgatctcgtcgcagaccatgggtgcaatgggtgcagagacttaggtggatggttctaaatgttcacggcaaaaaaatgtgtggcgcatgggtttctatcctgagggtgcgcagatcggtcgccattagaaagatgcagcttcaactactttggaccaggtgcaaactcatggcagttctgatagggcaccctacacaaatctggagtttgaacacacgacaggtgatatgcttatcttttgtggatggactgttcgcttggcttttgctgattgaattggagctgcacttgtagtttggtaacgtttatatacataactatgcggattgcgttagctagaatatgtcttccagtaccagggtgagtgggtgacaatgggctctaaattttacactaaaatttaagaatccgatcgggttatgatcaggttatatttatatttattattgaactaaaattaatttagggctctaacaaattgtggagaaacattttgaatcgtgatccattatcacccctaccagtaccacatacatacctcccgttgtggtgtttaaccctacgtgcagaccttgtcaccttattttggatcgattccctgttgtatgtggcttgtgctaaaacaagaaacacttgcaactttactagaaattatggtcagactctctttctctgtgttcgtttgattgttgctctggctgtctcctgctaaccaattttgtgggaaattcaacctttgaagcatcaatgtggtgaataatttctcaaaccctcagtatgttttccctaatgctggataaggcgctctcaaaaaggtcagttcctatttgatgaggcactcattatttggttgtgcatggttcatggtgccatctttcttgtatgaatgcctgggactcggccacgacctctgggtgcacctcttcaccaccagcgaggctgtggtcagcgccttcgcctccatgacgccgatgctcatcggctccgtcgtgctggactccacgcagggggtactctgcggcgtcgccaggggctgcaggtggcagcacctggcggcgtggaccaacctggtggccttctatgtcatcggcttgccgctcgccatccttttcggattcacgctcgccttccaaaccaaggggctgtggatggggcagatatgcagcctcctctgccagaactacgtcctcttttttatcaccctgtgaaccaactggcaggagttagacctgaccatgttcaacaaggacaacgattttgtgtgctaggaatctagaaagagtttttattttcttttttgccatgtgctgttgctgaaacattgaaccatcagcatcaggcttcgacagagctgtctggtgtttgctcatcaattcatcatcagtgtaatactacagattataacatttggaatctcgaagataggaattaaaaatgttctgatacgccaataaaaaaaaaaaaaaagaaacctaacagattgtaacatttggaatctcagaggataggaattaaaaatgttctgatacaccaaaaaaaaaaaaaaaaaactcgagag

SEQ ID NO: 13653 - DNA, 828 bp, Zea mays
  Clone ID: MRT4577_112442C.1
aaaaaaaaaaaaagtgcaaagcatggcagttctgatagggcaccctacacaaatctagagtttgaacacacgacagcattgccatgtgccaaaacaccgaagccatatcatacatgatcacctatggcttcgccgctgtcatcagcacaagggtgtccaacgagctgggagcccggaacatcgccaacgccaggaaggcgctcactgtgtcgctggcgctgtccctgatgctgggggtggcgttcctgctgctcctgggcctcggccacgacctctgggtgcgcctcttcatcaccagcgaggccgtggtcagcgccttcgcctccatgacgccgctgctcatcggctccgtcgtgctggactccacgcagggggtactctgcggcgtcgccaggggctacgggtggcagcacctggcggcgtggaccaacctggtggccttctatgtcatcggcttgccgctcgccatcctcttcggattcacgctcgccttccaaaccaaggggctgtggatggggcagatatgcagcctcctctgccagaactgcgtcctcttttttatcaccctgcgaaccaactggcaggagttagacctgaccatattcaacaaggacaacgattttgtctgctaggaatctagaaagagtttttcttttcttttttgccatgtgctgttgctgaaacattgaaccatcagcatcaggcttcgacagagctgtctgatgtttgttcatcaattcatcatcagtgtaacactacagattgtaccatttggaatctcatacacagggaattgaagtgtcctgataccatcaatcccctcaaaaa

SEQ ID NO: 13654 - DNA, 396 bp, Zea mays
  Clone ID: MRT4577_112443C.1
gctcacaacctgcacatcagtacgcataaatgcaagacataatatattttacagcatacatgattgaacagctccacagcatgcatacaaatacactagcggtacaatctctggctaccaaaactaccttcacaaatactggtgcaacctgcagcacgtaggaatgcgtacgattacggaacacgcatgcaagcatcatgccctagctaacttgccggggactaagttggtggcgtaagcccagccgtaggagtaaacggtgtcggctatgagggccgcaagggtcacaagggggcccttgacggtgacgacagcctgcacgaataagccgagcatggagaacatggagaggaagccgtaccttgatcttcttcaacttgagctcggctaacgcct

SEQ ID NO: 13655 - DNA, 1768 bp, Zea mays
  Clone ID: MRT4577_112444C.1
cattgggtacctcgaggccggccggatcggatcggagctaggtgatcggtgcagctaactagctctagccatgggcaagagctgcgtgccccccgtcgccatggtgctcgtgcagctgggctttgccggcatgaatgtggtgtcaaagctggcgctggacgccggcatgagcccctacgtgctcatcgcctaccgcaacctcatcgccgccgccgtcatctcccccgtcgcctacttgcttgagagacgaagcggggcgacgatcacaaagaaggtgctcctccagatcttcgtctcctccatcttcggggcgacgctgaaccaggtgctgtacttcgtgggcctcaagtccaccagccccaccgtggcgtgcgcgctcaccaacacgctgccggcgctgacgttcgtgatggcggcggcgctgaagatggagtcggtgcggccgggcacgccggcggggcaggccaagctggtgggcacggcggtgtgcgtgggcggctccatggtcatacccttctacaagggccccgtgctggggctgtgggcgtccccgctccactggcgcttcgtcgcggaccacgcgccgtcgcccgccgccgccgccgcacactcgggagccgccgtgctcggggacgtcctcatcatcgccagctgcgtcgcctgggccgtctggttcatcctccacaccaagatgtccgagggcttctccgcgccctacaccagcaccgccatcatgtgcctcatggcgggcgtgcagtgcgcgggcgtcagcgccgccatggaccgcagcctcgacgtctggaagctcggctgcgacatcaggctctactccgtgctctacatcggcatcgttggctccggcatcgggttcacgctcatgtcgtggtgcatccaggtgcgcggcccgttgtacgtgtccatgttcagcccgctgctgctcgtcgtcgtcgccatcatcggctgggccatcctcggcgagaagatacgcgtgggaactgctgtcgggtccgtgctcatcgttgccgggctatacatggtgctctggggcaaagggagggagatggacaggccggacctcgacaacgacgacgacatagccgacgaggagaccgccgtgggccttgttggcttcagcggcaagggcggtggcgcggtcgccatcgcaagcagccgcgtcgaggccatcagcctgccggtgtcgttctccacaactagccccaagcggctgcaacacatccacgggtgaagggtgacgtggccgacgacgtgcgcgcgtgtcactttggacgcgccaagaaatctttcagggagccatggagagagtgagagtgtggtgaaaaaaaaataaggcaaaatagctagtggacggaggcaagacgacggcggcgacgatcggattggagtggcacacataaagacttattgtatacggttggttgcattgccgttgcagcagcgtcacagcgtggtttgttacaaacaggaaacaaacaaacaggagtgtgtgatgatgtgactgtacctagtggaagctaaggattgcttgctagcttggatggccttcttgttctgtctgcccttcccttgcattggattggatgacctgatttagttcctccaaagagtctcattcatcgtacagttctcttctgccgctgcttcttccatcaagtgcagtttttctttgtcctcagtttttgcatgccaaacgattaataattggtcgaaaagaggaacagaggggaaatggctttttttgtaccttcac

SEQ ID NO: 13656 - DNA, 158 bp, Zea mays
  unsure (1)..(158): unsure at all n locations
  Clone ID: MRT4577_112445C.1
tcgtctcgtgatgtgtcaactggtttggctttggattggtcgtgcttcaatggggtgtcatttttacgttgcgtggctgggactaaaggggtaacgaaggtactttggcatgtccaaatgtcgtaggattatcgnaatccatcagtccatttcaggtg

SEQ ID NO: 13657 - DNA, 380 bp, Zea mays
  unsure (1)..(380): unsure at all n locations
  Clone ID: MRT4577_112446C.1
tcgaggcaggtcgatacccgtacctgagaggagtttatagctgnatgaaagaatgggcggggcgtctacggagaagcatgtctggagtacgtatctccatagaagtctgtccgcagtacccccaaggtagtgtgttctccatgtctggtccgtgcctcatccgcgtgggtctccagtcgcgtcctgggtacgtccgggttgtggcatccgtgccaggtccgtcatctagcatggtcggagcatctacgagagcgtggtggctgactgacgtgagcgaggggcatgcttcggcacgccatccgcgcactccgaaggttgcggtatcctccacatccccggagcaccttctcggaggacgaagctggttgtcgctggtcggc

SEQ ID NO: 13658 - DNA, 399 bp, Zea mays
  Clone ID: MRT4577_112447C.1
ccttgattttgttgtttttatcagatggaaaggacagttgtagtatatggaacacagataagtaatgtttatttgtgcgtaacagggggagtaaagaggggttgcttgataataatgtgacaactcaaagctctacgtgatgacatatggcctatatatactcgaaaacaaattctcagatgagatcaccctctcctcaagcctgaagcatgcaatttgccaactccatgccatcgaatattcgggtgcttatgccttatattcaataacaagcggcatttgacgctctgagctaggcatatgaaagcatagatcaagactgtgaagcctcactgatgactgacgagcccatgaagccacttccatagatgaatattgagccgatttgctttctgtact

SEQ ID NO: 13659 - DNA, 407 bp, Zea mays
  Clone ID: MRT4577_112448C.1
attcggctcgagcctgaatagatctttatgtcgggtgaatcagggaccaccacaggatgagggttgctacacataagtaagacactcaaagacgattgagaatcgatggaacgagctgggaaagaatgtatggaccgacgggaaaaaaagcacgtggataatgtcgattctacatgaggacaatcatgtcatctgggccaacgctggtgctcgggctagctgggggtaccttactacacctatcttggggctgtacctattcgggccctgggggcgactaccatgtataccgggcccgggcctattgtagattcggaactggaggtcgctcattgggagcatggggagcacatgccccatgttaggccgcttgttcgcgtaagggcccacacagctgaacttcaccg

SEQ ID NO: 13660 - DNA, 307 bp, Zea mays
  Clone ID: MRT4577_112449C.1
atgggatcgagttgtttcactgcacgagcacatcctccggcgaccaccggcctccctctccgtcatctagcgaccgaccaacgcgacggcgccacctgggctcagagcaccgcattccccgagttcaagcccgaggagatggctgccatcatgaaggatttcgacgagccggggcacctcgccccgaccggcctgatactgggaggcaccaagtacatggtcatccaaggcgaacctggagctgtcatccgtggcaagaagggatccgggggcatcactgtgaagaaaacagggcagtcactcatca

SEQ ID NO: 13661 - DNA, 539 bp, Zea mays
  Clone ID: MRT4577_11244C.1
tacagcagcagcaggaagcaaccatgttgactctctccaacaatacattaggaattgaattcctaacgggcaaaaaaaaaaaaaaaaaaaaaaaaaaaaaaaaaaaaaaaaaaaaaaaaaaaaaaaaaaaaaaaaaaaaaaaaaaaaaaaaaaaaaaaaaaaaaaaaaaaaaaaaaaaaaaaaaaaaaaagggggggggggtttaaaaaaaaccaaagtttactaacccttgcttggaagggaaaagtttttttataggggaaccaaaataaaatcaacgggccggggtttaaaaacggggaaacggaaaaaacccgggcgtaaccaaattaaatcgacttaaaaagaatccccttttcacaagttgggtaaaaaacaaaaaggcccaaaccaatcgcctttcaaaaaatttgcccaccctaaatggcaaatgaaaccccccttgaaccggcaaataaaacgcggggggggggggggttaccccaaggggaaccgttacatttgcaagcgccatagcgcccgctctttgggtttttttc

SEQ ID NO: 13662 - DNA, 429 bp, Zea mays
  Clone ID: MRT4577_112450C.1
cgcagtgacaggcgtctgcgtactcgcctagctccgcggatcaaagctaaccccaaggcccccccttcctgccatggatcaccaccgacggacagcgcggcccgaggcaactaacacgcatgaaggggagcgacatgcccgaaccacgatctggcgagggtggcgtccagggcgaaaacgggcgctgagggcatgacggcctcaagcatggcatgaaggccgaggggcccatgcccggcgacaagaccaaggggggaggcgaggacacctccaaaacctcattcagtgcaacgggaggtggaaaacaaaccccccgatcagcgacagctgacctaagatcgcgggcgagtaaggaaggcaggactggcacatcaagacagctaccgcatactgcggggcgaaccagagccaagggcgccgcaacctgcc

SEQ ID NO: 13663 - DNA, 955 bp, Zea mays
  Clone ID: MRT4577_112451C.1
gtcagaaaacagtgggatcgagttgtttcactgcacgagcacatcctccggcgaccaccggcctccctctccgtcctctagcgaccgaccaacgcgccgagcgaagatgtcgtggcagacgtacgtggacgagcacctgatgtgcgagatcgagggccaccacctcacgtcggcggccatcgtcggccacgacggcgccacctgggctcagagcaccgcattccccgagttcaagcccgaggagatggctgccatcatgaaggatttcgacgagccggggcacctcgccccgaccggcctgatactgggaggcaccaagtacatggtcatccaaggcgaacctggagctgtcatccgtggcaagaagggatccgggggcatcactgtgaagaaaacagggcagtcactcatcattggcatctacgacgagcccatgactcccgggcagtgcaacctggtggtggaaaggctgggcgactacctgctcgaacaggggatgtaatgacaaccccttcccctggaatgcatgttgatgatgttgctggttccaacttcgttttcagtaataacaacaaagcgaagaccctcctacctaccctatttgcttgagcggctcttgtccgcgccacaagataccaattgttgcgctgggaatattcagttacgatgacccgctttagttcagtttttttgtttttggggttggttcgatcatttggctgtagcgtgaatcgcatggacaacagactccaattactaagcaaatattttttcttcttctgcatatatttgaagaatcttgttcacgccccctttcgaaatgaaatgcgggaatttttttttcttgtttccaatgtctctttatgtgaaaaaagaaccgattcatgtgaaataattcatgtatgttttctccaaaaaaaaaaaaaaaaaaaaaaaagtcgacgcggccgcgaat

SEQ ID NO: 13664 - DNA, 932 bp, Zea mays
  Clone ID: MRT4577_112452C.1
ccggccgagaagctcctcgtcaccagtcagaaaacagtgggatcgagttgtttcactgcacgagcacatcctccggcgaccaccggcctccctctccgtcctctagcgaccgaccaacgcgccgagcgaagatgtcgtggcagacgtacgtggacgagcacctgatgtgcgagatcgagggccaccacctcacgtcggcggccatcgtcggccacgacggcgccacctgggctcagagcaccgcattccccgagttcaagcccgaggagatggctgccatcatgaaggatttcgacgagccggggcacctcgccccgaccggcctgatactgggaggcaccaagtacatggtcatccaaggcgaacctggagctgtcatccgtggcaagaagggatccgggggcatcactgtgaagaaaacagggcagtcactcatcattggcatctacgacgagccgatgactcccgggcagtgcaacctggtggtggaaaggctgggcgactacctgctcgaacaggggatgtaatgacaaccccttcccctggaatgcatgttgatgatgttgctggttccaacttcgttttcagtaataataacaacaaagcgaagaccctcctacctaccctatttgcttgagcggctcttgtccgcgccacaagataccaattgttgcgctgggaatattcagttacgatgacccgctttagttcagtttctttttttttgggggttggttcgatcatttggctgtagcgtgaattgcatggacaacagactccaattactaagcaaatattttttcttctgcatatatttgaagaatcttgttcaggccccctttcgaaatgaaacgcgggaattttttttttcttgtttccaatgtcttttttattatgtcaaaaagaaccgattcatgtgaaataattcatgt

SEQ ID NO: 13665 - DNA, 610 bp, Zea mays
  Clone ID: MRT4577_112453C.1
gaacgttccaacaggtacgacgtcatcaccgttttctgcgtacctccaccgccgcaacaaggaaggaggcgcgctccagagggagttcataagattcctcaatggcggggcatacggtactggcgccgacggacacaagatgacggcggaggccacccgagagacgatgctcgtgcactgtcaacaacctcctgcagggctactccggcatccgcttcaagatcctcaagaccatcttcaagctgctcaacgacaacgtcacgacgagcctgccgctccggggaaccatcaccgcgtggggcgacctcatcccactctcctacatagccgggctcatcacgggacgccagaaatccggggcgaggacccccaatggcaggaaagcgagagccgcgcaggcgttcgaaatgagctactaatcaaagacggatgctgcaagatgcatgccaaagaaggtctcaacatggtcgactgcacgaatcaagaaatcaggtctagggtctactgtgatatgataggtcgacaagcgcgccatttcgcatcgattgcatacaacgaggatatccgcgaatgctggctctgaagaggagcatgcgacatcacctatgac

SEQ ID NO: 13666 - DNA, 364 bp, Zea mays
  unsure (1)..(364): unsure at all n locations
  Clone ID: MRT4577_112454C.1
cgcgtccggcctggctcgccgcgcgncgctcccggggatgccctgccgcgctcctctgatagtcacagctagccaggcggccccgcttgccgtgtgtcgggctcggcttgtcccacgcgcgggcgcggagcgggttgttggatcaagctgaccatggcgtcggtcaggtcgtgcgcgtccgtgagggggggggggaggagtcctgtcagttacagatccacnagggccgtggcggccggctcgggaaggctgcgcgtacgctcctcgtcgctgcaggcgctcgccggctgcgccagcggcggcggcggtttttgtttgctcggcgggatgatgggcctagggttagggggggcgggcgggaggt

SEQ ID NO: 13667 - DNA, 875 bp, Zea mays
  Clone ID: MRT4577_112455C.1
ccggccgggaaaaaaaaaaaaaaagtggtgctagaagcaactgaaaacagccgagcgatctcctctccctctccctctccgatccattctccagcgcagcgaagtaaacatgtctgaccgggcaaagatgtcgtggcaggcgtacgtggacgagcacctgatgtgcgagatcgagggccaccacctcgcggcggcggccatcgtcggccacgacggtgccgcctgggcgcagagcacggcgttccccgagttcaagaccgaggacatggccaacatcatgaaggacttcgacgagccggggcacctcgcgccgacaggcctgttcctcggtcctaccaagtacatggtcatccaaggcgagcctggtgccgtcatccgtggcaagaagggatcaggaggcatcaccgtgaagaagacagggcaggcactcgtggttggcatctacgacgagccgatgacgcctgggcagtgcaacatggtggtggaaaggctgggcgactacctgcttgaacagggcatgtaactactacgtacctggaatgcatgtcgacgatcgatggtggtttcgagtttcgacttccaataatagtaacaacaaagcaaaggccttcctcccggcgtatttgctttggctcttctcctccacgccataagatttctagcaattggtcactcgccttaattagttcgctttgcttttgaggttgattcgaccattttgctgtagcgtgaattgcatgcatggacatgcaacgctccaatggcctttggaatgtggaatttttttttcccgtttctgtatttttcctataaaatgaagtaatgaactggttcttatataaaaaaaaaaaaaaaaaaaaaaaaaaggggcggcc

SEQ ID NO: 13668 - DNA, 432 bp, Zea mays
  Clone ID: MRT4577_112456C.1
tgttgtttttttgattcccaaaaacagacaaaagttagggaccagatggcacagagaacaagaggaatacaaggagaccccggacgcatataccggcatgcaagaagaataacaacacaaaagaaggaacgcacgagcagaacaaccgggcggagcgcgggaaaaaaaacccaaacccgccgacgagccgaactaaacagggcatagggagggtaaaaggacacatatagctgggacggctgctggggggaaacggaaatggaatgggacggaaattcacaagaacattcagcgactgtgggaacggacacatgggacgagaggagcacctggagcgccagggccacgaagacggagatgataagcacctggccctcgatggccacacaaaggacatccgacccgaacagccggggaatgccctgcaggagc

SEQ ID NO: 13669 - DNA, 269 bp, Zea mays
  unsure (1)..(269): unsure at all n locations
  Clone ID: MRT4577_112457C.1
gtggcaagatcgacgctgaactgagcaatatctgctgatggaatcttgacagctgcattgactcccatctngtgcctntcttcgtactgctgctagaatcaaaggtcttctacctcacagatgaagggtgactatcacaggtatccttgcggaatttaagactggtgctgagaggaaggaatctgctgagagcaccatggtggcctatacagctgctcaggacattgctctcgctgagctggcacctacacatccgataaggctgggac

SEQ ID NO: 13670 - DNA, 859 bp, Zea mays
  Clone ID: MRT4577_112458C.1
ccggccgagggtgctagaagcaactgaaaacagccgagcgatctcctctccctctccctctccgatccattctccagcgcagcgaagtaaacatgtctgaccgggcaaagatgtcgtggcaggcgtacgtggacgagcacctgatgtgcgagatcgagggccaccacctcgcggcggcggccatcgtcggccacgacggtgccgcctgggcgcagagcacggcgttccccgagttcaagaccgaggacatggccaacatcatgaaggacttcgacgagccggggcacctcgcgccgacaggcctgttcctcggtcctaccaagtacatggtcatccaaggcgagcccggcgctgtcatccgcgggaagaagggatctggaggcataactgtgaagaagacagggcaagcgatggtggtcggcatctacgacgagcccatgacccccggccagtgcaacatggtggtcgagaggctcggcgactacctcgtagagcaaggcctgtgaatggattcatttaacctcgctcgctcgcttgtccatggttcgagcatccagcagcaacgataccaacatcagcattatttaattggtagcctcctctagctacgcacgcattttagtcccctacacgcccttggattgtgcgtggctctgttaatcatctctcatccttcgtccgccatttctcccctgcccgtcaccgatcaccagagatttttgttccttgttggtaccatgcattttggcaaataattttgtaattccacccccaaattaaagtttggttgtcgtatggtttgtaaacccagaacaatatatatatgtgtgggaaaaaaaaaaaaaaaaaatttgcggcc

SEQ ID NO: 13671 - DNA, 523 bp, Zea mays
  Clone ID: MRT4577_112459C.1
atctgattaacccatctagggcaaatctaataaagtaggtcttcttcatcgggggccccccccttaaaccctttacaaagaacggggaacccccccggaggggaaaatacgtggggggggggctcaaggccacacttgcaggggataaaacccccccccgtggggggggggggggacaaaaaaaaaaacccgcggggtgttgggcaaaagggcaacccccttgggcctacaaacaccggggattttggatggggggaacaaaccccctcacccgaagaaggttaataaggggagaaagaccccctggccccgagggcgcgcgttatggggccccccaaacccaagccggtggtgaaaaacccggaagacaatccccacaaagtccccggcccccaaccgacaaccaaagggggggccccgaacccgagggtggggaaaacacgcccggggaaaaccaaccgggcaagcgtatgcccctcctggacacccaaaaaaatccttggccgggaggaaaaaccccacc

SEQ ID NO: 13672 - DNA, 144 bp, Zea mays
  unsure (1)..(144): unsure at all n locations
  Clone ID: MRT4577_11245C.1
gcagcattgtcacgactctatcttagctctctttgcagccagaggcaccactcaaaagcttggaagcagggagagggcaaggaggggatggtccctctggagccggngggagggggacngngatacgccacccaccgccggagc

SEQ ID NO: 13673 - DNA, 836 bp, Zea mays
  Clone ID: MRT4577_112460C.1
ccggccggggctagaagcaactgaaaacagccgagcgatctcctctccctctccctctccgatccattctccagcgcagcgaagtaaacatgtctgaccgggcaaagatgtcgtggcaggcgtacgtggacgagcacctgatgtgcgagatcgagggccaccacctcgcggcggcggccatcgtcggccacgacggtgccgcctgggcgcagagcaccgcattccccgggttcaaggccgaggagatggctgccatcatgaaggatttcgacgagccggggcacctcgccccgaccggcctgatactgggaggcaccaagtacatggtcatccaaggcgaacctggagctgtcatccgtggcaagaagggatccgggggcatcactgtgaagaaaacagggcagtcactcatcattggcatctacgacgagcccatgactcccgggcagtgcaacctggtggtggaaaggctgggcgactacctgctcgaacaggggatgtaatgacaaccccttcccctggaatgcatgttgatgatgttgctggttccaacttcgttttcagtaataataacaacaaagcgaagaccctcctacctaccctatttgcttgagcggctcttgtccgcgccacaagataccaattgttgcgctgggaatattcagctacgatgacccgctttagttcagtttcttttttttttgggggttggttcgatcatttggctgtagcgtgaatcgcttggacaacagactccaattactaagcaaatatttttcttctgcatatatttgaagaaccttgttcaggaaaaaaaaaaaaaaaaaattgcggcc

SEQ ID NO: 13674 - DNA, 265 bp, Zea mays
  Clone ID: MRT4577_112461C.1
cttacacactggcacatatgggagggtgcgtggtggctgaggccactgcactgacaaacctgccacatttcccacagacgatctacaaagtgaatgctactgtctctctggatgaactaggacaatagaggctgaagcatccacccgccgaggataatacatcgagtgaggactacgatggaatacgattcctcgaacccgcaaatatgaaatatatagaacattctacgagcatagcagggagttactccagattctgaactga

SEQ ID NO: 13675 - DNA, 913 bp, Zea mays
  Clone ID: MRT4577_112462C.1
ccggccgggaagctcctcgtcaccagtcagaaaacagtgggatcgagttgtttcactgcacgagcacatcctccggcgaccaccggcctccctctccgtcctctagcgaccgaccaacgcgccgagcgaagatgtcgtggcagacgtacgtggacgagcacctgatgtgcgagatcgagggccaccacctcacgtcggcggccatcgtcggccacgacggtgccgcctgggcgcagagcacggcgttccccgagttcaagaccgaggacatggccaacatcatgaaggacttcgacgagccggggcacctcgcgccgacaggcctgttcctcggtcctaccaagtacatggtcatccaaggcgagcctggtgccgtcatccgtggcaagaagggatcaggaggcatcaccgtgaagaagacagggcaggcactcgtggttggcatctacgacgagccgatgacgcctgggcagtgcaacatggtggtggaaaggctgggcgactacctgcttgaacagggcatgtaactactacgtacctggaatgcatgtcgacgatcgatggtggtttcgagtttcgacttccaataatagtaacaacaaagcaaaggccttcctcccggcgtatttgctttggctcttctcctccacgccataagatttctagcaattggtcactcgccttaattagttcgctttgcttttgaggttgattcgaccattttgctgtagcgtgaattgcatgcatggacatgcaacgctccaatggcctttggaatgtggaatttttttttcccgtttctgtatttttcctataaaatgaagtaatgaactggttcttatataattcctctcaaaaaaaaaaaaaaaaaaaaaacataaagcggaaaaaaaaaaaaaaaaaaggggcggcc

SEQ ID NO: 13676 - DNA, 1352 bp, Zea mays
  Clone ID: MRT4577_112463C.1
cacacatacatatactataattgtccatgtcatcggctcgttcctatggggccttttgcggcctcccttcatataggccactgagacctgcttccctttcgcagttgctcatcttcattgcggaacctcgaggccggccggggtggtcaccacggtcctcccttggccgtggcgtccgtcgtcccccacgtttgtcatatatatgcccatgtccgcgtcgtctcgggccttcctctgctccgatcccctttgcccttcctcgtcataggccaggcaactgcggctggcctgcttgcttctcttgtgctcctgcgccaccgtcactgctcatctcctccatagccatagcttttagactaggttttagattctggaagaagaacctatacacgagacagaagctagctagctagcttatttctgtttcttcagtaacctctcggtctagcaaccagcaagcttcccattgccctcgatcgatccgccccaaacatccatccatccatccacccttcttcattcctggctgtaagaagagatggtctcatggccgtgagctcacctcgccgagcgctcatcgcggccgtgtccctctgcttccttctcggcgctgcgagcagcgtccgcaccgcgacgttttccccttctcagcagcagaacctggcggaggacaagtcgcggctggggtcgacgccgccgagctgccgcaaccggtgcagcgcctgcaacccctgcatgcccgtccaggtgaccaccgtgcccgggctcggccgcggcgcccgcgccaccgacgtcgacgacgacacggtggcggtggcggccggcttctcgcgctactccaactacaagccgctggggtggaaatgccgctgcgacggccgcctgtacgacccctgacgcgctgctgcttttgcttcggcgccgtgccaaccccggtgcgcgcatgcactccgctccggactccggtcggcgggagagactcactactggagaccagccagccagccaggttctccgtctcgcgtctgtcgtgtgttcttcggaacccatggcggcttgcttcatcacaagcttatttattagcgctactgtctctactagttcgagcttgccgttgcagccattgcaactcgcgtagccgtaggcccgtagccatttttttggctccctgctcaaacaaattttactcgcgtgtcggtgtgtaaaactaaagactactaaagagtggttgtgagcagtaaaaactagctagtaccactccaagtcttgcccagtggtctggtagtacgtcttattaacagatcgaaggcaggcatgtactcgccgacgaaaaaaaaaaaaaaaaagcggcc

SEQ ID NO: 13677 - DNA, 894 bp, Zea mays
  Clone ID: MRT4577_112464C.1
cccactcctccgaagcaactgaaaacagccgagcgatctcctctccctctccctctccgatccattctccagcgcagcgaagtaaacatgtctgaccgggcaaagatgtcgtggcaggcgtacgtggacgagcacctgatgtgcgagatcgagggccaccacctcgcggcggcggccatcgtcggccacgacggtgccgcctgggcgcagagcacggcgttccccgagttcaagaccgaggacatggccaacatcatgaaggacttcgacgagccagggcacctcgcgccgacaggcctgttcctcggacctaccaagtacatggtcatccaaggcgagcctggtgccgtcatccgtggcaagaagggatcaggaggcatcaccgtgaagaagacagggcaggcactcgtcgttggcatctacgacgagccgatgacgcctgggcagtgcaacatggtggtggaaaggctgggcgactacctgcttgaacagggcatgtaactactacgtaccagctggaatgcatgtcgacgacgatggtttcgagtttcgacttccaataatagtaacaacaaagcaaaggccttcctcccggcgtatttgctttggctcttctcctccacgccataagatatctagcaattggtcactcgccttaattagttcgctttgcttttgaggttgattcgaccattttgctgtagcgtgaattgcatgcatggacatgcaacgctccaatggcctttggaatgtggaatttttttccccattttctgtatttttcctataaaaaatgaactggttcttatataattcctctcagatccctgttggtcaaatgatatgaaagcaaatactatattctgtgctgataaaaaaaaaagcgtggaatta

SEQ ID NO: 13678 - DNA, 617 bp, Zea mays
  Clone ID: MRT4577_112465C.1
ggggggaaatatttttttttttggccaagggacaaaaggccaaaccctttgcaactcaaatccaaaaaaaaaaattgccataaaaaagggctttttttttatgggccaaaactacaaacaaagcggggggatttgttttgttaggccccacccagggatcacattttcctggggttttcgacccccccctgcgggtcattatttttgcccccatttggcccccctggggtttcagcctgagcaggaactttccccgttgggacgggcttccaaactggagttgcaggacccttgacaagctctgagttgatatcgaggccaatttcgtaaaggacttgactaaccagctcctttggcttttcctccccctaaacgccctccaagggattatcgaggggggggttaataacttaactaaccatttccattttttggtttggcatctaaaactcccgcatgattttttgcggggcaggcaaattcatttgggggttcatttgccccatggtttttgtcccacccttcatgggttcccccaggggttggggtgatttcaaagtctgaatacctaaaaataccccttgtagctgggacttgagggcataaaattttgggat

SEQ ID NO: 13679 - DNA, 977 bp, Zea mays
  unsure (1)..(977): unsure at all n locations
  Clone ID: MRT4577_112466C.1
ttctccgatcccctttgcaccttcctcgttatcggccaggcaactgcggctggcctgcttgcttctcttgtgctcctgcgccaccgtcactgctcatctcctccatagccatagcttttagactaggttttagattctggaagaagaacctatacacgagacagaagctagctagctagcttatttctgtttcttcagtaacctctcggtctagcaaccagcaagcttcccattgccctcgatcgatccgccccaaacatccatccatccatccacccttcttcattcctggctgtaagaagagatggtctcatggccgtgagctcacctcgccgagcgctcatcgcggccgtgtccctctgcttccttctcggcgctgcgagcagcgtccgcaccgcgacgttttccccttctcaggtacgtaccgtacgtacgactcgtccccccctcctcctgagtcctgagacagactgagactgacagcgcgtcgggtgtctcgtctccgtgaggcgcagcagcagaacctggcggaggacaagtcgcggctggggtcgacgccgccgagctgccgcaaccggtgcagcgcctgcaacccctgcatgcccgtccaggtgaccaccgtgcccgggctcggccgcggcgcccgcgccaccgacgtcgacgacgaccacggtggcggtggcggccggcttctcgcgctactccaactacaangccgctggggtggaaatgccgctgcgacggccgcctgtacgacccctgacgcgctgctgcttttgcttcggcgccgtgccaaccccggtgcgcgcatgcactccgctccggactccggtcggcgggagagactcactactggagaccagccagccagccaggttctccgtctcgcgtctgtcgtgtgttcttcggaacccatggcggcttgcttcatcataagcttatttattagcgctactgtctctactagttcgagcttg

SEQ ID NO: 13680 - DNA, 1251 bp, Zea mays
  Clone ID: MRT4577_112467C.1
caagcccaaagattagcctgtgccccatgtgaaaggttgattcagagggatgcttcgaagtcgtcctgagccctggagtgatgtccaagttggttctttacaaattctggttttgatcgatacatcgttgatcctcaagatggttttgcagccatccgaatagatatagatagtgtttcaacattccctcctcatcggatgtggtgttgtctgagctgaagtttttagttgtgacgatgaattcagtgctctgcagacaactattatcataacctgagggtagagtgaattattcattgtatttttcttgagttgagggtagtgtttgaaacatcattctcggctttgtagtattcacagtggacagtatgtggtgctagaagcaactgaaaacagccgagcgatctcctctccctctccctctccgatccattctccagcgcagcgaagtaaacatgtctgaccgggcaaagatgtcgtggcaggcgtacgtggacgagcacctgatgtgcgagatcgagggccaccacctcgcggcggcggccatcgtcggccacgacggtgccgcctgggcgcagagcacggcgttccccgagttcaagaccgaggacatggccaacattatgaaggacttcgacgagccggggcacctcgcgccgacaggcttgttcctcggtcctaccaagtacatggtcatccaaggcgagcctggtgccgtcatccgtggcaagaggggatcaggaggcatcaccgtgaagaagacagggcaggcactcgtggttggcatctacgacgagccgatgacgcctgggcagtgcaacatggtggtggaaaggctgggcgactacctgcttgaacagggcatgtaactactacgtaccagctggaatgcatgtcgacgacgatggtttcgagtttcgacttccaataatagtaacaacaaagcaaaggccttcctcccggcgtatttgctttggctcttctcctccacgccataagatatctagcaattggtgactcgccttaattagttcgctttgcttttgaggttgactcgaccattttgctgtagcgtgaattgcatggacatgcaacgctccaatggcctttggaatgtggaatttttttttcccgtttctgtatttttcctataaaatgaagtaatgaactggttcttatataattcctctcaaattcctattgttcaaaggagatgaaagcaaatactatatcctgtgctgataaaaaaaa

SEQ ID NO: 13681 - DNA, 446 bp, Zea mays
  Clone ID: MRT4577_112468C.1
cccaaccaaacaagggtttgtttcatccgcctcggcttattttaaacatttttttccccaaagggtggcccaaaaaaaacaaaagggggggccccccagaaccgcgaaaaaaaaaaattcaaagggcccccattccaaaaaatcgacagggccctctttttttccaaaaagggaccccccgggggaaaaaaaacacccccttttgaaaaaattccacgggggccggccctttcacaaaaaaaaaccccaaaggggtagggggggacgggcccctgccggcgtacaaaatcccccgagggcccccccggcccaaaacctttttggcctttaaaaaccgggggtggaagaaaaaaacgctccaaggccctgggtgcccaagaccccaaacaaacgggggatttgaattttcttgggcccccccccggacccggcaaaagggaaccggg

SEQ ID NO: 13682 - DNA, 389 bp, Zea mays
  unsure (1)..(389): unsure at all n locations
  Clone ID: MRT4577_112469C.1
gaacctttgggctgatttatgtgcttggtgtgagatcgtttagtagccgtcactataccccgagaaacgaacggcttaccggtagcgcgtcagtagccgtttagtagctgccgctcagcgccgagacgcgagtgttacaggtagcccgttcggcgcaacaaaaacgggcgcactagataatgcccaaactccgacgaaattgcgcaccgtattcgcggcacactgttaaatcccatctacctagtaccacattataggcgtaacgtcgaacgagcaaagcccggtgacaaaaaaaagaaaaaaaagggtggttgtctcagaggacttaagtccatgcatgtgcgtacgtgatgctacagtctcctcacagcgctattcanacctaacct

SEQ ID NO: 13683 - DNA, 359 bp, Zea mays
  Clone ID: MRT4577_11246C.1
gtctggcaacaaaaagcatcatgaccgattccataatgcccattgtaattgatccccagggattcaaatgcttttctgcccctaaaatttattaaagggcgactcgatctgtcaagaaataaattgcgaaacaatatgtacagttccggagaaaagcatcaagcattatattaacctgggcagttctttcttaaacagccaacagggcaaagtaccagtcaggccgttcaacgggtgcgaaaacctaaaccttggtaacaaaacaattccatcataattagcatgtcccccgattggagctcactattaccaatgagttccacatttccacggccacgatccattacggggcaaatccc

SEQ ID NO: 13684 - DNA, 119 bp, Zea mays
  Clone ID: MRT4577_112470C.1
tcgggtcatcgtccacaagggcgatacggggatgttacccagccacctgcgtcttccacatggagtcaccctaatgtacagcttgcagcctcttgatacaacttgtctgatctgctaaa

SEQ ID NO: 13685 - DNA, 227 bp, Zea mays
  Clone ID: MRT4577_112471C.1
cgccaccacacgcggatcgaattaggctctccgagtctccggttccctcctctcggcggcggctcaggtccctctaccatctccggcgtggcgcttggcgtctgacctcaacaagcaagaaagcaaatggcaggcgacagggttgcgcatgacccctctagcgccactattgtgaagaagaacttcaatggactgaccctgggtctgatcgcgggaggcatgtggaa

SEQ ID NO: 13686 - DNA, 833 bp, Zea mays
  Clone ID: MRT4577_112472C.1
cattgggaccctcgaggccggccgggtccatctcaattctcaactcacactcatcacccggccgccttctcgctcgagcacttccctttctgagctcatcgtgctgctgagacttgagagcggcatatatatggcggctcaggcaagaatgggcggcgctcgtggcagcagcggcgccgtcgtgcttgcgctggtcctcctctgcgtgctccttcatggcgagttcgccgaatcggcggtgtacacggtcggcgaccgcggcgggtggagcttcaacaccgccaactggcccaagggcaagcgcttccgcgccggcgacgtgctcgtgttcaagtacgaccccaaggcacacaacgtggtgcccgtgagcgcggcggggtacagctcgtgcagcgcgccgaggggcgtcagggcgctcaccaccgggaatgaccgcgtcacgctcaagcgcggcgtcaactacttcatctgcagcttccccggccactgccaggccggcatgaaggtcgccgtcaccgccgcgtgagggcgtggtgaggccgtaccggaccgtgccgatcggccggacgggctatatatctggggctgctgcttctattattttcttctccaaagtaaagcgcatcgtcgttcaattatagtcgtcgcgtacgtacgtacgtacgtgtgtcggtgtgtgcgccttagttgttgcggatttgcactatatacggagagcgagaaggacagatcaagcaatgtattggcgtgtgtgttgatctatgcaacataataaaacctcattcgattgttgaggcgactttttttaaaaaaaaacctttttttaaaataaa

SEQ ID NO: 13687 - DNA, 540 bp, Zea mays
  unsure (1)..(540): unsure at all n locations
  Clone ID: MRT4577_112473C.1
gggggggggggggggttttaaaaaattttttttttttttttttttttttttttttttttttttttttttttttttttttttttttaaaaacaaacaaaaaggccaaacggggccaaaaaatccaaaataaaatccacccggaaacaattaggggtggaggggggaaaaataaaagaaaaccaaaaactaattaccccaccccaaacaaggggcggccaattagaacaacaaaaccaaaaacccaacgtttttactgggaaacttctcctcggagctccaacatccagaagggcaattcacaacaacaaggaaccggacaaaaaaacggggaaaaaaaaacccgcggtaatgggcctaatgcccatggggaaccccccaaccacccgaaaaaaagacgtgaactcctgaacctcggcaaacgcgttctgcccccggggctcggaaaggaacccctgaaaaccaaccaaaaacatgtacccaaagtgcttggcggggccaatgttcccctcnccaacaaggcggatgggcccgcgggggggc

SEQ ID NO: 13688 - DNA, 155 bp, Zea mays
  Clone ID: MRT4577_112474C.1
gcgggggccgggttggagtgggcgacggagagctggggtgtataaggggtacaagcgcacgttgtaatggggggttgcatggccacagagggacaggcggagcgtgcggggaggacctgcgggctagagagcgacgaggaggccatgtggggggg

SEQ ID NO: 13689 - DNA, 295 bp, Zea mays
  Clone ID: MRT4577_112475C.1
ggttgttcttcttatttattgttgttgtttttttacccatgaaaaagttatcccatttgttgtgtaattgaagaccccctgtataacaggttccagggggcaacacaggcgtgcaggggcggggacacttttttcccggcaacctaaacccgggtaaaaatatcaggcccccagtaaaaatgtaatcccccttcccttgctaatctaaactgagggggatgggtgggcgtcataaggtccctagtgagccagccgtgggggatccctttgggggcgaccccggtgggggggatgc

SEQ ID NO: 13690 - DNA, 225 bp, Zea mays
  Clone ID: MRT4577_112476C.1
agcatccatcagccgatggcgactcgacgagcgacgacttctcgccagtagcgcgcagatggccgccgtctcgctcctgagaaccgcggcgctcgggctggttgacctcgcgtcgccgctgccgagggctcggccgaggagcaatgacggccacgtgctcacatggcaaatcaagcatggtctgctggcacctgacgccgagcaccccgtgcagaacctgctccc

SEQ ID NO: 13691 - DNA, 164 bp, Zea mays
  Clone ID: MRT4577_112477C.1
cggacatggcacgctcccgtaggttgggttcttttaaagtcgaccaagccgtccgtttcacacgggaattttggggaagggttaatggttggcggttggcctgcccggcctaaagattttggcctgctcccgctgtgttgaggacccctagaatggcgggggtt

SEQ ID NO: 13692 - DNA, 341 bp, Zea mays
  Clone ID: MRT4577_112478C.1
cccaggatcacccagcttttaaaatgcaaaaggacaagaaacaagaccattaccccggttatttcaacaagagaagcagcgacaaaagtagaaggaagatgctgcgtcatgttcatttcgtcagcatttacaagtcatcgtcaagcatttaacgttatggttatgctcctaaagtgaaactgacccggtgaaattgttctttttttccacaatcacatggcaatttctgaacgttgaccagtgtccttctggaagtgtccagtctgagcaaatctttttgcttgtttgtgccggtgcgttcacaccttaagaagcagcagtcatttccaagtttgatagaa

SEQ ID NO: 13693 - DNA, 2031 bp, Zea mays
  Clone ID: MRT4577_112479C.1
gccggccgcgggaagcttggcggttgttgactgttgtagacttttgtggtctcacctcgcggacggcggacataccccgtctcggttctcaaacaccgccgccgccgttctcccaacatctccccgtccaggtcgttgggtcagcccctatccttcaccttcacgacttcacctgcttctccactgcgcgccccgcccccggccccgtcgtgcgccctgctcagatccatcgcacggggcttgccgcaccactgcgccaagcaaaaggtgggcggccagcggcgcgtgcgcagatcatgcactggtaggactaatttgcaagatcttggaccgggatggttcgcctgttagttgtcttatgaagattggtaaggggagaaagaagatgaggaataaacagcgaaaatcatctgccctcggttctgatgcaggatgtggatcttctttatcttgtattgtatggagcttggtgggttttggtcttgtctgcttcattttccttaaacatcaagcagacagtggtcagacccatgtttatttcagtcctcttcatgcgaccagagaattagaggacatcgaggaggatcatttccgcttgccacctcctcacaaggtgaatcctcgtgcagtgaaaaggaggggacctcgtaaacaaccaaaggttatagatgattatctggaggagtcttcagcagtacatgcactgttctttccagatcaaatgactgctgtggatccaacaaaaggaggaaatgatagcatgtatttctatcctggtagagtgtggctagacactgatggaaacaccattcaagcccatggtggggggattatgtatgatcacaagactgccagattctattggtatggagaaaacaaggatggaccaacataccaagctcgccccaaaggaacacagagggttgacatcattggggtaagctgctactcatcaaaagacctgtggtcgtggactcatgaaggaattgtgcttcgtggtgagccttctaatgtcatccatgacctttataaatcaaaggtgcttgagagacctaaggtgatatataatgatcgcactgaaaaatatatcatgtggatgcacatcgatgatgctaactacaccaaagcatctgtcggtgtggccgtgagtagctctccgactggaccttttacttacctttacagctttcgtccacatggttgtgagagtagagacatgacagtcttcaaagatgacgatggaatggcttacctcttctattcttctcgtgacaatactgagctccatgttagcccattgacagaggactaccttcagatcacagcagcaatgaagagaatactaataaggcggcatcgtgaggctccagccgtcttcaagcaccaggggacctactacatgatcacctctggttgctcaggctgggctcccaacagggcattggcacatgctgcagagtctatcatgggcccatgggagacactgggaaacccttgcgttggaggcaacaggttttaccgccttacaacattcttatctcaaagcacatttgtgcttcccctccctggtttgtctggtgcatttatcttcatggcggataggtggagtccgtcaaacttgagagactcccggtatgtgtggcttcctctattcgtcggagggctcgcagacgaacctttagattacagttttggtttccctctgtggtcaagggtgtcgatttattggcacaagaaatggcgcctcccagaagattggaagattgcaaacacagcaaatacataagatagctagctatacttgaaccgatagatcgttcataaacttgcttgaggattctaatcgcttgctcctcaagcttttgtacaaaacagtcatcctaaacatgcttcagtgatatatcttttttttggcgtgtgcatgtgtctgtaacttctcttggaaaaagaagtgtgtttcagataactgtattgataattggtatgaccatactctgtcgtttatgccaggacagcaaggtgcatcttgtc

SEQ ID NO: 13694 - DNA, 348 bp, Zea mays
  Clone ID: MRT4577_11247C.1
ttgtgtttttggtttttttttggttttggagggatacagaaaccaaacaacaatcacttttccagtgattcgtgtaaatacatcatgtggatcaaaatacatgctattgtactccgcacccccacccccacccccggtttgtcaactgacgcttgcacttctctgtagcattggcagctggctgatgaatgtaagaatcacacgacatgttaccttttatttaccatagcgattgctcgattagactatgaaattatcatttcttaacaatgtaacctaaaacaatgccaaggagcccaaacgctattaggagaaccaacgagaacgcgctttgctgtttcctggctt

SEQ ID NO: 13695 - DNA, 120 bp, Zea mays
  Clone ID: MRT4577_112480C.1
tgctgctcactcccacggtcccactcctcaggagcgtccatagtttaggtgctcagagagtcctaatggaggtggtaagttactatttcctcaatgttgttcatcaaagactctttcttt

SEQ ID NO: 13696 - DNA, 1972 bp, Zea mays
  Clone ID: MRT4577_112481C.1
ccggccgggcccgcaagaggagcttccctcctccctttcccccaaacgctcccctcctcttctctcgcgctgaactcgacctggcgtccgactccctcgcggccccgtcgcagggtgtcgtcatgggtgatggtgtcgtcgtccctgccacagtccgtcggggtcggcttgtcctcagatctcgcatgatttaggagcagcgacatcagatgttacggacgcgaggccatcaacgtcgccgccaccagcgcagatgtcggccccggcccggcggacccctccccggtggccctggctgttcttggctgatggcgatgcgggatctactggcatggagcacggacgtacagtgcaggacttaccggagatgtgctcatggagctgccatatgcgctttcatgcatggtttttatccattaaggggtaaacactaccatgagatgataaatccatttcgtgtacttacagatgtttcttatatccatgtgcttcaggtcaagaagcttatcaaggagaaaaagaatgatgctggaatttctgaatatatcgatataaataaagagcttcaagaggtttatggcacgatgattcatctcagagtttctgattcttatgttttgtcacaagggcaagacgacaagtcattttgctgctaaagtgttaatatgcaaactgtgtgtttgatcaagcgagaatttttccaccgtttttgtgtggcaattgggcgaccgccgccgccctaactcaggtgccgaggtcttcgccagtaacttcaacaggtcctcgcctggtccttctctggcgaggagcatctccgccaggtgcgaatcatggggaagtttatgcatgacaatccaatgctatcatgtagtgaagtaaacagacatcactatagtcttgcggcagttgctgtcggtttgggactaggagttgccgggttatgcaaggcattgtatagtggtctgtccataccatgggtttctccaaggaatttgttttcgggatcagggagggcatactatgttggaggtctgcgaaatcttggcaacaattgctttcttaatgtcatcctccaggcacttgccagctgtgatggttttatttcctttctagataatttgcttgcaactgatggcttgctacctgaagaaaaggctgtaagaatgcctcttcttcttgctttaagttctctcttggaagacttaagcatagttcgagatgaaaggactgtgttgaatccacatggactaatgcatgctttgagtttgtatgttggtcacttcaatctgaccagacagcaggatgcttcagaagcttttctccatcttctgatctcattgagggatgaatttgcccattgttatgtaccacataggagttctctggcagacatcaccctttctgactccaaagtatacaagcaaagggaaggtaacctgcctgaatgcaagcgctggaaacaaaacctatttggcccctttgatgggacagttggcagcatattgtcttgcagaaactgttcttctgtgctgtcattggacttcgagaatttccactgcttgcctctttcgccagtccttaatgcaaatggagatattaccagtgggtgtagcttggtggattgcctaaagtacttcactgtggtggagcatcttgacaactatcgttgtgaccggtgttggcacatcattgctgccaaatatctttctcttagatcagaagttgatgaggaaaaggttagcaagcttcaatcctgtgtcgactatggcacttgcagttgcagggatatgttccccctggagtcactgccatgttcatcatcttcacgagcaacaaagcagctgattatcagtcagtgcccgaagattctgtgcattcattttctacgcgctttagtcggtcttgacggcgagcccattatacattaggggccatatttcttttccttttgtttttaaatctgtccccgttt

SEQ ID NO: 13697 - DNA, 822 bp, Zea mays
  Clone ID: MRT4577_112482C.1
atgtcggccctgacccggcggatccctccccggtggccccagctgttcttagctgatggcgatgcgggacctactggcatggagcacagacgacttaccggagatgtgctcatggagcctgccatatgcactttcatgcatggttcttatccattaaggggtaaacactaccatgagatgataaatccatttcgtgtacttacagatgtttcttatatccatgtgtttcaggtcaagaagcttatcaaggagaaaaagaatgatgctggaatttctgaatatatcgatataaataaagagcttcaagaggtttatggcacgatgattcatctcagagtttctgattcttatgttttgtcacaagggcaagacgacaagcgagaatttttccaccgtttttacttaagcatagttcgagatgaaaggactatgttgaatccacatggagtaatgcatgctttgagtttgaatgttggtcacttcaatctgaccagacaacagctgtcattggacttcgagaatttccactgcttgcctcttttgccagtccttaatgcaaatggagatattaccagtgggtgtagcttggtggattgcctaaagtacttcactgtggtggagcatcttgacaactatcgttgtgaccggtgttggcacatcattgctgccaaatatctttctcttagatcagaagttgatgaggaaaagttgcagggatatgttccccctggagtcactgccatgttcatcatcttcacgagcaacaaagcagctgattatcagtcagtgcccgaaggtatccaaaatttaagtactcgttga

SEQ ID NO: 13698 - DNA, 1285 bp, Zea mays
  Clone ID: MRT4577_112483C.1
gatgattcaataagcagtgaagttgatgacatcgatattatccctaacgaggaaatgcttttgattcttagtgagaaaggctatgctaagcgaatgaaccccgacacattcagtttacaacatcggggaaccataggaaagtctgttggaaagatgcgaatgaatgacagcacgtcagatttcattgtttgccagccgcatgaccatgttctttatttcagtgacaagggaattgtatactcagcacgtgcttataagataccagaatgtactagaactgctactgggactccgttggtacagttgctacctttatctgatggagagcggataacctccatcattcctgtgagtgaatttggtgagaaccaatatctagtgatgctcaccgttaatggctatatcaagaaagtaccccttaatgccttttcatcaatcagatctactggtatcatatcaattcaactggttcctggtgatgagcttaagtgggtccgtcattgtggcaatgatgacctggttgcattggcttcacagaaaggaagggtaatagtcaactcatgtgataagcttcgtgcccttggaaggaataccaggggtgtctgtgccatgaagttaaaagagggcgatatgatggcagccatggacataattccagcaacggtgcacaaaatgcccgaaagatgcaacagcaggctcagagattcgagtcctccatggttgcttttcatagctgaaagcggtattgggaaacgggtgcccttaaatgctttccggcaatcaaatttcaatgctgtaggcttgcaaggctacaagcttccagcagattgtcgtttggccgctgtatttgttgctggtctttcgctcactgaagacggtgaaagtgacgagcaggttgttttggttagccagagtggcactgcaaacagaatcaaagttaaagatatatccgtccagtctcgacgctcgaggggagtgattctgatgaggctggagcatgccggaaagatccagtcagcatcactgatatccgcagcggcagcagaagtaactgaagattagtcttgcacccaagatgcaagtagtttagtctgaatttaatccctggcgtacgctgcagcatgaaatttgtctgctttcctgtggctagtaagcgtcaggaatcatgtaaaatcctacgccaaggagtagtcggtagctgatcatttggtggatcagaaactaaatactcactctaatcagaaaccaatgttgtcctgattgccggttaacccccccccccccc

SEQ ID NO: 13699 - DNA, 649 bp, Zea mays
  unsure (1)..(649): unsure at all n locations
  Clone ID: MRT4577_112484C.1
gtgtcggaattgggcgaccgccgccgccctaactcaggtgccgaggtcttcgccagtaacttcaacaggtcctcgcctggtccttctctggcgaggagcatctccgccagtactatcacatcaatgcccggacaatgatttctttgatttcatcctttggtaaattttcgtattaacaaattctatgaagactttctgctggctcaggtgcgatcatggggaagtttatgcatgacaatccaatgctatcatgtagtgaagtaaacagacatcactatagtcttgcggcagttgctgtcggtttgggactaggagttgccgggttatgcaaggcattgtatagtggtctgtccataccatgggtttctccaaggaatttgttttcgggatcagggagggcatactatgtgtggaggtctgcgaaatcttggcaacaattgctttcttaatgtcatcctccaggcacttgccagctgtgatgggtttatttcctttctagataacttgcttgcaactgatggcttgctacctgaagaaaaggctgtaagaatgcctcttcttcttgctntaagatctctcttggaagacttaagcatagttcgagatgaaaggactgtgttgaatccacatggagtaatgcatgctttga

SEQ ID NO: 13700 - DNA, 421 bp, Zea mays
  Clone ID: MRT4577_112485C.1
ctttattcatattgcaccccgccgcttgctcctctgttgtttgcccccgtgcaggattgctgggggttctggactgctaatactcaccgatgacgaattacgaggccgggctgcctgcctgcctgcctgctttatctgtgctccgttcgagggacggtcagaggagtcaatgagcggcccgtgggcttttgagaccccctgtggtctgctcttcttggctaggaaggaaacctgaacactaattgatctcttgcgccgttgcaacccccggcccgtttgaaccatggggaccggggactggtttaagactaatcattactaataaaaaatctaatcggtgaaaggcaaagcactcaaagttctctggttcagtaacaaaaggaggcacccagacaatttagaagcttgtacggcccttctt

SEQ ID NO: 13701 - DNA, 199 bp, Zea mays
  Clone ID: MRT4577_112486C.1
aatggacatgttgtacgatatgctgtcgatactacgtgtatccatagcctaagctctaaatgggaggcaagacttggtctatgaaaggatggatgcaagccctcactgtacaggtgacctagccctgtagatctctatatcttctcatatacaacagctgtcggtttcatgtgacgcctaaactaaaaaaaaatataaa

SEQ ID NO: 13702 - DNA, 372 bp, Zea mays
  Clone ID: MRT4577_112487C.1
aggacaaaaaacagggcccgatctttgattacaagggctccacagagggaagccaaagatgagaaaaagggaccctgagctttttggccattggagttaaaaaaaaagggggggttgggggggggcgatcctaaaacagggctcgacccaaacttattggggttcaaaaaaaaaccgaaaaccaacccggggaaaaatgctccaagacaacagggaacacccccaaacatgggttgagaaaagggaaaacgggccacccccttttgagcattggggggaggatagtcgcccgaaaggaagaactggggcggtaatcccttggggccaccccaaggattgaggtgtacttccggtctttgggggggaactttt

SEQ ID NO: 13703 - DNA, 421 bp, Zea mays
  Clone ID: MRT4577_112488C.1
agacgaattatattatatttgggggagatattgaatcattgagatacaataatacctctagcttagcaaagggtggattccttgattacaactaccagaatgcgggaacaggcaaaaaatactgtgcactatttataaacacaggacgcaggctgtgagggattacaaggatggcccttataaaagcttacaacattggctcagacctttatggactaaaaaggcattctatctttaagtccgtgtgtgatggcgaatcttcactaagaggaaccttcgggcatcttatacaaacaggtttaggcgaaaaccggttcttcctataagaccttccgcgacaaagcatagggccaacaacatttatatacaaatcattggatatttactataaaggttctgaattaaactaaacgtaaaaacc

SEQ ID NO: 13704 - DNA, 253 bp, Zea mays
  Clone ID: MRT4577_112489C.1
gaccattagctttatctactccagagcgcaaaaaaacccgatcgacaccatgaggggggggctcggtggccttgctcttctgggttttggttggagcgccaacttcacccataccaacggggggtggcggttgcaaccaaccgccgccggttaattttaccgccgccggggcattggcaacttcgggttaaccggcaacttcggggcattttccaccggcggtgcaactggcggcggcgggtcaactggcaac

SEQ ID NO: 13705 - DNA, 449 bp, Zea mays
  Clone ID: MRT4577_11248C.1
ccggccggggtcccgactcacgagtcacgacgcgcgcctatattcgttcacgtgcacatagtacgagtactgacctgatataggcatgaccatgatgggcggctgccggtacaccccttccggctccccgtcgccgaagtccggcggcagcacggccgcggcggcggcgtcctcgccggcggacgcgccgcagacgagcgcgtcgtacacctcgcggtcgaaggacgacggcagctgcctggcgcgccgctggtcgccgcgcatgtcccagaacgactcgtgctgcgcggcgccggcgccggcgccggcgatggccttcccctcccacgcgacgatcttcttcaggtcccacgacaggttgccccaccgcttccggcactgcatgggcccgcgctccactccgtggcgccggcagtaggccgacaccgccgcccacttgggccgcggcc

SEQ ID NO: 13706 - DNA, 268 bp, Zea mays
  Clone ID: MRT4577_112490C.1
ccgcacatcgcgcggtgtccggtgcgcacccggcagtcctagaatatcctgaggagcgcggttcgtacactcgcggtcgcactcataaccgcatatggctttcaaggagaacagcctctggccaatggaacaatgtaagcaagggaagtgcgtaaaacggatccgtaactacaggaaaaggattgtctctgagggttgagctccgtgatcccggtctactaacccgtctgctgctggcggaatgatcgagctgctcacgcgcaaatag

SEQ ID NO: 13707 - DNA, 630 bp, Zea mays
  Clone ID: MRT4577_112491C.1
ccggccgggataatttttcgctcttcaattttcctcgccctacgacgcgtgtgtgcaccttcggtcgccgctgtccccgcgtctatctatgattccgacatcgtcgagaggacatgccgcgcgaggggcgtaacgttccggttccggactcggagctccgctggcggaagcgccttgatctgcgtgactcctacagcaacgagaaagctctattgctataagaagaagtccatcgagatccacaagctcatcttcacccgcggaaagcagtacctcgaggattacaatgcccagaagaaggaactggtgcaccttaaccgagaggcccgtttgaagggggtgttctatgacggtactgaggacatagctgctctttgtgttctccatccggggtatgtaatgccatgcactctatcaacatgacacatcttgaagcttctgcgattgaggaagatcttcattggggtgtttctcaaagacaactacggttgtattaacatgctacagatgtacgagccatatgatgcatatggggacccaaacttgaacagtgtcaggtacttgatctacaagatgcgctatgctaaactgaacgagctgaggttctctctgtccgacaaccaagtcatc

SEQ ID NO: 13708 - DNA, 648 bp, Zea mays
  unsure (1)..(648): unsure at all n locations
  Clone ID: MRT4577_112492C.1
aattcggcacgagggcccaactccccaaatcattctccacgacgcctcttccatcaccgctctctacttctccttcgcctgcaagccagccagcctccattcgcgtggccgccaaaggcgccaaccgccggcgagctatgacaccatcggtctcctgcccggtcaagtgccgcccccacccctgccttgccccgcagccaccagcgccatcactggagcttctcgccgctcgcggcgccccgatcgccggcgatctgcgggcgtgccggagccctccgtacttgcctctctcgcgctctgccgactccttggaactccgggcggcgtgccgcggcgctccgcctgccaggcgagcccgtgctgccgtggcgctgggcggtgacggcccgtccgcggcgctgatagccggcgcacagtcgcgtcacgccatcttccgcgacgagctcgtgcggagagccttcagtgccgccgaagcggctcaccgcggccaggtgcgcgcgagcggcgacccgtacctacaacactgcgtggagacagcggcgctgctcgcggagctgggcgccggccctgccgtcgntgctgccggcctgctgcacgacacggtcgacgacgcgggcctgggctacggnttcatctccgagcatttcg

SEQ ID NO: 13709 - DNA, 307 bp, Zea mays
  Clone ID: MRT4577_112493C.1
cacttgacctgctcacctcgctgggattcaccttcgtgagtctacaaactgctctggccctttcttacagatgcttgtgcttatcgttgcctacatataccatttgctgccatcattatccgtaagccatggatcgagactgattttctgttagtttcttctccatgtccaccatctacttgatttgctgctattctcttcttgacattgtcccacgactcaagccctatcttgtgcttcagccttctatcacttgaggcctattctgcttctacatgtccttcttacaccctgcaacactaccgtt

SEQ ID NO: 13710 - DNA, 2131 bp, Zea mays
  Clone ID: MRT4577_112494C.1
gtttttactgctctgtagtagtaggctgtagactctgtactctctagtctctactcccccctctccgccttctctctctccgcaggcggtatcctcccttcctcggttcctctcctctcccccaccaaccccaccccagcgccccaaatgccgctccaaccctagcctcccgccacgcctttcgatctcgggcggccatgggcaactgctgccgctcgccggccgccgtcgcgcgggaggacgtcagctcctcgcacttccccgcatccaacgcgaagaagaagccgcaccaagcgcggaacggcggcggcggcggcgggcagaagcggctctcggttctgggcgacgaggggtgcgaggtcgtcgggatcgacgacaagtacgtcctggacagggagctcggccgcggggagttcggggtgacgtacctgtgtatggatcgggacaccaaggagctgctcgcctgcaagtccatctccaagcgcaagctgcggacggccgtcgacgtggaggacgtgcgccgggaggtggccatcatgcgccacctgcccaagagccccagcgtcgtgtccctgcgggaggcgtgcgaggacgacggcgccgtccacctcgtcatggagctctgcgagggcggcgagctcttcgaccgcatcgtcgcgcggggccactacaccgagcgcgccgccgccagtgtcacccgcaccatcctcgaggtcgtccagctctgccaccgccacggcgtcatccaccgcgacctcaagccggagaacttcctcttcgccaataagaaggagaactcgccgctcaaggccatcgacttcggtctctccatcttcttcaagcctggtgaaaagttttcagaaattgtgggaagcccctattacatggctcctgaagtattgaagagaaactatgggccagaaatagacatatggagtgcgggagttatcctgtatattttattatgtggagtccctccattttgggctgagactgaacaaggggtggcgcaggctattcttcgtggaaatatcgattttaagcgggaaccctggcctaatgtttcggaaaatgcaaaagatttagttcgacacatgttggagcctgatccaaagctcaggctaactgcaaagcaggttcttgaacatcattggcttcaaaatgcaaagaaggctcctaatgtccctcttggagatattgtaaagtcaaggctcaaacaattttctaggatgaatagattcaaaagaagggctctaagggtcattgctgatcatttgtctgctgaggaagttgaggatataaaggatatgttcaagactatggatactgacaatgatggaattgtatcttatgaagaactgaagactggaatagcaaagcttggttctcatcttgcggaatcagaagtacagatgctcattgaagctgtggacacaaacggtaggggggcactagactacggggaatttctggccgtctcgctccacctgcagaggatggcgaacgacgagcatctccggcgggccttcctgttcttcgacaaggacggcaacggtttcatcgagcccgaggagcttcgagaggctctggtggacgacggggcggccgacagcatggaggaagtggtgaacgacatactgcaagaagtcgacaccgacaaggacggcaagatcagctacgatggagtttgtggcgatgatgaagaccggcacggactggagaaaggcgtcccggcactactcgagagggaggttcaacagcctcagcatgaagcttataaaggacgggtcggtaaagctgggtgtcgagtgaaaaccgcaccgacgctcgttcatgtgtgtgtgtgtgtggtgtgtgtgcatgtagttttaggccccttgggccactaagcagaagaactctaggccttcttcttctttttttttttcgtcccctcgtgactgtcttgcgtggaaattttagataggtggaagtggcggacccctccgatttgtcttactttactacctgtgtaattagctatcccggtctcgctgacaggcactgggccaaacggtgtacctaatgctctccctcacccgttctcttgatggcagcccgagtgctgtacgatacagtgtgttttgcggtc

SEQ ID NO: 13711 - DNA, 469 bp, Zea mays
  unsure (1)..(469): unsure at all n locations
  Clone ID: MRT4577_112495C.1
cacccgaccgagccgnaccganccgagcgnccancangngggngacgncgangccgcaggngngggacgaggagggcgcggccaagggcggcgcggngaccccggcgccggccccnccaggcgaagcggggaacnnnnnnncnggcgggaaaaaaaaccccanccnccggcgccccgggngngcggcaccgcggggggcccgcccgngacggcgcccaggcccaggcnccgcgacggccgccaccccgccaaccgcgagagcggcgngccccggacccaggccaggggcgccgncgncancncccacggaaacaccggcncccgcgaggacagcgnacgcgccncccaagaagnngcggaggagcngggcgngnccaaggngggnnnngaccgcnccgggnacgggcagagcgaccccaaccccaacccggcccgnaagagcggcgggcnggaccgggaggagcccgcg

SEQ ID NO: 13712 - DNA, 1295 bp, Zea mays
  Clone ID: MRT4577_112496C.1
caggccccgatgccctgcctgcgttcctccacggcgccatttctcccagccggctccctcttcctcctcccctatttcttcctcaagtccacaggccgctccctctgctgtccagggcgcaggcgagcttcgctcgcccctgctctcccctggccggatcggcccctagctcgagcagggagctcgccttcccatgccaggcctcctctgcacagcgaccgccaccccctgcatcttcctcttgttggcgcccaacagcagcacatccccatcccctttctctgttcttgccatggccgagctcccagccggtcttcttccccaacgccggcctccatggtatgcacggctcccactcccatggcgccatgatgctctacgcagcgatgtcggtccaaaaacagcagccccgaatcccccgcatcgcgtgctcgctcgatctgcgcagtcccgacccgcgccgtcgcggtggtgtttgagacagccccatgcggcatcgtcgatctgcaccgcgcttgtgagttggcgtcaaaaaaatccttgctagatgttgccgcggcgtctcgcgcgatgcatgattcggtgaagcacctaaaccatggacgcatgcgcgactcgaatccgagatgacaggttgatggatttataatttactattgaggtgattcggttaatggcatgtatatagatatgatgtatattggtgattgaatatgcgtgactacgatagttcgtttacgtgttgtgagggtagttcgccgatatattacttgattgttaaaatgcttcgtcgtaaaatagtgtgtttgtgcggcaaagttaatgaagcgtaaagcatacttggtgggttccgcaatcggctaatgagttcgtctaagataattgtattttatgtattcatcgttggtgtaggttagagtagattgaaaatataaattatgcgacatgttattgtttgaagatgagatgtgcaaataatcagtttggtggttcactcgtctagtcgataattgttataaatatttgcgctaaaaattggtcataagagtgcagtgggcatgtggtgttggttggatgtgataagtagattagaagtgtgggtttgtcgaagcaccgtgatgtcgaacgtgtatatcgaagtgcattgtagtggtaattgcgttaagttaatcggtagtgtctcgagtgcacgccacaatatggttgtatgcgagacatagtaaaataaggggtgctcgatggggatgttcagttgttgtaggtggaaattgtctttgctttaatagagaggtggc

SEQ ID NO: 13713 - DNA, 232 bp, Zea mays
  Clone ID: MRT4577_112497C.1
agaattcatgtcactgggtaatattcttagttttcctgtatgctatttatgagcaaactgcaagaatcataactatagcattagattgggccttatttaaaaaaaaaatctctttaatattgtgacccatgcgctttttcacaatatgttttttttctggagataacactgcatatagttgaaaataagcaaacaagaatatttgaactcagtaagcatggaggaaacatac

SEQ ID NO: 13714 - DNA, 4443 bp, Zea mays
  Clone ID: MRT4577_112498C.1
atggaaaacccctggttgattaggatctcctattgctcagaggaggaaggcttccctcaccttcttcggagttgcgcgctacgcttggggatccgcaagaagcccgaatatgtctggaaggagtaccgtgaaaatggaatagaaaagtgctctatggcggtctacttaggagagagccagaactacccaaaccaccctcccttccaaattaccttcatcgggcacagtttcccagacacttgccagagcgttgctcgaaaagccctcaaacaactgtgccaaaactatagccgagagatctctgagacccccctccgatatttcccacccagcaacaaaaacacccccacctggaggaaaaggctccagtctctgtcaggaggagatcccacagaagatgaccccactatcgtatacatggccggatacctccacaccctcgacaaccactacgacgagctctcctcccactgcacccacctaaactcccgagtggaaagcctagagcagcaagtcaaagagcttaagcaagaaaaggcatccctccaggagagtctcaacatagcagaaggcgaggaagccaacactcgtgaggcctatcggaccttgaaaatggactatgacaagaagctaaagaaactcgcccccaagaagaaaatccagaagaagaccaccaaccaaggatgccagacagagaagaagaagaagaaggcccctctagccctacctccccccagaatagatgattggtctgacgacgaggatgtatccctagcaagcctcgatgatcttctcaaggcatttggggacaccctagataaggaattcgctacctggtgggacaccttcaacgtcaccatcagagatgctacctgggcggaatttgaagcagctttccgggagcaccatgtgccccaaggacttgtacaacttaaggaggacgagttccgagaattgactcaagacggaagatctgtcagcgaatatgtgcacaagttcacagaattagcccgctacgcgccagatgatgtcagtaccgagagcaagaagatggcccgtttcctgaaaggactcaggcctgaactcaagacaattctggctagccaagacttcctcaacttctctcacctttccaacaaggccatgcaagttgaaagggcaaaggaggaagaaaaagggcatcttaaaaggaagttccaggttctccgggcacagcagcaggaccggcaccagaagactcgatcatttgggtttccacccaaggggccaaacttcagtaggccagctggacccactccgtcgcgattcagccagcagagtcagagctcttttcattccccctcagtggcaagcaaccaacccccggcaaatgcatgttggcactgtggtgatcccagtcacttcaagaacaactgtccacagctgaaggtaccagtacccgcctactccaactcggtgaatggccccaagaatacctcgacatccacccccaaggcgccctccgccgtcagccagcagaacaaggctccgtaccaaggaagggcacgtgtaaatcacgtcgatgcccaggaagctcagcaggctccgggagtagtactcgaagaattaccaggaatgccaccagaaagagaagtggagttctacatagatctgatccctggaacagcacccatcgcaaaaagaccataccgcatggctccaaccgagttagcagaactgaagcttcaaatcgtagatcttcagcaaaaagggtacattcgtcccagctcatcaccttggggagcactagtcctgttcgtctctaagaaggatggaagcatgagaatgtgtattgattaccgatcgttaaatgaagttaccatcaagaacaagaatccacttcctcggattgacgacctcttcgatcagcttcaaggagccaagtatttctccaagatagacctaaggtctggttaccaccaattgaggatcaaggaagcagacatccaaaagacggcatttgtcacccgatacgggcaatatgaattcacagtgatgtcgttcggactgacaaacgcacccacctttttcatgaacctcatgaataaagtgtttatggaagagctagataagtttgtcgtagtcttcatcgacgacatccttatctactccaagagccgcgaagaccataagcgtcaccttcggatcgtccttggaaaactcagagcacaccaactttatgctaaactcagtaaatgtgaattctggttggaaaagatagccttccttgggcatatcttaaccgcagaagggatagaagtggacccttccaaggtggaagcagtatcaaaatggaggcagccaaccaacgtcagtgaagttcgaagcttcctaggaatggcagggtattaccgccgcttcatcaaaggattctccagcatagcaagaccgatgatagaacttctcaagaaagaccataaatttgcgtggacccaaaaatgtgaagggagtttccaggtcataaaggagaaacttacaacagcactcgttctatcactgccagatattcatcaagattttgtcgtcttctgtgatgcctcgaggcaaggcttagggtgcgtgctaatgcaaaacgagaaggtcattgcttacgcatcacgcctactcaagtcgcacgaacataattaccccacccatgatttggaattagcagccatagtgcatgccttgaagatatggaggcattacctaatcggaaacaaatgccacattttcaccgatcacaagagtctgaggtatatattcactcaaccagatctcaacctccgtcagcgaagatggttagagctgatcaaggattatgacctagaaattcactaccaccccgggaaggccaacgtggtagccgacgccctcagccgaaaaccattcggaataaaaggaaccaactttctagaagattggaagaaagaatcagcacaactaaatgcatgtctgggaaacaacgacagtctcgaagtcaaaccaatgctagaagacctcatctgcaaagctcaacgtctagactcagagacagcaaggcttgtggagaaagcccgcaaggaacaactcccggacctcaggacagatgaccaaggagtcctttggttcaaacaccgtctgtgtgtaccaaaaggggaggcccgagaagtcctactcaaggaagctcacgactcggcctactccatccacccaggaactaccaagatgtacctggacctcaaaaccagatactggtggaaagggatgaagaacgaaatagctcagtatgtggcccgatgtgacatctgccaacggacgaaggccgaacaccaaaaacctgcaggcctattacaaccccttctgatacctgaatggaagtgggaagaaataggcatggacttcgtaaccggactgccccggacgcaaaaagggaatgactccatctgggtaataatagatcgcctcaccaaggtagcccatttcatcccagtgaaaactacctttggaggagccacccttgcccggatttatctcaaggagatagtcagaccccatggcatcccaaggaagatagtgtcagacaggggaacccagttcacatccaaattctggacaagccttcagaaagctatgggcaccaaactagatttcagtaccgcttatcaccctcagacagatgggcagacagagagagtcaacaaagtccttgaagatctgttaagagcatgtgtgttagcttttgatagaagttgggaatccagtctaccctacgcagagttctcgtacaacaatagctatcaggccagcatcaagatgtcgccattcgaagcactgtatggacggaaatgccagacccctctcatgtggtccaacgtggggggaaaagcactggaaggacctgcctttgtcaaagaggcggaagagaaagttgcactgatccgcagaaggttacttgaagctcagagtcggcagaagagttacacagacaacaggcggagggaactccgatttgaggaaggagacttcgtctacctcaaggtttctccaatgcatggtgtcaggaggttccaagtaaaagggaagctagccccacgtttcgtaggtccctatcccatcattggcagggtaggacccgcagcataccgcctggaactaccagaatccatgtccgacatccacaatgtgtttcacgtatcccagctccgcaaatgcctgcaagcaccagaaagtcacctcgaagaagagacagtgcagattcagaaagaccttcagtaccgtgaaaaaccagtgaagattcttgattcagcagtcagaaagacccgcacctcagaagtaaagctctgtaaagttcagtggagcagagaaggagaagaggaagctacctgggagagtgaggacttcttgaggagggaatacccttatcttttcccaaatccagtctaa

SEQ ID NO: 13715 - DNA, 2793 bp, Zea mays
  Clone ID: MRT4577_112499C.1
atgggggacttcctaagactcaaacctcccacgttcgccggatcaagcaaccccctcgatgcagacgattggatgcacacgatcaaaaggaaactggaagccattggttgcccagaaaatcagcgtgttcaactggctgcccaccaactttctgggatggccttagcctggtgggacaccttcaacgtcaccatcagggatgctacctgggcggagtttgaagcagctttccgggagcaccatgtgccccaaggactggtacagcttaaggaggacaagttccgagaattgactcaagacggaaggtctgtcagcaattatgtgcacaagttcacaaagttagcccgctacgcgccagatgatgtcaatactgagagcaaaaagatggcccgtttcctgaagggactcaggccagaactcaaaacaattctggctagccaagacttcctcaacttctctcacctttccaacaaggccatgcaagttgaaagagctaaggaggaagaaaaaggacatctcaaaaggaagttccaggttctccgggcacagcagcaggaccgtcaccagaagactcgatcatttgggtttccacccaaggggcccaacttcggtagaccagctggacccactccatcacgattcagccagcagagtcagagctctttccattcttccttagtggcaagcaaccaacctctggcgaatgcatgttggcactgcggtgatccaagtcatttcaaaaacaactgtccgcagctgaagccaccaggaccctcctactccaactcggtgaatggccccaagaatacatcggcaaccgcccccaaggcgccctccgccgtcagccagcagaacaagactccgtaccaagggagggcacgtgtaaatcacgtcgatgcccaggaagctcagcaggctccgggagtagtactcggtgagtttcttgttgaatttactcccgctaccgtacttttcgattctggagcatcccactccttcatagccactagctttgtagaaaaatatggcattccctctactcctctagagattcctttggtcacccgaaccccagggtccgacctcctatgccagctaaaatgctcccaagtcagaatccttttaagtggggtagtttacctggcagacttaaccgtcttgccatccaaaggaattgatgtaatcctagggatagattggctaactaaacacaaaagcattatcagctgcgcagacaagacagtcctcctcaccgaccagcagggaaagtcagtctcttgccaggcacagccacccgccagtgacccaatgatgttctatctaacaacggaaagtatatcagtagtagaggaattcatggacgtatttccagaagaattgctaggaatgccaccagaaagagaagtggagttctacatagatctgattcctggaacagcacccatcgcgaagagaccataccgcatggctcctaccgagttagcagaactgaagcttcaaatctcagatcttcagcaaaaagggtacattcgtcccagctcatcaccttggggagcaccagtcttgttcgtctccaagaaggatggaagcatgagaatgtgtattgattaccgatcgttaaatgaagttaccatcaagaacaagtacccacttcctcggattgacgatctcttcgatcagcttcaaggagccaagtacttctccaagatagacctaaggtctggttaccaccaattgaggatcaaggaggcagacatccaaaagactgcattcgtcacccggtacgagcaatatgaattcacggtaatgtcgttcggactgacaaacgcacccgcctttttcatgaacctcatgaataaagtgtttatggaagagctagataagtttgtcgtagtcttcatcgacgacatccttatttactccaggaaccgtgaagaccataagcgtcaccttcggatcgtccttggaaaactcagagcacaccaactttatgctaaactcagtaaatatcacctcaccaaggtagcccatttcattcccgtgaaagctacctttggaggagccacccttgcccggatttacctcaaggagatagtcagactccatggcatcccaaggaagatagtgtcagacagaggaacccagttcacatccaaattctggacaagccttcagaaagccatgggcaccaagctagatttcagtaccgcttaccaccctcagacggatgggcagacagaaagggtcaacaaagtccttgaagatctattgagagcatacccctctcatgtggtccaacgtgggggaaaagcactagagggacctgcctttgtcaaagaggcggaagagaaagttgcactgatccgcagaaggttgcttgaagctcaaagtcggcagaagagttacgcagacaacaggcggagggaactccgatttgaggaaggagacttcgtctacctcaaggtttctccaatgcgtggtgtcaggaggttccaagtcaaagggaagctagccccacgttttgtaggtccctatcccatcattggcaagcttcgcaaatgcctgcaagcaccagaaagtcacctcgaagaagagacagtgcagattcagaaagatcttcaatatcgtgagaaaccagtgaagattcttgattcagcagtcagaaagacccgcacctcagaagtaaagctctgtaaagttcaatggagcagagaaggagaagaggaagccacctgggagagtgaggacttcttgaggaaggaatacccttatcttttcccaaatccagtctaa

SEQ ID NO: 13716 - DNA, 1724 bp, Zea mays
  Clone ID: MRT4577_11249C.1
ccggccgggctcctctgccggcccgcagcccgctcggcaacccgacgtcgtgacctctttgggcgaccgtgactcgagccgttggagatccacactttcctccctccatcgtttctcgatctctcgaccgggcgagggcgacgccgcccgcgcgcgcgccatggatgtggagtacgacgtgatcgtgctgggcaccgggctcaaggagtgcatcctcagcggcctcctctctgtggaccgcctcaaggtgttgcacatggacaggaatgactactacggcggagactccacatcgctcaatctcaatcagctctggaaacggttcaagggtgaagaaacaccgcctgcgcacataggagctagcagagactacaacgttgatatggttccaaagtttatgatggcaaatggtaccttggttcgtgtgctcattcatactggtgtcaccaagtacatgtccttcaaagctgtggatggaagctatgttttcaacaagggaaagatccacaaggttccttctactgacatggaagctctcaagtctcccctgatgggattgtttgagaagcgaagagctgggaaattcttcctttatgtccaagattataaggaaaatgacccaagtactcataagggttacaaccttactaaactaacgacaaaagaacttatctcaaaatatggtttggatgataatacgatagacttcattgggcatgcagtggctcttcatagagatgatagctacttgacagaacctgcaattgacactgtaaaacggatgaagctttatgcagaatcagtggctcgctttcaaggaggatcaccatatatttatcccttgtatggtttaggagaactgccacagggttttgcaagacttagcgctgtttatggtgggacctacatgttgagtaagccagagtgcaaggtcgaatttgatgatgaaggcaaagtttgtggtgttacctcagaaggggagactgcaaaatgcaaaaaggttgtctgtgatccttcctacctacctgacaaggttaaaaaaattggaaaagtttttcgggcaattgctatcatgagccatcccatcccaaatactgctgaatctcactcagtacagatcatattaccacagaagcaacttggccgcagatcagacatgtatgttttctgctgttcctactctcataatgtcgcatcaaaaggcaaattcatcgcattcgtgtcagcacaagcggagactgataatccagagaaggaactaaagccagggatcgatcttcttgggaaggtggacgagttatttatcgacatatatgacagatatgaacctaccaatgactcatcagcagacaattgtttcatctcaacaagttatgatgccacaacacactttgagtccactgttatggatgtactttccctttacacaaagatcaccggaaagactgttgatctcagcgtggatctaagcgctgctagtgctgctgaagatgatatgtgatacttatcgtagtgctatgtggcgtagtgtggaaaatatttaattaagctttgctttggcaacgattattaggttcacctttatttttccaattgttgttattagctgtgttgtgaccatgattaaagattgcatgctgtaaatttgaaggcatttttttttatcaaaagttgttaacgcggtgatccgtgtttagaaaaaaaaaaaaaaaaaagcggccgag

SEQ ID NO: 13717 - DNA, 372 bp, Zea mays
  Clone ID: MRT4577_1124C.1
cttaaacggtttgtccgtctctatttttttgacgaagacctgaccagatgcacaaaacatctttcgtatttcgaaattaacacttaacacccttatgacactttagctgctttgaatacataaagaaaaggacttgaccttgtcctactaacaaagaccaagaccttgcgcctcgaccatacacagggagaagaacttccccttgcccacctatgtaagaccatattatttggtgctggacgcaccaaagaaagaaatcacccttatcaactcccaggccaatctttagattgcgggtccgaacaaccacctggaatatttagccggccgcggactcaggaaaacctaaaccacacatgtgttctagaccct

SEQ ID NO: 13718 - DNA, 259 bp, Zea mays
  Clone ID: MRT4577_112500C.1
ctccacgcagaaaacccagccgccgccgcatcgggctcccatgtagtcaggagcgtccaccccaggcggcgccatgaagcgcaacccccgcgtcacgagctcccgccggaagtgccgcaagcgcacttcacggccccgtcctccgtcctgcgcgtgctcatgtccgcggcgctatcgacggagctccgccacaagtagaatgtgcgttccatcccgatccgcaaggacgacgaggtgctagtcgttcgcggcacctaca

SEQ ID NO: 13719 - DNA, 3786 bp, Zea mays
  Clone ID: MRT4577_112501C.1
atggccttagcctggtgggacaccttcaacgtcaccatcagagatgctacctgggcggaatttgaagcagctttccgggagcaccatgtgccccaaggattggtacagcttaaggaggacaagttccgagaattgactcaagacggaagatctgtcagcgaatatgtgcacaagttcacggagttagcccgctacgcgccagatgatgttaatactgagagcaagaagatggcccgtttcctcaagggactcaggccagaactcaagacgattctggctagccaagacttcctcaacttctctcacctttccaacaaggccgtgcaagttgaaagagctaaggaggaagaaaaaggacacctcaaaaggaagttccaggttctccgggcacaacagcaggaccggcaccagaagactcgatcatttgggtttccacccaaggggcccaacttcagtaggccagttggacccactccgtcacgattcagccagcagagtcagagctctttccattctccctcagtggcaagcaaccaaccaccggcaaatgcatgttggcactgcggtgatccaagtcacttcaagaacaactgtccgcagctgaagccacagggacccgcctactccaactcggtgaatggccccaagaatacctcggcacccgcccccaaggcgctctccgccgtcagccagcagaacaagactccgtaccaaggaagggcacgtgtaaatcacgtcgatgcccaggaagctcagcaggctccgggagtagtactcggtgagttccttgttgaatttactcccgctaccgtacttttcgattctggagcatcccactctttcatagccactagctttgtggaaaaatatggcattccctctactcccctagagattcctttggtcacccgaaccccggggtccgacctcttatgccagctaaaatgttcccaagttagaatccttttaagtggggtagtattcctggcagacttaaccgtcttgccatccaaggtaattgatgtaatcctagggatggattggctaactaaacacaaaggcatcatcagttgcacagacaagacagtcctcctcaccgaccagcagggaaagtcagtctcttgccaggcacagccacccgctagtgacccaatgatgttcagtataacaacggaaaatatatcagtagtagaagaattcatggatgtgtttcccgaagaattgccaggaatgccaccagaaagagaagtggagttctacatagatctgattcctggaacagcacccatcgcaaagagaccataccgcatggctccaactgagttagcagaactgaagcttcaaatctcagatcttcagcaaaaagggtacattcgtcccagctcatcaccttggggagcaccagtcctgtttgtctccaagaaggatggaagtatgagaatgtgtattgattaccgatcgttaaatgaagttaccatcaagaacaagtacccacttccacggattgacgacctcttcgatcagcttcaaggagccaagtacttctccaagatagacctaaggtctggttaccaccaattgaggatcaaggaagcggacattcaaaagactgcatttgtcacccggtacgggcaatatgaattcacagtaatgccgttcggacttacaaacgcacccgcctttttcatgaacctcatgaataaagtgtttatggatgagctagataagtttgtcgtagtcttcatcgacgacatccttatttactccaagaaccgcgaagaccataagcgtcacctttggatcgtccttgggaaactcagagcacaccaactttatgccaaactcagtaaatgtgaattctggttggaaaagatagccttccttgggcatatcttaaccgcagaaggaatagaagtggacccttccaaagtagaagcagtgtcaaaatggaggcaaccaaccaacgttagtgaagttcgaagcttcctaggaatggcagggtattaccgccgcttcatcaaaggattctccagcatcgcaaggccaatgacagaacttctcaagaaagaccataaatttgtgtggactccaaaatgtgaagaaagtttccaaatcataaaagagaaactcacaacggcacccgttctatcactgccagatattcatcaagattttgtcgtcttctgtgatgcctcgaggcaaggcttagggtgtgtgctaatgcagaacgagaaagtcattgcttacgcatcacgcctactcaagccgcacgagcagaattaccccacccatgatctggaattggcagccatagtgcatgccttaaagatatggaggcattacctaatcggaaacaaatgccatattttcaccgatcacaagagtctgaggtacatattcactcaacctgatctcaacctccgtcagcgaagatggttagaactgatcaaggattatgacctcgaaattcactatcaccctgggaagtccaatgtggtagctgacgctctcagtcgaaaaccattcggaataaaagggaccaaccttctagaagactggaagggagaatcagcacaactaaatgcatgtctgggaaacaacgacagtctcgaagtcaagccaacgctagaagacctcatctgcaaagctcaacatctagacccagagacggcaaggcttgtggggaaagcccgcaaggaacaactcccggacctcaggacagatgaccaaggagtcctttggttcaaacaccgtctgtgtgtaccaaaaggggaggcccgagagaaagggaatgactccatctgggtaataatagatcgcctcaccaaggtagcccatttcattccagtaaaaactacctttggaggagccacccttgcccgaatttacctcaaggagatagtcagactccatggcatcccaaggaagatagtatcagacagaggaacccagttcacatccaaattctggacaagccttcagaaagctatgggcaccaagctagatttcagtaccgcttatcaccctcagacagatgggcagacagagagagtcaacaaagtccttgaagatctcttaagagcatgtgtgttagcttttgatagaagttgggagtccagtctaccctacgcagagttctcctacaacaatagctatcagtccagcatcaagatgtcaccattcgaagcactgtatggacgaaaatgccagacccctctcatgtggtccaacgtgggggaaaaagcactagaaggacctgcctttgtcaaggaggcagaggagaaagttgcactgatccgcagaaggttgcttgaagctcagagtcgacagaagagttacgcagacaacaggcggagggaactccgatttgaggaaggagacttcgtctaccttaaggtttctccaatgcgtggtgtcaggaggttccaagtcaaagggaagctagccccacgttttgtaggtccctatcccatcattggcaaggtaggacccgccgcataccgcctggaactaccagaatccatgtccgacatccacaatgtgttccacgtgtcccagctccgcaaatgcctgcaagcatcagaaagtcacctcgaagaagagacagtgcagattcagaaagaccttcaatatcgtgagaaaccagtgaagattcttgactcggcagtcagaaagacctgcacctcggaagtaaagctctgtaaagttcagtggggcagagaaggagaagaggaagccacctgggagagtgaggacttcttgaggagggaatatgagagcacctag

SEQ ID NO: 13720 - DNA, 343 bp, Zea mays
  unsure (1)..(343): unsure at all n locations
  Clone ID: MRT4577_112502C.1
ctccccatcccttacccatggcgctctcttcccacgccaccaccgctgctgcggcggcggccgtcgacgcctttccccaatccactcgctcctcttcccggcgattccccgcgtcgtctgtctcccccagccccccgcccccgacgaccccacactcccaacccctccaccaagaacgagggccagaacacaaccccgccacaatacccgcgcccaacgcncacctcactgaagacatcgaaaaactaaaatgccagacaagatccatcgacaaacaaggaagccccccacgacgaaaaagaaccaccagaagacccaaccggagcaacgacactacactaaa

SEQ ID NO: 13721 - DNA, 5409 bp, Zea mays
  Clone ID: MRT4577_112503C.1
atgggcaagaacaacaagcgcaagcgtgagccaactcctccatcggaggagtttggtgacttggagtactcagaggaggagttctcctctgagtctgaggggtctccggctcccatccccctgcgtgagtcgtctgatgactcagacgactcccagggcctcgcggcggaggtctggacgtacatctgggccgtcgagcgctccgggctcgagggctcggatgagtcggagtactcctcggatgaggaggactcggacgacggtagcgaggacgaggaagacgacgacgacgacgacgacggtggcgacggtgacggtgacgacagcggcaggggcggcggcagcggcagcaaggacggtgatggcggcggcagcaggggcagcaaccggggcggcagcagcaggggcagcaccaggggcggcagcggcggcggcggtgtaacatcccaaaatcccaacccagtggaagagggatccgatcctccggaactcttagctccggaagaagggcaggaacccgacccctccgagattaaccttttgtgccaggaaagcttcgacgaaggcaagtccatccttcccttgatgcattatttatctatttctctctaccactgcctatgcctggattatgggatgggaatcgaattgcatgttctgcctgtggcctgggctattttatcttccactgcgatatatgttatttttcggctccctttcgagcttgtatccccgatggaaaacccctgggtgattaggacttcctattgctcagaggaggaaggctttcctcacctgcttcgaagctgcgcactacgcctggggatccgcaagaagcccgaatatgtctggaaggagtaccgtgaaaatggaatggaaaagtgctctatggcagtctacctgggagaaagccggaactacccaaaccaccctcctttccaaattaccatcatcgggcaccgcttcccagacacatgccagagcgttgctcgaaaagccctcaaacaactgtgccaaaactatagccgagagacctttgaaactcccctccgatatttcccacccagcaacaaaaacacccccacctggaagaaaagactccaggctctgtcaggaggagatcccatagaagatgatcccactatcgtctacatggccggatacctccacaccctcgacaaccactacgatgagctctcctcccattgtacccacctaaactcccgagtggaatgcctagagcagcaagtcaaagagcttacacaagagaaggtatcccttcagaagagtctcagcatagcggaaggcgaggaagccaacacccgtgaggcctaccgaaccttgaagtcagactttgacaagaagctgaaggcactcgcccccaaaaagaagatccaaaagaagaccactaaccaaggatgccagacagagaagaagaagaagaaggcccctctagccctacctccccccagaatcgatgactggtccgacgaagaagatgtatccctagccagcctcgatgatcttctcaaggcatttggggacaccttagacaaggaactcgctagcacctcgaagaacgccctcatggcttcggataaaaccacgcctaccgcctcagggattggagcaggtttcccccgaagagctgaaggggaagtcgttagagaggaaagtgaaacccacctccccgcacctccacccttacccttagacctagctcaagttctagccaatcagacccgactcatcgaggtcctcactcgaaatctggagaatcaacggccaaatggtggaagaccgcaagatagaatgggggacttcctaagactcaaacctcccacgttcgccggatcaagcaaccccctcgatgcagacgattggatgcgcacgatcaaaaggaagctggaagccattggttgcccagaaaaccagcgtgttcaactggctgcccatcaactctctggggtggccttagcctggtgggacaccttcaacgtcaccatcagagatgctacctgggcggaatttgaggcagctttccgggagcaccatgtgccccaaggattggtacagcttaaggaggacgagttccgagaattgactcaagacggaagatctgtcagcgaatatgtgcacaagttcacggagctagcccgctacgcgccagatgatgtcaatactgagagcaagaagatggctcgtttccttaagggactcaggccagaactcaagacaattctggctagccaagacttcctcaacttctctcacctttccaacaaagccatgcaagttgaaagagataaggaggaagaaaaagggcacctcaaaaggaagttccagctgaagccgcagggacccgcctactccaactcggtgaatggcccgaagaatacctcggcacccgcccccaaagcgccctccgccgtcagccagcagaacaagactccataccaaggaagggcacgtgtaaatcacgtcgatgcccaggaagctcagcaggctccgggagtagtactcggtgagttccttgttgaatttactcccgctaccgtacttttcgattctggagcatcccactctttcatagccactagctttgtggaaaaatatggcattccctctactcccctagagattcctttggtcacccgaaccccagggtccgacctcctatgccagctaaaatgttctcaggtcagaatccttttaagtggggtagtattcctggcagacttaaccgtcttgccatccaagggaattgatgtaatcctagggatggattggctaactaaacacaaaggcatcatcagttgcgcagacaagacagtcctcctcaccgaccagcagggagagtcagtctcttgccaggcacagccacccgccagtgacccaatgatgttcaatataacaacggaaaatatatcagtagtagaggaattcatggatgtgtttcccgaagaattgccaggaatgccaccagaaagagaagtggaattttacatagatctgattcctggaacagcacccatcgcaaagagaccataccgcatggccccaactgagttagcagaactgaagcttcaaatctcagatcttcagcaaaaaggatacattcgtcccagctcatcaccttggggagcaccagtcctgtttgtctccaagaaagatggaagcatgagaatgtgtattgattaccgatcgttaaatgaagttaccatcaagaacaaatacccactccctcggatcgacgacctcttcgatcagcttcaaggagccaagtacttctccaagatagacctgaggtctggataccatcaattgaggatcaaggaagcggacatccaaaagactgcatttgtcactcgtaaatgtgaattctggttggaaaagatagccttccttgggcatatcttaaccgcagaaggaatagaagtggacccctccaaagtagaagcagtgtcaaaatggaggcaaccaaccaacgtcagtgaagttcgaagcttcctaggaatggcagggtattaccgccgcttcatcaaaggattctccagcatagcaagaccaatgacagaacttctcaagaaagatcacaaatttgtgtggaccccaaaatgtgaagaaagtttccaaatcataaaaaagaaactcacaacgacacccgttctatcactgccagatattcatcaagattttgtcgtcttctgtgatgcttcgaggcaaggcttagggtgtgtactaatgcagaacgagagagtcattgcttacgcatcacgcctactcaagccgcatgagcagaattaccccacccatgatctggaattggcagccatagtgcatgccttaaagatatggatgcattacctaatcggaaacaaatgccatattttcaccgatcacaagagtctgaggtacatattcactcaacctgatctcaacctccgtcagcgaagatggttagagctgatcaaggattatgacctagaaatccactatcaccccgggaaggccaatgtggtagccgacgctctcagtcgaaagccattcggaataaaagggactaactttctagaagactggaaggaagaatcggcacaactaaatgcctgtctgggaaacaacgacagtctcgaagtcaagccaatgctagaagacatcatctacaaagctcaacatctagacccagagacggcaaggcttgtggagaaagcccgcaaggaacaactcccggatctcaggacagatgaccaaggagtcctttggttcaaacaccgtctatgtgtaccaaaaggggaggcccgagaagtcctactcaaggaagctcacgactcggcctactccatccaccccggaactaccaagatgtacctggacctcaagaccagatactggtggaaggggatgaagaaagaaatagctcagtatgtggcccgatgtgacatctgccaacggacgaaggccgaacaccaaaaacctgctggcctactgcaacccctcccgatacctgaatggaagtgggaagaaataggcatggacttcgtgaccggactaccccggacgcagaaagggaatgactccatctgggtaataatagatcgcctcaccaaggtagcccatttcattccagtgaaaactacctttggaggagccacccttgcccggatctacctcaaggagatagtcagactccatggcatcccaaggaagatagtatcagacagaggaacccagttcacatccaaattctggacaagccttcagaaagctatgggcaccaagctagatttcagcaccgcgtaccaccctcagacagatgggcagacagaaaggtccaacgtgggggaaaaagcactagaaggacctgcttttgtcaaggaggcagaggagaaagttgcactgatccgcagaaggttgcttgaagctcagagtcgacagaagagttacacagataacaggcggagggaactccgatttgaggaaggagacttcgtctaccttaaggtttctccaatgcgtggggtcagaaggttccaagtcaaagggaagctagccccacgttttgtaggtccctatcccatcattggcaaggtaggacccgccgcataccgcctggaactaccagaatccatgtccgacatccacaatgtgttccacgtatcccagctccgcaagtgcctgcaagcaccagaaagtcacctcgaagaagaaacagtgcagattcagaaagatcttcaatatcgtgagaaaccagtgaagattcttgattcagcagtcagaaagacccgcacctcagaagtgaagctctgtaaagttcagtggagcagagaaggagaagaggaagccacctgggagagtgaggacttcttgaggagggaatacgcttaccttttcccaaatccagtctaa

SEQ ID NO: 13722 - DNA, 794 bp, Zea mays
  unsure (1)..(794): unsure at all n locations
  Clone ID: MRT4577_112504C.1
tatttagccccagtggactgctatagtaactacatacccagtgtagcggtacgggggagatggccagcggtactggtattggtactggcaatggcaatggcggatctgtcctgggggtggtcgccgcgtgcatgtgcgcgtgcctgatcctctccgtccctgccgccgacgcgcagctcaaggtcgggtactacgacgcgacgtgccccgacgccgagtccctcatcaccaccatcgtccacgcctccgtccgcatggacgccggcaacggccccggcctcgtccgcctcttcttccacgactgcttcgtcaggggctgcgacgcgtcggtgctgctggacgacccgacgggcagcccgggcaaccggacggtggagaagacggcggcgcccaacttccccagcctccggggcttcggcgtcatcgaccgcgccaagcgcgtcgtggagtgccgctgcccgggcgtcgtctcctgcgccgacatcgtcgccttcgccgcccgcgacgcctcccgcatcatgggcggcataatcttcgccatgccctccggccgcctcgacggccgcgtctccaacgccaccgaggcgctcgccaacctgccccccgccaacttcaacctcacccagctcatcacccgcttcgcgtccaagaacctcaccgccgacgagatggtcacgctctccggcgcccactccatcggncgctcccactgctcctccttctccagccgcctctacccgcagatcgaccccacgctcaacaacacgctcgccaagggcctccgcgccggcaag

SEQ ID NO: 13723 - DNA, 2177 bp, Zea mays
  Clone ID: MRT4577_112505C.1
tcgcctctgcctccgcgggctgggactccctcctgtcttgctcactcctcgctcccaactgccaccctgtttcccttctcccctgccccgccgttcccactccgcacccgcgcgccgcggcagcttagcttgccgcgagccctgccctgccctgccctaccacccggcgccatcctgacctgtgtgtgctacggcgaggcagcaggagctcgcgctcagctcggtaggttgatgagctagcgacgacggccagtccgcccgaggcagcgtcgcgtaggggcgggcgaggcgtctcaacggcaatgagggtgtacatcacggcgacggcgacggcgggcgaaggcgacgcgacgaagcccaaggcgccgccgccgcatcagcagcagcagcagcaggcgcggcgcgggtgccgctcggccgccgccacggggctcctcgccggtctgctcctcttccgcgccgcgctgctcgccatcgaggccggcgcctccctctgcccttccacggcggcagggtgcctggactggcgagcggggctggggcgatggctctacggcgacggcggcgacgcgacggaggaatttatggaggaatggaggcgtcgcagcagggaagccaccctgctggaccctgtggtggtggaagcggcgccggactccatggacgcgctcttggcggagatggccaccatgctggcgtcctacgaccgggttgacgtggaagccgtggcgatcaagatgatggccatgctgtcgaagatggaccggaaggtaaagtcgtcacggacgcgggcgctgctgaaccggcacctggcctcgctgggcgtccccaagagcgcgcactgcctcgcgctgcggctggccgaggagttcgcggtgaacgcggcggcgcgctcgcccgtgccgccgccggagcacgcaccgcgcctcaccgacgcctcgcgcctccacgtggcgctcgtgaccgacaacgtgctcgcggcggccgtcgcggtggcgtccgccgcgcggagcgccgccgacccggccaggctggtgctccacgtgctcacggacaggaagagctacgtgcccatgcactcgtggttcgcgctgcaccccgtggagcccgcggtcgtcgaggtcaggggcctgcaccagctcgcctggcgcgacgccggcgccgtcgcctccgtcatgcggacggtcgaggaggtccggaggagctcgctggattggtatcgacgacagtgcggtggtgggtcgtcggcggaggagaccaggcccagcgcgttctcgctcctcaactacctcaagatccatctcccggagctcttccctgagcttggcagggtggtgcttctggacgacgacgtcgtggtgcgcgaggacttggcagggctgtgggagcaggacctcgacgggaacgtcatcggcgcggtcggcgctcacgaaggcggcggcgtttgcgtcgacaagaccctcggcgaccacctgaatttctccgaccctgacgtgtccggctccggcccactacacagctcgcgatgcgcgtggtcgtggggcgtcaacgtcgtcgacctcgacgcgtggcgacggacgaacttgccaggagcaagcgagcagttcgtggcagatggcctcgctgctaccggcggcggctctgagtctgacatttcgtcgcgtggtcatgtgcagaaccgggagtcgggcttcaggctgtggcagatggcctcgctgccgccggccctgctcgcgttcgacgggcgcgtccaggcgatcgacccgcggtggaacctgccgggcctgggctggcgcgtgccgcaccccgacctcgtgcggctctccgccgtcctgcacttcagcgggccacggaagccgtggctggaggtcgcgttcccggagctgcggcagctgtggctcgcccacttgaacgcgtcggacagtttcttacagggatgcggtgtggtcgaatggcagtagatggggtcacggacgggaacagcagagcatcagagttgggaggagacgtacagtgatttggtccaggtccaggtccaggtcttcaggatcacggattttaactggggccgccgggagagggaagtaggtgttgcctgcagtctcttcctggccttcgggttctacacgcagtccacatccacattaatctgtacaactgctcgtggtttttcttaa

SEQ ID NO: 13724 - DNA, 237 bp, Zea mays
  Clone ID: MRT4577_112506C.1
tttttttttttactaatcatactctttatataataaattttatgtatacatgaattctttttgaaagttgtggagccgtgaacttcaaccaacggcaaaaagcagttgtttacatttgtttggttgcagactttaaccaaccgcaaaaaacatctgcaaaacacaagaacgctgcccacttcatacttttacttgggaaggaaaactaatggaggcacggatgctgtttgcaccaac

SEQ ID NO: 13725 - DNA, 4155 bp, Zea mays
  Clone ID: MRT4577_112507C.1
atgggggacttcctgagactcaaacctcccacgttcgccggatcaagcaaccccctcgatgcagacgattggatgcgcacgatcaaaaagaagttggaagccattggttgcccagaaaatcagcgtgttcaactggctgcccaccaactctctgggatggccttagcctggtgggacaccttcaacgtcaccatcagagatgctacctgggcggaatttgaagcagctttccgggagcaccatgtgccccaaggattggtacagcttaaggaggacgagttccgagatttgactcaagacggaagatctgtcagcgaatatgtgcacaagttcacggagtcagcccgctacgcgccagatgatgtcaatattgagagcaagaagatggcccgtttccttaagggactcaggccagagctcaagacaattctggctagccaagacttcctcaacttctctcacctttccaacaaggccatgcaagttgaaagagctaaggaggaagaaaaaggacatctcaaaaggaagttccaggttctccgggcacaacagcaggaccggcacccgaagactcaatcatttgggtttccacccaaggggcccaacttcagtaggccagctggacccactccgtcacgattcagccagcagagtcagagctctttccattctccctcggtggcaagcaaccaacctccggcaaatgcatgttggcactacggtgatccaagtcacttcaagaacaactgtccgcagctgaagccacagggacccgcctactccaactcagtaaatggccccaagaatacctcggcacccgcccccaaggcgccctccgccgtcagccagcagaacaagactccgtaccaaggaagggcacgtgtaaatcacatcgatgcccaggaagctcagcaggctccgggagtagtactcggtgagttcctcgttgaatttactcccgctaccgtacttttcgattctggagcatcccactctttcatagccactagctttgtggaaaaatatggcattccctctactcccctagagattcctttggtcacccgaaccccagggtccgacctcctatgccagctaaaatgttcccaagtcagaatccttttaagtggggtagtattcctggcagacttaaccgtcttgccatccaagggaattgatgtaatcctagggatggattggctaactaaacacaaaggcatcatcagttgcgcagacaagacagtcctcctcaccgaccagcagggaaagtcagtctcttgccaggcacagccacccgccagtgacccaatgatgttcaatataacaacggaaagtatatcagtagtggaagaattcgtggacgtatttccagaagaattgccagggatgccaccagaaagagaagtggagttttacatagatctgattcctggaacagcacccatcgcaaagagaccataccgcatggctccaaccgactcatcaccttggggagcaccagtcctgtttgtctccaagaaggatggaagcatgagaatgtgtattgattaccgatcgttaaatgaggttaccatcaagaacaagtacccacttcctcggattgacgacctcttcgatcagctccaaggagccaagtacttctccaagatagacctgaggtctggctaccaccaattgaggatcaaggaagcgaacatccaaaagactgcatttgtcacccggtacgggcaatatgaattcacagtaatgccgttcggactgacaaacgcacccgcctttttcatgaacctcatgaataaagtgtttatggaagagctagataagtttgtcgtagtcttcatcgacgacatccttatttactcaaagaaccgcgaagaccataagcgtcaccttcggatcgtccttggaaaactcagagcacaccaactttatgccaaactcagtaaatgtgaattctggttggaaaagatagccttccttgggcatatcttaaccgcagaagggatagaagtggacccttccaaagtagaagcagtgtcaaaatggaggcaaccaaccaacgtcactgaagttcgaagcttcctaggaatggcagggtattaccgccgcttcatcaaaggattctccagcatagcaagaccaatgacagaacttctcaagaaagaccacaaatttgtgtggacccaaaaatgtgaaggaagtttccaaatcataaaggagaagcttacaacggcacccgttctatcactgccagatattcatcaagattttgtcgtcttctgtgatgcctcaaggcaaggcttagggtgtgtgctaatgcagaacgagaaagtcattgcttacgcatcacgcctactcaagccgcacgagcagaattaccccacccatgatctggaattggcagccatagtgcatgccttaaagatatggaggcattacctaatcgaaaataaatgccatattttcaccgatcacaagagtctgaggtacatattcactcaacctgatctcaacctccgtcagcgaagatggttagagctgatcaaggattatgacctcgaaattcactatcaccccgggaaggccaatgtggtagccgacgctctcagtcgaaaaccattcggaataaaagggaccaactttttagaagactggaaggaagaatcgacacaactaaatgcatgtctaggaaacaacgacagtctcgaagtcaagccaatgctagaagacctcatctgcaaagctcaacatctagacccagagacggcaaggcttgtggagaaagcccgcaaggaacaactcccggacctcaggacagataaccaaggagtcctttggttcaaacatcgtctgtgtgtaccaaaaggggaggcccgagaagtcctactcaaggaagctcacgactcggcctactccatccaccccggaactaccaagatgtacctggacctcaagaccagatactggtggaaggggatgaagaaagaaatagctcagtacgtggcccgatgtgacatctgccaacgaacaaaggccgaacaccaaaaacctcctggcctattacaaccccttccgatacctgaatggaagtgggaagaaataggcatggatttcgtaaccggactaccccggacgcaaaaagggaatgattccatctgggtaataatagaccgcctcaccaaggtagcccatttcattccagtgaaaactacctttggaggagccacccttgcccggatctacctcaaagagatattcagactccacggcatcccaaggaaaatagtgtcagacagaggaacccaattcacatccaaattctggacaagccttcagaaagctatgggcaccaagctagatttcagcaccgcgtaccaccctcagacagatgggcagacagaaagggtcaacaaagtccttgaagatctgttaagagcatgtgttttagcttttgatagaagttgggagtccagtctaccctacgcagagttctcctacaacaatagctatcagtccagcatcaagatgtcaccattcgaagcactgtatggacgaaaatgccaggcccctctcatgtggtccaacgtgggggaaaaagcactagaaggacctgcctttgtcaaggaggcagaggagaaagttgcactgatccgcagaaggttgcttgaagctcagagtcgacagaagagttacgcagacaacaggcggagggaactccgatttgaggaaggagacttcgtctacctgaaggtttctccaatgcgtggtgtcaggaggttccaagtcaaagggaagctagccccacgttttgtaggtccctatcccattattggcaaggtaggacccgcagcataccgcctggaactaccagaatccatgtccgacatccacaatgtgttccacgtatcccagctccgcaaatgcctgcaagcaccagaaagtcacctcgaagaagagacagtgcagattcagaaagatcttcaatatcgtgagaaaccagtgaagattcttgattcagcagtcagaaagacccgcacctcagaagtaaagctctgtaaagttcagtggagcagagaaggagaagaggaagccacctgggagagtgaggacttcttgaggagggaatacccttatcttttcccaaatccagtctaa

SEQ ID NO: 13726 - DNA, 2901 bp, Zea mays
  Clone ID: MRT4577_112508C.1
ttagaccgaatttgggaaaagataagggtattccctcctcaagaagtcctcactctcccaggtggcttcctcttctccttctctgctccactgaactttacagagctttacttctgaggtgcgggtctttctgactgctgaatcaagaatcttcactggtttctcacgatattgaaggtctttctgaatctgcattgtctcttcttcgaggtgactttctggtgcttgcaggcatttgcggagctgggacacgtggaacacattgtggatgtcggacatggattctggtagtttcaggcggtatgttgttgcgggtcctaccctgccaatgatgggatagggacctacgaaacgtggggctagcttccctttgacttggaacctcctgacaccacgcattggagaaaccttaaggtagaccaagtctccttcctcaaatcggagttccctccgcctgttgtctgcgtaactcttctgccgactttgagcttcaagcaaccttctgcggatcagtgcaactttctcttccgcctctttgacaaaggcaggtccttctagtgcttttcccccacgttggaccacatgagaggggtatgctcttaacagatcttcaaggactttgttgactctctctgtctgcccatctgtctgagggtggtaagcggtactgaaatctagcttggtgcccatggctttctgaaggcttgtccagaatttggatgtgaactgggttcctctgtctgacactatcttccttgggatgccgtggagtctcactatctccttgaggtaaatccgggcaagggtggctcctccaaaggtagttttcactggaatgaaatgggctaccttggtgaggcggtctattattacccagatggagtcattccctttctgtgtccggggcagtccggttacgaagtccatgcctatttcttcccacttccattcaggtatcgggaggggttgtaataggccagcaggtttttggtgctcggccttcgtccgttgacagatgtcacatcgggccacatactgagctatttctttcttcatccccttccaccagtatctggtcttgaggtccaggtacatcttggtagatccggggtggatggagtaggctgagtcgtgagcttccttgagcaggacttctcgggcctccccttttggtacacacagacggtgtttgaaccaaaggactccttggtcatctgtcctgaggtccgggagttgttccttacgggctttctccacaagccttgctgtctctgagtctagacattgagctttgctgatgaggtcttctagcattggcttgacttcgagactgtcgttgtttcctagacatgcatttagttgtgctgattcttccttccagtcttctagaaagttggtcccttttattccaaatggctttcgactgagggcgccggctaccacgttggccttcccggggtgatagtgaatttctaggtcataatccttgatcagctctaaccatcttcgctgacggaggttgacatcaggttgagtaaatatatacctcagactcttgtgatcggtgaaaatgtggcatttgtttccgattaggtaatgtctccatatctttaaggcatgcactatggctgccaattccaaatcatgggtggggtaattctgctcgtgcggcttgagtaggcgtgatgcgtaagcaatgactttctcgttttgcattagcacacaccctaagccttgcctcgaggcatcacagaagacgacaaaatcttgatgaatatctggcagtgatagaacgggtgccgttgtgagtttctcctttatgatttggagacttccttcacattttggggtccacacaaatttgtgatctttcttgagaagttctgacattggtcttgctatgctggagaatcctttgatgaagcggcggtaataccctgccattcctaggaagcttcgaacttcactaacgttggttggttgcctccattttgacactgcttctactttggaagggtccacttctatcccttctgcggttaagatatgcccaaggaaggctatcttttccaaccagaattcacatttactgagtttggcataaagttggtgtgctctgagttttccaaggacgatccgaaggtgacgcttatggtcttcgcggttcttggagtaaataaggatgtcgtcgatgaagactacgacaaacttatctagctcttccataaacactttattcatgaggttcatgaaaaaggcgggtgcgtttgtcaatccgaacggcattaccgtgaactcatattgcccgtaccgggtgacgaatgcagtcttttggatgtctgcctccttgatcctcaattggtggtaaccagaccttaggtctatcttggagaagtacttggctccttgaagctgatcgaagaggtcgtcaatccgaggaagtggatacttgttcttgatggtaacttcatttaacgatcggtaatcaatacacattctcatgcttccatccttcttggagacaaacaggactggtgctccccaaggtgatgagctaggacgaatgtaccctttttgctgaagatctgagatttgaagcttcagttctgctaactcggtcggagccatgcggtatggcctctttgcgatgggtgctgttccaggaatcagatctatgtagaactccacttctctttctggtggcattcctggcaattcttctggaaacacgtccatgaattcttctactactgatatactttccgttgttagattgaacatcatcgggtcactggcgggtggctgtgcctggcaagagactgactttccctgctggtcggtgaggaggactgtcttgtctgcgcaactgatgatgtctttgtgtttagttagccaatccat

SEQ ID NO: 13727 - DNA, 400 bp, Zea mays
  unsure (1)..(400): unsure at all n locations
  Clone ID: MRT4577_112509C.1
cgggcgggnnncagaccngcgccaagtttcagcccgggncccgcggggacgaggagcgggacgccaagaccnncgcggcagggggggnggannaccncaagnacgacaaccgcaacaacggcgaccngaagccgcnggagaggnacccggagangagcagagcacngangaaggnggggcggccgacccacngcggacgcagcgaanggggcgacangcacccggcgacgaggggcgcgacccacggcaacagcnggaggaccaccaacgacancgccgacaccngggacagcangaacgccacggcggaccagaacgaggngnggncggagaacgcgcgccccggcggaaggaacgaaccggacangcnggaggngggcaacgggggcangaccaacag

SEQ ID NO: 13728 - DNA, 302 bp, Zea mays
  unsure (1)..(302): unsure at all n locations
  Clone ID: MRT4577_11250C.1
gcgcgacgatgggatccctagttaataacatcatggncgagggcgccgtcctagcagcgctcgtagccggcgggtcgagcgggcccccgatagtgtcacccggccccctcatcaccagcaagtacatcggaaagaggctcaccgttagggcctgctggtgcggccagccctacaatgccggggctactgacaacagcggcgcgtgcggcatcaagaacgtgaacctgccaccctacagaggcatgacggcgggctacaacgagccgatcttctaagacggcaagggctgcggctcatgctac

SEQ ID NO: 13729 - DNA, 5094 bp, Zea mays
  Clone ID: MRT4577_112510C.1
tcagactggatttgggaaaagataagggtattccctcctcaagaagtcctcactctcccaggtggcttcctcttctccttctctgctccactgaactttacagagctttacttctgaggtgcgggtctttctgattgctgaatcaagaaccttcactggtttttcacgatactgaaggtctttctgaatctgcaccgtctcttcttcgaggtgactttctggtgcttgcaggcatttgcggagctgggatacgtggaacacattgtggatgtcagacatggattctggtagttccaggcggtatgctgcgggtcctaccctgccaatgatgggatagggacctacaaaacgtggggctagcttccctttgacttggaacctcctgacaccacgcattggagaaaccttgaggtagacgaagtctccttcctcaaatctgagttccctccgtctgttgtctgcgtaactcttctgccgactttgagcttcaagcaaccttctgcggatcagtgcaactttctcttccgcctctttgacaaaggcaggtccttctagtgcttttcccccacgttggaccacatgagaggggtatgctcttaacagatcttcaaggactttgttgactctctctgtctgcccatctgtctgagggtgataagcggtactgaaatctagcttggtgcccatagctttctgaaggcttgtccagaatttggatgtgaactgggttcctctgtctgatactatctttcttgggatgccatggagtctgactatctccttgaggtaaatccgggcaagggtggctcctccaaaggtagttttcactggaatgaaatgggctaccttggtgaggcggtctattattacccagatggaatcattccctttttgcgtctggggcaatccggtgacgaagtccatgcctatttcttcccacttccattcaggtattgggaggggttgtaataggcctgcaggtttttggtgttcggccttcgtccgttggcagatgtcacatcgggccacatactgagctatttctttcttcatccccttccaccagtatctggtcttgaggtccaggtacatcttggtagtcccggggtggatggagtaggccgagtcgtgagcttccttgagtaggacttctcgggcttccccttttggtacacacagacggtgtttgaaccaaaggactccttggtcatctgtcctgaggtccgggagttgttccttgcgggccttctccacaagccttgctgtctctgagtctagacgttgagctttgccgatgaggtcttctagcattggtttgacttcgagactgtcgttgattcccagacatgcatttagttgtgctgattctttcttccaatcttccagaaagttggttccctttattccgaatggttttcgactgagggcgtcggctaccacgttggccttcccggggtgatagtgaatttctaggtcataatccttgatcagttctaaccatcttcgctgacggaggttgagatcaggttgagtgaatatatacctcagactcttgtgatcggtgaaaatgtggcatttgtttccgattaggtaatgcctccatatcttcaaggcatgcactatggctgccaattccaaatcatgggtggggtaattctgttcgtgcggcttgagtaggcgtgatgcgtaagcaatgactttctcgttttgcattagcacacaccctaagccttgcctcgaggcatcacagaagacgacaaaatcttgatgaatatctggcagtgatagaacgggtgccgttgtaagtttctcctttatgatttggaaacttccttcacattttggggtccacacaaatttatggtctttcttgagaagttctgtcattggtcttgctatgctggagaatcctttgatgaagcggcggtaataccctgccattcctaggaagcttcgaacttcactgacgttggttggttgcctccattttgatactgcttctactttggaagggtccacttctatcccttctgcggttaagatatggccaaggaaggctatcttttccaaccagaattcacatttactgagtttagcataaagttggtgtgctctgagttttccaaggacgatccgaaggtgacgcttgtggtcttcacggttcttggagtaaataaggatgtcgtcgatgaagactacgacaaacttatctagctcttccataaacactttattcatgaggttcatgaaaaaggcgggtgcgtttgtcagtccgaacgacattactgtgaattcatattgcccgtaccgggtgacaaatgcagtcttttggatgtccgcttccttgatcctcaattggtggtaaccagaccttaggtctatcttggagaagtacttggctccttgaagctgatcgaagaggtcgtcaatccgaggaagtggatacttgttcttgatggtaacttcatttaacgatcggtaatcaatacacattctcatgcttccatccttcttagagacgaacaggactggcgctccccaaggtgatgagctgggacgaatgtaccctttttgctgaagatctgcgatttgaagcttcaattctgctaactcggttggagccatgcggtatggtctctttgcgatgggtgctgttccaggaatcagatctatgtagaactccacttctctttctggtggcattcctgacaattcttctggaaacacgtccatgaattcttctactactgatatactttccgttattagattgaacatcattaggtcactggcgggtggctgtgcctggcaagagactgactttccctgctggtcggtgaggaggactgtcttgtctgcgcaactgataatgcctttgtgtttagctagccaatccatccctaagattacatcaattcctttggatggcaagacggttaagtctgccaggaatactaccccacttaaaaggattctgacttgggagcattttagctggcatagaaggtcggaccctggggttcgggtgaccaagggaatctctagaggagtagagggaatgccatatttttccacaaagctagtggctatgaaagagtgggatgctccagaatcgaaaagtacggtagcgggagtaaattcaacaaggaactcaccgagtactactcccggagcctgctgagcttcctgggcatcgacgtgatttacacgtgcccttccttggtacggagtcttgttctgctggctgacgacggagggcgccttgggggcggatgccgaggtattcttggggccattcaccgagttggagtaggcgggtcccggtggcttcagctgcggacagttgttctttaagtgacttggatcaccgcagtgccaacatgcatttgccgggggttggttgcttgccactgagggggaatggaaagagctctgactctgctggctgaatcgcgacggagtgggtccagctggtctactgaagttgggccctttgggtggaaacccaaatgatcgagtcttctggtgccggtcctgctgctgtgcccggagaacctggaacttccttttgagatgtcctttttcttcctccttagccctttcaacttgcatggccttgttggaaaggtgagagaagttgaggaagtcttggctagccagaattgtcttgagttctggcctgagtcccttcaggaaacgggccatcttcttgctctcggtactgacatcatctggcgcgtagcgggctaactccatgaacagtccttggggcacatggtgctcccggaaggctgcttcaaattctgcccaggtagcatccctgatggtgacgttgaaggtgtcccaccaggctagggccatcccagaaagttggtgggcagctagttgaacacgctgattttctgggcaaccaatggcttccagtttccttttgatcgtgcgcatccaatcgtctgcatcgagggggttgcttgatccggcgaacgtgggaggtttaagtctcaggaagtcccccattttgtcttgcggtcttccaccattcggccgttgattttccagatttcgagtgaggacctcgatgagtcgggtctgattggctagaacttgggctaggtctaagggtaggggtggaggtgcggggaggtgggtttcactttcttctctaacgacttccccttcagctcttcgaggaaaacctgctccaatcccagaggcggtaggcgtggttttatccgaagccatgagagcgttcttcgaggtactagcgagttccttgtctaaggtgtccccaaatgccttgagaagatcatcgaggctggctagggatacatcttcttcgtcggaccagtcatctattctggggggaggtagggctagaggggccttcttcttcttcttctctgtctggcatccctggttagtggtcttcttctggatcttctttctgggggcgagtgtctttagcttcttgtcaaagtctatcttcaaggtccgataggcctcacgggtgttggcttcctcgccttctactatgctgagactctcctggagagatgccttctcttgcttaagctctttgacttgctgctctaggctttccactcgggagtttaggtgggtacagtgggaggagagctcatcgtagtggttgtcgagggtgtggaggtatccggccatgtagacgatagtgggatcatcttctatgggatctcctcctgacagagcctggagtcttttcttccaggtgggggtgtttttgttgctgggtgggaaatatcggaggggggtctcaaagatctcgcggctatagttttggcacagttgtttgagggcttttcgagcaacgctctggcatgtgtctgggaagcggtgcccgatgaaggtaatttggaagggagggtggtttgggtagttccggctttctcccaagtagaccgccatagagcacttttccattccattttcacggtactccttccagacatattcgggcttcttgcggatccccaagcgtagcgcgcaactccgaagaaggtgaggaaagccttcctcctctgagcaataggaagtcctaatcacccaagggttttccat

SEQ ID NO: 13730 - DNA, 323 bp, Zea mays
  Clone ID: MRT4577_112511C.1
ctggtacgactgggtttacaagccaaaggcgttttttcacggagagacggctctaaaatttttttacaaatacaccccttaaacaccttaagagtctccacattaaacatcattgtacatgcccttagaaggcaaatcctgcattatgatcccattaacaacgcacgatggacaaacgaacgggcacttaccgtaatttccgtgagaaatcatgcatgcatacatgcatatgagtagtaaaaatagtacagtaaaagctaagcgaaaacgcacaagaaacataagccacgacgagaggcagcaggacgttggtgacgcgtcca

SEQ ID NO: 13731 - DNA, 660 bp, Zea mays
  Clone ID: MRT4577_112512C.1
gctgggatacgtgaaacacattgtggatgtcggacatggattccggtaattccagacggtatgctgcgggtcctaccctgccaatgatgggatagggatctacgaaacgcggggctagcttcccttttacctggaacctcctgacaccaagcattggagaaaccttgaggtagacgaagtctccttcctcaaatcggagttccctccgcctgttgcctgcataactcttctgccgactctgagcttcgagtaaccttctgcggatcagtgcaaccttctcttccgcctctttgacaaaggcaggtccttctagtgctttttcccccacgttggaccacatgagaggggtctggcatttccgtccatacagtgcttcgaatggcgacatcttgatgctggcctgatagctattgttgtatgagaactctgcgtagggtagactggactcccaacttctatcaaaagctaacacacatgctcttaacagatcttcaaagactttgttgactctctctgtctgcccatctgtctgagggtggtaagcggtactgaaatctagcttggtgcccatggctttctgaaggcttgtcagaatttggatgtgaactgagttcctctgtctatactatcttccttgggatgccatggagtctgactatc

SEQ ID NO: 13732 - DNA, 545 bp, Zea mays
  Clone ID: MRT4577_112513C.1
aatgctggacgcccgcgggcccgacccgaacgacaggccggccgagcgagcgtttgtgttatgacaaggctgcaaacctcctagaagctcgaggataggctctacaagctgtcggtgtggctcgtgaacccgcagcggaatccgttcgcgcgcgtgcaccggaacgccagagactgccgccttcgaggatacaggctcaggtatgacgacctgtacggattcacatcacgagggtctaaatcagagaagcactggcgcggtgaacaagatatgtggatgactcgctcaaccagcgatgcaaaacggtcatggcacgcatgatgacacacagaagactgccgagaagcattccaactccaacatcgacattcatgctctcaatcatagacagtatcctcgcattgatacacgggacttcttgccacttaccaccggagggaaatctggtatggctggctaggatcctcctggacatggtgatgtgtgtcccactctgaataacaccggaaaactagacatcgcatagtctcaaggcaaggagtatg

SEQ ID NO: 13733 - DNA, 5533 bp, Zea mays
  Clone ID: MRT4577_112514C.1
caagagcagagagagagagagggggggggcgctgacgggcggggtcgggctgtcagcgggcgggagtggcgcgcggtttgggccgcctgggccgaaaggagaggggagggtggctggtgcgcgcgagctgggctggaagccggcccagccgagggagggaaggattttccttttctttttcttattctatttccttttctttttcttttctccttttgtgtctttttgctcctttttctcttaaccaaaaattctctaaatgaacttggtgataaatatggtctatgtgaggtgcttcaaatcattttaagtatatgcaaatgattgggtgacctaggggtagggttagggaggagaataaaacaaaagggggggaaattagggggggttagggtttcaaacctgggttgggaatttgggatgttacaaacctacccacttaaaggaatctcgccctcgagatttagactggatttgggaaaaggtaagggtattccctcctcaagaagtcctcactctcccaggtggcttcctcttctccttctctgctccactgaactttacagagctttacttctgaggtgcgggtctttctaactgctaaatcaagaatctttactggtttctcatgatattgaaggtctttctgaatctgcactgtctcttcttcgaggtgactttctggtgcttgcaggcatttgcggagctgggacacgtggaacacattgtggatgtcggacatggattctggtagttccaggcggtatgcggcgggtcctaccttgccaatgatgggatagggacctacaaaacatggggctagcttccctttgacttggaacctcctgacaccacgcattggagaaaccttaaggtagacgaagtctccttcctcaaatcggagttccctccgcctgttgtccgcgtaactcttctgtcgactctgagcttcaagcaaccttctgcggatcagtgcaactttctcttctgcctctttgacaaaggcaggtccttctagtgctttttcccccacgttggaccacatgagaggggtcctttctgtctgcccatctgtctgagggtggtacgcggtgctgaaatctagcttggtgcccatagctttctgcaggcttgtccagaatttggatgtgaactgggttcctctgtctgacactatcttccttgggatgccgtggagtttgactatctctttgaggtagatccgggcaagggtggctcctccaaaggtagttttcactgggatgaaatgggctaccttggtgaggcggtctattattacccagatggaatcattccctttttgcgtccggggtagtccggttacgaaatccatgcctatctcttcccatttccattcaggtatcgggaggggttgtaataggccagcaggtttttggtgttcgacttttgttcgttggcagatatcacatcgggccacatactgagctatttctttcttcatccccttccaccagtatctggtcttgaggtccaggtacatcttggtagttccggggtggatggagtaggccgagtcgtgagcttccttgagtaggacttctcgggcctccccttttggtacacacagacggtgtttgaaccaaacgactccttggttatctgtcctgaggtccgggagttgttccttgcgggctttctccacaagccttgccgtctctgggtctagatgttgagctttgcggatgaggttttctagcattggcttgacttcgatactgtcgttgtttcctagacatgcatttagttgtgctgattcttccttccagtcttctagaaagttggtcccttttattccgaatggttttcgactgagggcgtcggctaccacgttggccttcccggggtgatagtgaatttcgaggtcataatccttgatcagctctaaccatcttcgctgacggaggttgagatccggttgagtgaatatgtacctcagactcttgtgatcggtgaaaatatggcatttgtttccgattaggtaatgcctccatatctttaaggcatgcactatggctgccaattccagatcatgggtggggtaattctgctcgtgcggcttgagtaggcgtgatgcgtaagcaatgactttctcgttctgcattagcacacaccctaagccttgccttgaggcatcacagaagacgacaaaatcttgatgaatatctggcagtgatagaacgggtgccgttgtgagtttctcttttatgatttggaaactttcttcacattttggggtccacacaaatttatggtctttcttgagaagttctgtcattggcctcgcgatgctggagaatcctttgatgaagcggcggtaataccctaccattcctaggaagcttcgaacttcactgacgttggttggttgcctccattttgacactgcttctactttggaggggtccacttctattccttctgcggttaagatatgcccaaggaaggctatcttttccaaccagaattcacatttactgagtttggcataaagttggtgtgctctgagttttccaaggacgatccgaaggtgacgcttatggtcttcgcggttcttggagtaaataaggatgtcgtcgatgaagactacgacaaacttatctagctcttccataaacactttattcatgaggttcatgaagaaggcgggtgcgtttgtcagtccgaacagcattactgtgaattcatattgcccgtaccgggtgacaaatgcagtcttttggatgtccgcttccttgatcctcaattggtggtaaccagacctcaggtctatcttggagaagtacttggctccttgaagctgatcgaagaggtcgtcaatccgaggaagtgggtacttgttcttgatggtaacctcatttaacgatcggtaatcaatacacattctcatgcttccatctttcttggagacaaacaggactggtgccccccaaggtgatgagctgggacgaatgtaccccttttgctgaagatctgagatttgaagttttagttctgctaactcagttggagccatgcggtatggtctctttgcgatgggtgctgttccaggaatcagatctatgtaaaactccacttctctttctggtggcattcctggcaattcttctggaaatacgtccatgaattcttccactactgatatatttccctgctggtcggtgaggaggactgtctcatctgcgcaactgatgatgcctttgtgtttagttagccaatccatccctaggattacatcaattcccttggatggcaagacggttaagtctgccaggaatactaccccacttaaaaggattctgacttgggaacattttagctggcataggaggtcgaaccccggggttcgggtgaccaaaggaatctctaggggagtagagggaatgccatgcttttccacaaagctagtggctatgaaagagtgggatgctccagaatcaaaaagtacggtagcgggagtaaattcaacaaggaactcaccgagtactactcccggagcctgctgagcttcctgggcatcgacgtgatttacacgtgcccttccttggtacggagtcttgttctgctggctgacggcggagggcgccttgggggcgggtgccgaggtattcttggggccattcatcgagttggagtaggcgggtccctgtggcttcagctgcggacagttgttcttgaagtgacttggatcaccgcagtgccaacatgcatttaccggaggttggttgcttgccactgagggagaatggaaagagctctgactctgctggctgaatcttgacggagtgggtccagctggtctactgaagttgggccccttgggtggaaacccaaatgatcgagtcttctggtgccggtcctgttgctgagctcggaggacttggaatttcctctttaggtgacccttttcttcttcccttgccctttccacttgtatggctttgtttgagaggtgcgagaagctgaggaagtcttggctagctaggatggtcttgagttctggtctgagccatttcaagaagcgggccatcttcttggcctctgagatgacatcatctggcgcgtagcgggataattctgtgaatttgtgcacgtactcgctgatggatcttccgtcttgagtcaattctcggaactcgtcctccttaagctgtaccaatccttggggcacatggtgctcccggaaagctgcttcaaattccgcccaggtagcatctctgatggtgatgttgaaagtgtcccaccaggctaaggccatcccagagagttggtgggcagccagttgaacacgctgattttctgggcaactgatggcttccagcttccttttgatcgtgcgcatccaatcgtctgcatcgagggggttgcttgatccggcgaacgtgggaggtttgagtctcaggaagtcccccattctgtcttgcggtcttccaccatttggccgttgattttccagattttgagtgaggacctcgatgagtcgggtctgattggctagaacttgggctatgtctaagggtaggggtggaggtgcggggaggtgggtttcactttcctctctatcgacttccccttcagctcttcgggggaaaccctgctccaatccctggggcggtaggcttggttttatccgaagccatgagggcgttcttcgaggtgctagcgagttccttgtctaaggtgtccccaaatgccttgagaagatcatcgaggctggctagggatacatcttgttcgtcggaccagtcatcgattctggggggaggtagggctagaggggccttcttcttcttcttctctgtctggcacccttggttagtggtcttgttctggatcttctttttgggggcgagtgcctttagcttcttgtcaaagtctgtcttcaaggtccgataggcctcacgggtgttggcttcatcgccttccactatgctgagactctcctggagagatgccttctcttgcttaagctctttgacttgctgctctaggctttccactcgggagtttaggtgggtacaatgggaggagagctcatcgtagtggttgtcgagggtgtggaggtatccggccatgtagacgatagtgggatcatcttctatgggatctcctccctgacagagcctggagtcttttcttccaggttggggtgtttttgttgctgggtggaaaatatcggaggggggtctcaaagatctctcggctatagttttggcacagttgtttgagggcttttcgagcaacgctctggcatgtgtctgggaagcggtacccgatgaaggtaatttggaaaggagggtggtttgggtagttccggctttctcccaagtagatcgccatagagcactttttcattccattctcacggtactctttccagacatattcgggcttcttgcggatccccaagcgcagtgcgcagcttcgcaagaaggtgaggaaagccttcctcctctgagcaataggaagtcctaatcacccagaggttttccat

SEQ ID NO: 13734 - DNA, 336 bp, Zea mays
  unsure (1)..(336): unsure at all n locations
  Clone ID: MRT4577_112515C.1
gcgacttaatactcaccaactattaccgacactttatttttataacaacacaaaggtcatccccttcgctggtttaataagacacctggcccggaaaccttacaaccataacaaagagctaacctcttgccctgcaaagcaacaagctaacgcgaccaacngtgtgcagccttcaacatgcaccacatcacatgacagatcatcccgtaacgccacatcaaaactcgtcttttgctctgacggtaaccgaacctaaacggcacctctaaaggcagcatatgagcccaagaaagaacacccaaaattcgcagcattcacaggaaagaaatactcact

SEQ ID NO: 13735 - DNA, 314 bp, Zea mays
  Clone ID: MRT4577_112516C.1
gcgctatctgttggataaattggttagacatagtagggggagttatttctcttgtaaatagcaggcgtgttgtgggtcgacctccaaatccttgttaccggtttattgctctatggcggcattagggaagactctttcctcttgtttactttgttgtatgatgatattaggatgaatggcgcttggatggatatgtagttgcatagtgtgattagagttaggtttataacactagattacgcgaggtgaatgtatttgtggttatgaagccgcatttcttgcattgatgtgattgcgataatatgtatgaagtg

SEQ ID NO: 13736 - DNA, 393 bp, Zea mays
  unsure (1)..(393): unsure at all n locations
  Clone ID: MRT4577_112517C.1
caaaccccccagggcaaacaaagaccagaccanaccgggaggcaaaaaccaaanaccggncgcagcacaacccaggngccacaccagggacagtttttttccgaggctggggacaacacanaaacccaagcaggcacttttatttcccaccccangaggccgggcgggggccccaaacaaaggggcgcccccgaagcacccccccccgcggggaagcaaaagacgggcccacagaccgagcccgagnccccggaggcccccgccccgggccaggaaacggaggacgcaaggggcggcgcggacgacgcgcgcccaggaggccccgaagaagaagngcgaccccaaccgccngcccgcacccacccgcccgggccgcccgggagccagcccaca

SEQ ID NO: 13737 - DNA, 325 bp, Zea mays
  Clone ID: MRT4577_112518C.1
tcaagtgggtacactggtttagacatgacatgacgattgtacatatggttactaggtagatatcgtgccacgtgtttagtagatgaagctagtgtacgcagttgtctgcctgaacactgtgtacggatcagaagcatacaggatgctagaggttagtaatgtcgggagagcgacagcaagtgatgacagctaggcttcgcctctgtgtcgtgacagatctgcgactacagagctcaagttccataatgcgctgagctaacttgggcagatggaggtttcacatggacggaacacgagctcaataaaggtagtgttgagatggatc

SEQ ID NO: 13738 - DNA, 197 bp, Zea mays
  Clone ID: MRT4577_112519C.1
atccaaatcagataagcggaagtgcgtagtgtggatcggttcacagaacagcatggcgaggggcatggctttcgtcttgtgccttgctttgttaacttgcatggcctctgcaatgcaaatgcccttgcccctgcccggggctggaaggcttggactgtactgggcccgggcctaccacaatgataggatccgggggg

SEQ ID NO: 13739 - DNA, 398 bp, Zea mays
  unsure (1)..(398): unsure at all n locations
  Clone ID: MRT4577_11251C.1
acaagcatttgtatcgtaatgttgggcgtcatcagtgctgccctggggacatactcctccgtgaaaaagattgtagaaaactactaagctcttcgacaataattgcctgcctgcaccagactccacgtatggaactcgaaatgttgaggcatctatatatacggcgacgactactgtacaatcagagtacaccttatgtacagtcaggatcagctagcactatattcttagaacttggtcgagtgcagcgaggatgcatgttcgttggccttttatggtgccaccatggtcgaagccatagcctgagcatgataatggcgccatgcactgttgtcttgtatcatatgcgctgttctatctcaagttcnttttgaaggaagcaagcttgatttgtttgt

SEQ ID NO: 13740 - DNA, 218 bp, Zea mays
  Clone ID: MRT4577_112520C.1
tctttcctgttcttccggttttcccttccttgtcaaccccggaaccactaactgggccgggtttccgaggggcaattccgatccgttgatgggttccaccccttgaagccgcttgccttaggtgatggccaagccgggtaacaagacttgcgtggactgagcgcagcgtaacccgtactgggcgagcgtctcctatggggtgtccatgggcctcgagt

SEQ ID NO: 13741 - DNA, 707 bp, Zea mays
  Clone ID: MRT4577_112521C.1
cattgggtacctcgaggccggccgggaaaaacattctcacctgatcttgtgaagcgtggccatgagagctctgccggtgagctcgttcatgagctccacgtcatggagctcaccacaaccaatgcgaccgagggtagccccaccatcctagatatgttatgggaaggcatacgaggggggccacgaacagtccctgattcgaagcatgactacggggcatgcacttctcgcagggccggccgaagaaggacgccgagctgctgtactaggacaacgcacgccaccaaaggcggagggaggatgacgagggagcaccacggagaacgtaagctgaacattgccggcacctaccacgatttcttcctcttatatgttgtaagccgacggccaataggtggaggagggatgccgtcgacatcatgtgcgacatctgcaagaaagtcccaccgcgacacccaaggctggttgacaagctaggaggatacgctctccacgcgtgcctggagaaccccataccgacgaattttttgggcaaaatcttcgccggatgaactatgctgcgtccgtctaaagcgctgtctcgatcgctcgtggatagagagtacaatatatacgctactgatgttgtcgtgttcactggggacatgattgtgcacgattttccaaatgtattggaatgtactgatgaacatcaacgggtgccatct

SEQ ID NO: 13742 - DNA, 739 bp, Zea mays
  unsure (1)..(739): unsure at all n locations
  Clone ID: MRT4577_112522C.1
actacctccctctctcgacctcgacccctcgaccagaaagccccgcaagtcagcggaatcccgcttcctcggtaggcttccaagagccaacccgacagcttccgagcgagtacggcgccggtgacgatgtcgtcgcacagtcgcacacacgcaaggcggtcctcctctgcaactacatactcctgggcggctcctccagctgaatcttcctcacgctgtcgatgtgcctgctgccgtccccgagaggtctgctcctgctcttgctccacgccctcaccgccgtgttctccgcggtcgactggtcggtgtccttcacggtgcccgacacgaccgcgcaaaggaacaacagcgcacaccgagaggagccgcgctcaccggcatcttccagggcgccatcgcgctgctctggatcacccgcacactacgacttcctcgccgagctccagtcctacgaccgagacgaggacagagccgacatccgcaagattggtcgagagggctcggaaccaccgtcatctgtcctctagatggtgcgaagccagcgcgtagactgctaccttcgcctgcgacgagaatgacgaaccacgacgacctccgtgtcaatatctgtgaatcgtaccatgcctgacccaatccactgctggcctgagctccttcaagatgagactctttgatgcctattcgatgattgnactatcgctggcattcttctggactacagcgtactgctatgcctgat

SEQ ID NO: 13743 - DNA, 144 bp, Zea mays
  Clone ID: MRT4577_112523C.1
ggataacttccatgcaattcacggggaaacaaattcaaatctttttacaaccaaacaatggataaagttgcattttggcagcaaaataaggtacatcgtattaagctgggagtccagcggaatcacttgtgtaacgccaatgcc

SEQ ID NO: 13744 - DNA, 307 bp, Zea mays
  Clone ID: MRT4577_112524C.1
aacaacaaaaccttttaggggctcatttatgaaaatatagccttggctggcaaaaattttcaaaccaagaccgtttctattcctttccgccaactttgtgaggagcagtgttgaactttgtttgaagggaataattgatacccaaaagggttttcccccgggggggggtaaaatgtaaaaaaggggggcaaacatcactgtttttcaataaaaattggccactcacatgtcaggcatttgtttcatggtctgcaacttggggttggggattttaatcttcccaaggtgaagctttgttccacatttt

SEQ ID NO: 13745 - DNA, 271 bp, Zea mays
  Clone ID: MRT4577_112525C.1
ataagaatggtcatttctaactcgtggatttattgaatccctgcaactgtggcaatcaaatattacctttggagcacacaaaactgattgcaacctatgaacagaagtaaagggcttccttgcaacttactacacgcttaaaatggaacacaagttagaaatgaccatttgatgatgaataagaatgaatgtctgccttgtgctattggatatggataccaataacagacacattgtcatgtatgctggtttaatcccataacaatgaaac

SEQ ID NO: 13746 - DNA, 474 bp, Zea mays
  Clone ID: MRT4577_112526C.1
cgcgttcgcctgcatttatctccatgcctcagccgccgccacaccatttggccgcatggccgagcgcagagcgccttgacgcatccactaccactctctacgtgtcaatttgatccggcacgcgccgtccaggctacaccgccctgacaccaaggccacgaagaaggagctgctggatacattcgatgcggccaagaaggcagccgatgctacaacggcgggggagggcgattcattagaggttgaccgctgcctcgacacgttgcggtagctacgacgcgtcaacaccgacatcctcgcctccacgcagttaagtggtcgtctgtctcggttagattgaccggttgttttggtggtggagaaatccacccttgtcgtgttgttcattcccgaccgatgcgtgcggcgtcggtaatctcactatggccttgtcgcattgaatttgggtctactatagatatgccttatcgatct

SEQ ID NO: 13747 - DNA, 2235 bp, Zea mays
  Clone ID: MRT4577_112527C.1
ggatcgttggcgcctctgtatatcgttccgtcctcgcattggggacctcgaggccggccgggaccaccagagcagcaactagcaagccagccagccagccagccattgccgaccggagcgatggctaccatggcgaggtcaggtgccgtgaagctctgctgctgcacctccgctcttcttctgctctgctgcttcctcctcccaggcgccctcgccgaggagcgcttctacgagttcgtcgtccgggggacgccagtgaagaggctgtgcaagacccaggagatcatcacggtgaacgggcagttcccggggccgacgatcgaggtgtacagcggcgacacgctggcggtcagggccgtgaacctggccaggtacaacgtgaccctccactggcacggcctccggcagctgcggaacgggtgggcggacgggccggagttcgtgacgcagtgccccatccgccccggcggcagctacacgtaccgcttcaccgtcgaggggcaggagggcacgctgtggtggcacgcgcacagctcctggctccgcgccaccgtgcacggcgcgctcatcatccaccccaggaggggcgtcccctaccctttccccaagccacacaccgaggcccccgtcatcctagcggagtggtggaggagggaccccatcgccgtgctccgccagtccatgatcaccggcgcgccacccaacgtctccgacgccctcctcatcaacggccagccgggagacttgctcccgtgctccagccaagagacgagcatcatcccggtggtcgccggcgagacgagcctgctgcgcatcatcaacgcggccatgaacaccgagctcttcgtcagcctcgccggccacaggatgaccgtggtcgccgcggacgccatgtacaccaagcccttcgagaccgacgtcgtcctcctcggccccggccagaccaccgacgtcctcgtcactgcccacgcagccccgggacgatactacctcgccgcgcgcgcctacgcttcggcccagggcgttcccttcgacaacaccaccgccaccgccatcttccagtacaagaacgcccccggctgccccaccacctccggggcaggggctggagccggtgccggtgccggcagcaccttcagcggcccagtaggccggtcctctaggtcctccggctacctcggccgcgcagggccgcagccgatgctcccgttcctgccggcgttcaacgacacgaacacggcgaccgccttctcgaacaggctccggagcccagtgccggtgaaggtgcccggcccggtgacccaggaggtgttcaccaccgtggggttcgggctcttcaactgccgccccggcccgttctgccagggccccaacaacacccggttcggcgcgagcatgaacaacgtgtcgttccagctccccgacaccgtctccctgctgcaggcgcactaccaccacatccccggcgtgttcaccgacgacttcccggcgctcccgcccgtgttcttcgacttcacctcgcagaacgtcccgcgcgcgctgtggcagcccgtcaagggcacccgcctgtaccgcgtcaggtacggcgccgtggtgcagatcgtgttccaggacacgggcatcttcgccgccgaggagcaccccatgcacatccacggctaccacttctacgtgctggccacggggttcggcaactacgacccgcgccgcgacgccgccaggttcaacctggtggacccgcccagccgcaacaccatcggagtgcccgtcggcggctgggccgtcgtgcgcttcgtggccgacaaccccggggtgtggctcgtgcactgccacatcgacgcgcacctcacgggagggctcgccatggctctgctggtggaggacggcgagtccgagctcgaggccaccgtggcgccgccgctcgacttgcccatctgcgtgctgtagagatttttcagtttgttgctggcgtgcgtcactacgtggagttacagggaggctgtgtcctgtgtgcatcgttctgtgtgtttgcatcggtagttgggcatttgcattcttggatttccatttgaatttgcaaaggaaaaggggaagtaaagtagtatatgactgaatacggatcacgctcatcggctttatttccgcaatgggctttcttgagactactatgtgacctgggccttccaaattagagtcagaggcctatttgagtgtttactactttcaatatacatg

SEQ ID NO: 13748 - DNA, 351 bp, Zea mays
  Clone ID: MRT4577_112528C.1
aagacagttatcaatggtctttttatttacaatgggggaaaaacaggagatagatacaaacagcaacaacataacaacatcataattattcacgaatctacagaggcaaaaaaacaaacgaacccgcaacgaggaaatagacctacagaagggaaaactctaacagcagagcatacgaataacggataaacagatccaacccttggggttaatgcagggtaccagaaggcaccattcctaggatcctgctagcggtttatgaacagacagccaacgggctgaacgaggaaggggcacaagaaagctaacaaaccttcctccaacgttaggccaaaagaagaaccacggtcg

SEQ ID NO: 13749 - DNA, 568 bp, Zea mays
  Clone ID: MRT4577_112529C.1
aaaaaaaaaaaaaaaaaaaaaaaaaaaaaaaaaaaaaaaaaaaaaaaaaggaaaaaaaaaaaaaaaaaaaaaaaaaaaaaaaaaaaaaaaaaaaaaaaaaaaaaaaaaaaaaaaaattttaaaaaaaaaaaaaaaaaaaaaaaaaaaaaattttttttccttcccgggggggcctttaaaggggggattttttgaatttttcttccccctggggggcgtttgggctttttttttgggggcccctttcccccttttggggggggttttaaaattcctgggcccggttttttaaaccgtggggttgggaaaaccctgggtttcccccatttttttccttttgaaaaaatcccctttttccccggtggggtttttacaaaagggcccccccccttccccttttccaaaattttgccccccttattgggaaatggccccccccttttacggcccttttaacccggggggtttgggggtttccccccaggggccccttttcttttgcaggccccttagcccccgtcctttgggttttttcccttttttttttcccccttttcccggttttccc

SEQ ID NO: 13750 - DNA, 315 bp, Zea mays
  Clone ID: MRT4577_11252C.1
acggtcatgggtcacatctttgtcactcttttttctcttatcattccttctatatctaaaaggccaacaaaatggtcttacataaaggaggcaataacccttacacccctaacccgtctcgagggtcctccctaaaaaaaaagatcccaaaacccaatcgtcctcaagcaaggcccccttggaaattgcaaaacccacttagggtctaaataaagaaaacaaggacaagagatctggccatgccacaacccccccaaatagggggggccccacatattgggcacaacccttcaccggccccctaaaaccccgaaa

SEQ ID NO: 13751 - DNA, 186 bp, Zea mays
  Clone ID: MRT4577_112530C.1
tcgcgcgttggattcggttcacaggatcctctgcgccaccgcaaccgtgtgaccggccgtgccgccggcgattccgattcggcgacccgtgccaggcccggtcgcagacatgttgccgtcggagccgacccgggaggagagcgtgtacatgggcaagcttgcggagcaagcggagcggtaccagga

SEQ ID NO: 13752 - DNA, 391 bp, Zea mays
  Clone ID: MRT4577_112531C.1
gccttatgacgacccaatgacctgtcgaggagcacaccccctccgggtggcggacacagaagcgcccgtggaggagaccccgccgcacggcgccttacccgatgagtctgaccccggcagggcgcgacgactcagctgaggctgaggctactgatcctgctgctcccgaggagctttcagacggcgatcaccaagcagtcggctagcctgcagacgctgctcctgatccagcctgagagcccttcgagtgcgaaccggtccacggggtggaagctgatgatgatgctgatccctacgagactcctcggtgcgatcaagacgcaacctgcgagaaagaagctgcttctcctcactgatgccggaagacccgccgcgcacgacactgtctccg

SEQ ID NO: 13753 - DNA, 392 bp, Zea mays
  Clone ID: MRT4577_112532C.1
cccacgcgtccgcccacgcgtccgttgaattctaaaaaatgtttggtccataaatttcataatgtgtcagggattctttcattttacttccacttattgcgtaagttacatgcaaaatcaccgtaggtatccaagtttcaacataatcaatatttcactttatcattttcatatagggacatcatattatctttaatataatgtttattggtccttgtaatttatttgcaattttgggtagacactagattattttatgaatttaattgcattttgatgatttttttagaaataaattaataatacacaaatagccttagaaattcataaaatttgacggagggttaacatttgtctacataaaattctaaaaaatgtttgggccataaagt

SEQ ID NO: 13754 - DNA, 885 bp, Zea mays
  Clone ID: MRT4577_112533C.1
atggatcccagccaccacgttgccgccatcgatcccagccaccacgacgccgccatcgatcctagccaccacgtcgccgccatcgatcccagccaccacgacaatagcattagaaagagtacgacaaggcaccggtcggatggtagtgtatatcagaaacatctcgtttgcagttgtgaaggatatgcaaaagtcgagccctcgaagggcgttacaaggacaggatgcggtgctcgtattcagttcagtgttagtaaagaagggatttggtcggtgcaaaaggttgtattggagcacaatcattatcttgctagtccaaataagaagaaaaacctaaggtcccaacgacgtgttatagaagcagatagaaagctaattgggcacatacgggaggctggaatgaggcctgcccaggtgtatgaattcatgaaggagttttatggaggagccgacaaagtgccatttacaaagatggattgcaataatgagattgggcgtgagcgcacaaaagttcctcgtgtggtaaaagggccaaagagtaaacgatcaaccatatccctggaaaagagaaaagggaagaaaaagaaaggtggggacaacaaaggagaagattcaaataacacatctggaaatagggacaatgacgttgatacaaacttcagtgttggttatgatcaatcttcaaccatggcgattccagtgatgcaaggtgggaatgctaatgccacaatgccatgctttaatatgtacatgagctcttctgtcatggatggtggtggtatacaaggaggatacacaagtctattacttggagttgatcaagatgctgcatcagctgttagaaaattacattttgatggagtgccaaataataaaaatatatga

SEQ ID NO: 13755 - DNA, 416 bp, Zea mays
  Clone ID: MRT4577_112534C.1
aatgggttgggtttttaatttattatttcaaatcattatgtagattgtactatgcttattattacattttgttttttatgcgaagaccacccactcggacttgaaaacaagagtgaaggggaagaggcacaaaattccatatgcataaagaaaccaaacactggacagctcggcattcaaataaaaaagtgacaaaacgccattatacgaaagctgactattgctgggcactctaaaggtgatcaagagaacagagtggcaatgttgttgatagtttttcgctatgcgctccatggtgaggatgagcgtggcttccatgatgagcgggtactggctcggcgggttcagcttgatcagttgggcggaatagttctcgtcggccaactccttggacaggggcagctggagcgttatgg

SEQ ID NO: 13756 - DNA, 963 bp, Zea mays
  Clone ID: MRT4577_112535C.1
cttctccaatggcgctactccgagcgcttccggcggcggttctcccccgtcgcgccccgcacccacttcctcaccccccccggctcaccttcggttcctggacccgatcgggctccgccccttcttctcctcctccgccgccgccaccgactcgcaggcaccgtccatgggggccaccctcttcggcgggctcacggagtcccggttcgcgaagcgccggccgggcttcgccgaccgccggaagagggccagcttgcgcgccgaaggtgcggagggggagggtttctccagcctctcgtttctagccatcccttggccccaggcgcggcgtcgccgggcgtgagctcgcgagaaggacgccgagaagcaactccggcccaccctaccgggtgaagtgcgagcctgacgagcccgtaccagctagccagccaaaccaagggagcgtgcgagtgcgagggaggaaggacaggaagcggatcaagcagcgggacgacttcatcacggctgagaaggagaagcgcagagcccagtattctccccctggcacccaaggccggcctcgggatactgtcgtggcctctagctcggttctgctcctctctgccgtcccccctgtgtcctcttacctgggtcggtccccgttgttttcggtgactggtggtgcctcgcccttcgtccctttctcaaatgctggacggcgtgtgtttacgcgtgctcgctgggccgtggatgcgctgtgctcagtttgctgcggttcggccgccggttggggtggggtggctgtgcgggcatactctctgcattctctatagtatagactgttactgttgtgatgatatattatttgaaccacttctttataatctgttcattttcctggaccccagtgaataacccaagtctggcatagaaatacaaaagtaaactgaagtacggatctaaacaagtcagtcgatgcgcctg

SEQ ID NO: 13757 - DNA, 529 bp, Zea mays
  unsure (1)..(529): unsure at all n locations
  Clone ID: MRT4577_112536C.1
accgtgcgcgattctctgccatcgtcgggaattggtttcgccagaccatgctggatgatcgccgtctcttgctgcgggtgttggacgactcctcgggcaaggcggtcaacttgggtcgtgggaattcgtcgccggtgttcgatttgccgccgtgaacccgcatgtctccgtgggcggcgagtcctgctacatgattcacggtaaaatcgctcccatttggttcggcatccctccctcttccgtttgcaccagttagcgctcgggttagggctatgggggtcggtcggccatgttgccggtgggcgcaccgccgggtggcttctccgccgccgtggctaggattgaattggggagaagaaggatgtttagccgtnggatgttagatgtgcggctaggattagatgactgggtgccccatcgcgtgtttcaatccggcccttggatcctgatcggttggatccggctggatctgagtcctttgaaatctccgccggcgtttttgcatcgcttggacaggggtgtgttccgg

SEQ ID NO: 13758 - DNA, 154 bp, Zea mays
  unsure (1)..(154): unsure at all n locations
  Clone ID: MRT4577_112537C.1
gtgggtagttgggccaagggacgacaaccagtagctggaagaactgcactggggcgacgaggcctacgccgggggatggtagcagcgccgccaacgcgacccgcntcgggagcggtgagccccgcgntcgaatggactgaaaggccgacgaagg

SEQ ID NO: 13759 - DNA, 308 bp, Zea mays
  Clone ID: MRT4577_112538C.1
tcactataggtggaagctgaaaccgcctgcaggagcccggccgcaatatcccgggcgacgccaccacgcgttctcatacgctcggccacgcgaacggatgaacggtgctgcaatgacagctagctaggttgcccagcccgatgtagaggaacggaccccaagtgctattatagtgtggtgagcggacgcaaccgcgacgtaaacaatgggtgctactataaaccaggagaacccccaggacatttcactcgagccaggcattctcatgagggtaggacgtggaatagctgtggccatacccaaatgat

SEQ ID NO: 13760 - DNA, 605 bp, Zea mays
  Clone ID: MRT4577_112539C.1
gtaccggcgcccctcctcgagttttttttttttttttttttttttttttttttttttttttttttttttttttttttttttttttttttttttttttttttttttttttggaacaaccaatcttgttaaagttttaaaattgggagccatttccggccctgaaacgcagaaggcaacagaagtccccccaaacaggggccaacacatttgggtgccagaaggcgcccgtcctgaaaaaaacaacttatttttttttttccccagtctccccccgggcaaaaggcttttttttaggactaaaaaccgggaaaccccttggggggggggggggattaaaaataaaccctgaaattggaacctccggggcccaaaacacaaacccggggcccccaggggggggccaaaaaggaaagcacccttggccctccctgcaggggcccctttatggggggagggtggccggaaggtaatccaattttttcccaagacccccgccccgggtgtcgggaaaatttttccacccggggcagttgggaacccctgccgtgggaagagaaccccgatcgggtatctgagggggggccccggggggtcttgttccaggc

SEQ ID NO: 13761 - DNA, 564 bp, Zea mays
  Clone ID: MRT4577_11253C.1
agctcccatatccgctaccctatccctccatcatgtcccgtctccgtcttctcgtgtgtgctcctacacctcgccgccagccatgggcaaagacaagatcggaatcaacggttcctgaaggcatcggacggctcgtggccagggtcgccctgcagagcgaggcatgtcaagctcgtcgccgtcaacgaccccttcatgaccacggattacatgacctacatgttcaagtacgacacctggcacggccaatggaagcacagatacatcaccctcaaggactccaagacgcttctcttcggctagaagccgaacaccgtctttggcataatgaaccccgaggagatcccgaggtgtgaggctggagctgagtatgtcgtggagtccaccgttgctgacaaggctgtaagtaaggttcttcctgaattgaatggcaagctcactggcatgtccttccggcctcccaccgtagatgtgtcacatgatgacctcactgtcagaatcgagaagggggcctgttacgacgaaatcagtaaagctattcaaggctgcttctgagggcccact

SEQ ID NO: 13762 - DNA, 196 bp, Zea mays
  Clone ID: MRT4577_112540C.1
cagttaatggttcaattggaagccacatttttccagcttgtcaagggtgaacgggccaatacagaggaatatttattttgccaagttcggacactttgacgacgaatgatgatgcacagggaatccgtcatatgatgcaataccggtgccattaaagtttcaggtttgcaacccttagccaatgcgctagcgtgtc

SEQ ID NO: 13763 - DNA, 266 bp, Zea mays
  Clone ID: MRT4577_112541C.1
aaacagggggagcgcacacgcacagaacaacttaatgcacacccagatagcgcgacaacttgaagcgaaaccgtacataaaaaatagccaaagactgccagcgaagcacggcacgacagacagacacagaaagacaaagcggatggaagattatctttcagagggggggggaaaaacggcaaacacccgtgaaccgagagcgaaagaactaaccagcaccgacacacaaaaacaacaccaaagaggccagaaccaacggaaacaca

SEQ ID NO: 13764 - DNA, 538 bp, Zea mays
  Clone ID: MRT4577_112542C.1
cacctagtaacttggtaccttaacggccgcccttttttttttttttttttttttttttttttttttttttttttcaccaaaaactttattattgattacactaataacatctaaaaagggccccaccaagatggttgttggtaggaggctgctgggtttgcaaacagttggcaagggcaacaatgttgattgaagagggttgcggggttagcccaaactgtgtaaaaaggcacactgttgctgtgtcaaaaggaacacggtttgctgcactgctggctaaaggtagaatatttgctgctgcaaataacacgggttcagtgcggccaattggttaaaggaaaaattgttgttgtgaaagtaggcatacctagctggctgaatggaatagttgttgctgcaaataacagcagggttcagtgtaaaagttggttgaatggaaaaaatgttgttgctgatagtagggaaaaaggtttgccaaagctacttggttgatcacaggtagcacaagttgctgcagctgctgtgccttgatggtttg

SEQ ID NO: 13765 - DNA, 704 bp, Zea mays
  Clone ID: MRT4577_112543C.1
cgcgcctcgatcctcctcgcccctccggcctctcctcccctcccccgcacctgcacctgcggagagcgccgcaagctagctgcagaggagcgagacagcaggaggaggaggaggacgagaggaagaagagatggcgggctgtgatggagccaagtcgtcggcgtccatggaggaagaggcatgcgcggagaagaagtacggagggatggcacccaagaagcccttgatatccaaggaccacgagcgcgcctacttcgattctgcggactgggtgctgggcaagcaagccgcgaacagcagcagcagcagcacgaggaccgcagccgcggttgagtctctgaagcccaagctgaagcactgatgagactgaactcgctaaccggtctgtccctctctccctgtccagagaacgccgcaccaccagctgccgcctcgtaagcccacctgcgcttccagttgagagacgcacggccacgcgtcggcgtcgcagctgctggaggaggagctcggtcagagtcaaggactgaggatgccgacgagctcggcctcggataaatgttttagctggtccggaatcgtagggacgacgacgagccagaaagatccgaatccgaaatgcggtctggcttcttggcgggcagtgcctgttattgtgtcataaagaacggatcaattaattataaattatctggctgaattctggc

SEQ ID NO: 13766 - DNA, 815 bp, Zea mays
  Clone ID: MRT4577_112544C.1
tcgcggcagattggcggcagcaaagcactcgcgcctcgatcctcctcgcccctccggcctctcctcccctccctgcacccgcacctgcggagagcgccgcaagctagctgcagaggagcgagacagtagcaggaggaggacgagaggaagaagagatggcgggctgtgatggagccaagtcgtcggcgtccatggaggaagaggcatgcgcggagaagaagtacggagggatggcacccaagaagcccttgatatccaaggtgctctgctactctcagctcacgctattggaccaaacagcgtccatggatagtagtctgtgtctagaagctttgatcatcatcacttccctctcatctgatccctgcttgccgcccggccgtgcctaataacaatgcatgcaggaccacgagcgcgcctacttcgattctgcggactgggtgctgggcaaggtgagacagagaagtggaggaggggaaaaaaaacactcgctccagaactcaggaactgggcaacgtctctaacccttgctcctcttttttgggcttgctttgcttgtgtgttttgcagcaagccgcgaacagcagcagcagcagcacgaggaccgcagccgcggttgagtctctgaagcccaagctgaagagaacgccgcaccaccagctgccgcctcgtaagcccacctgcgcttccagttgagagacgcacggccacgcgtcggcgtcgcagctgctggaggaggagctcggtcagagtcaaggactgaggatgccgacgagctcggcctcggataaatggtttagctggtccggaatcgt

SEQ ID NO: 13767 - DNA, 872 bp, Zea mays
  unsure (1)..(872): unsure at all n locations
  Clone ID: MRT4577_112545C.1
tcgnnnnnnnnnnnnnnnnnnnnnnnnnnnnnnnnnnnnnnnnnnnnnnnngcggagagcgccgcaagctagctgcagaggagcgagannnnnnnnnnnnnnnnnnnnnnnnnnnnnnnnnnnnnggcgggctgtgatggagccaagtcgtcggcgtccatggaggaagaggcatgcgcggagaagaagtacggagggatggcacccaagaagcccttgatatccaaggaccacgagcgcgcctacttcgattctgcggactgggtgctgggcannnnnnnnaaggtagcacagctagctagccagcttgccactggcctccatgagcaagaaccttatctgctgattgcggagaggccgcaagnnnngccgcctcgtaagcccacctgcgcttccagttgagagacgcacggccacgcgtcggcgtcgcagctgctggaggaggagctcggtcagagtcaaggactgaggatgccgacgagctcggcctcggataaatgttttagctggtccggaatcgtagggacgacgacgagccagaaagatccgaatccgaaatgcggtctggcttcttggcgggcagcgcctgttattgtgtcataaagaacggatcaattaattatcaattgtctggctgaattctggcatggcacctggtgtttgaatgacctacagctacagaagcccagtatttggacacgggccgtgcaattcctcacgcaggccgccggttttgttgggctnnnnnaccgttcgaggctcgtgnnnnnnnnnnnnnnnnnnnnnnctgtctatccttctcagcgtaggtagtagacggcctannnnngatttcggcccagctcctactgctttctgcaagtaatagtgaa

SEQ ID NO: 13768 - DNA, 1834 bp, Zea mays
  Clone ID: MRT4577_112546C.1
cattgggtacctcgaggccggccggggcagattggcggcagcaaagcaacacgcgcctcgatcctcctcgcccctccggcctctcctcccctccctgcacccgcacctgcggagagcgccgcaagctagctgcagaggagcgagacagtagcaggaggaggacgagaggaagaagagatggcgggctgtgatggagccaagtcgtcggcgtccatggaggaagaggcatgcgcggagaagaagtacggagggatcgcacccaagaagcccttgatatccaaggtgctctgctactctcacgctattggaccaaacagcatccatggataagtagtctgtgtctagaagctttgatcatcacttccctctcatctgatccctgcttgccgtgcctaataataatgcaggaccacgagcgcgcctacttcgattctgcggactgggtgctgggcaaggtgagacagagaagtggaggaggaaaaaaaaaacactcgctccagaactcaggaactgggcaacgtgtctaacccttgctcctcttttttggcttgcttgtgtgttttgcagcaagccgcgaacagcagcagcagcacgaggaccgcagccgcggtcgagtctctgaagcccaagctgaagagaacgccgcaccaccagctgccgcctcgtaagcccacctgcgcttccagttgagacgcatggtaatgtagcttggtactggcctccaagaaccttacctgctgattgcggagaggccgcaaggcaagaagacatgcatgcatgaccgtccgtccatgcttgttcgtgcaggccacgcgtcgcagctgctggaggaggagctcggtcagagtcaaggactgaggatgccgacgagctcgagctcggataaatgttttagctggtccggaatcgtagggacgacgacgagccagaaagatccgaatccgagatgccgtctggcttcttggcgagcagcgcctgttattgtgtgtcataaagaacggatcaattaattatcaattgtctggctgaattctggcgaaaaaaaaaaaaaaaaaaggcccctacgcctcggaagcccacctgcgcgtcccgggccgtcctatggccaccccacgccgccgctggtggtgggccccccccccggtcgaggcccgtggccgcccacccgcccccgcccgctgtcttgccttcgctgcgccggtagcggacggccgacccccggcctcggccctccgcctccggcttgccgcctggcttcgtggcgtgcgcgaaaaaaaaaaaaaaaaagcggcgttcatgggaggaacagccaagtactggtaagcggtcaagcaggagaggtcacgatcgggtggccaccagccaggcgagcttggacattgacatgatgggaccctgccccatggcggtttgtacttgcacgtgatggtgccctgactgcgacggatcgaagcctcatacgacggtcggtacagcaatgaggtcaggtgcaacgcgacgacaacaattagccagttaggtatgggcacctagcgatgacgcggaggcgcgacaaaagtgctagtgtctccatgtgggcacatggggcggcaagacacgaccatgacttggcggttggcgctttggtggctctgtcgtggtgcgactacaatatagtttagagattttttgctatgaagtaataaggtggactttgtcacttcgttgggtcttatggccacatgggccacaagaatctattgagctagttaggtatgagatgtaagaaggagatattttggttcaaattagcagaatttcttcatttatttgattgattttatatttccatgta

SEQ ID NO: 13769 - DNA, 307 bp, Zea mays
  unsure (1)..(307): unsure at all n locations
  Clone ID: MRT4577_112547C.1
gggacctcgaggcagccgggagtcgtttcccaggcccganccccntcgtttgccacgactccgggctcactgtcgctcgctctcgctcccttccctcccacgcaatggtggccgatcgcctccgcctcgcgctgctgctctccgcgtgcctctgctccgcgtgggcgcgcccacgcctcgagccgaccatccgcctgccgtccgagcgcgcggcggccgacgacgccgtcgggacccggtggaccgagctcatcgccggctccaacggatactacaactaccgccaccagatggacatcctgccatg

SEQ ID NO: 13770 - DNA, 376 bp, Zea mays
  Clone ID: MRT4577_112548C.1
gctctctgtgatggacaggatgggtgatcatgctggctgcgctgatacggctagtggtctcatggagaaacgtgataacaatcacactagatgcatgtacctctatccggcctggcggcaccgatcttctggggagcacaattggcagacactgagtgcacgcatttgaattgtggccgcacctctgtaaggactttctgtatcaatgatacattgactacgatcgtcaggtccttgcgttgtgtgtagacctcgaggcagagcacacgcgggacgcgataaattgatgcttgatcgacgtggagaaggtcaaatataagctggcatgtgtaacaagaagaaaagggtgcattgcaaatgctgcacaagaacttga

SEQ ID NO: 13771 - DNA, 247 bp, Zea mays
  Clone ID: MRT4577_112549C.1
ccggaccgaccgactcgtccgaaacgtcccctgtcccgctaggatacaccttaaagcctcccccataaccacatatcagagaggagctcatgatgttctgcttccttcaccacgaccactacgttcagaacctctcggcacactgcatatacactcacccacttcaatactttaagcgcatccgaccatgcttactgcctctccgaccgaaactgcaacgtggtgctagacaaagacataccacgct

SEQ ID NO: 13772 - DNA, 1011 bp, Zea mays
  Clone ID: MRT4577_11254C.1
ccccgcgtccgcccacgcgtccgcccacgcgtccgcccacgcgtccgatcatcaacaacaaatattgctgatgacttgtctgcgatatttggaggagctcctacatcagaagaatttcaagaagtagatggggagagcgaagaaagaagacgcgctaggatggaacggcatcaaagaactcgtgaacgagcggcaaaggctttggctgagaagaatgaacgcgacatgcagcaacaaagagagcaggctgaaagacataggcttgcggaaacactggactttgagattaagcgctgggctgctggaaaagaaggcaatttgcgtgcattgctatcaactttacaatatgttctttggccagaatgtggatggcaacctgtatcccttaccgatttgatcactgctgctgctgttaaaaaagtgtacagaaaagcaacgttgtgtatccatcctgacaaggtgcagcaaaagggtgcaaatctccaacagaaatatatcgctgagaaggtttttgatctccttaaggaggcgtggaacaaattcaactctgaagagctcttctaaacagcctcatgactgaacatagcatgacccatcagggtctgcacaaggtactctgggaaggaactcacaagctggagcagcctgaggttggtcggggggaaggggaaccatgaagcgaccaagcgaaacctgaactatgtggtaatcacagttgtttgtttcactcccccaattttctttcccaactatctgttgattggatgacaactcacagcgacatgtggcagctgcccaagctgaacctcatccagtaggtgcacattagtgccctgttttgtactgtttgtcctcggctgtatgtaccgtcagagctgggggttctgaggccagcgttgtgattttggattaggtacagggcttatttaccatggagagagtgaaaacaatagagatgacccagaataatagattgattgattagagaaaaaaaaaaaaaaaaaagcggcc

SEQ ID NO: 13773 - DNA, 171 bp, Zea mays
  Clone ID: MRT4577_112550C.1
tttaaattttttttttttttgcaaaccgcaacttcaatcagggggggatttatataaaaaaaacggacgcactacctcattatacagcataacaaatccaatcacattactattatcgtataaaatacaaccatagggaaaacacacactaacacagaagtaatttcatcc

SEQ ID NO: 13774 - DNA, 258 bp, Zea mays
  Clone ID: MRT4577_112551C.1
attcggctcgagaacgtcatatggctttttctaagggctgaaagccaggaggcgggggcttcaatccacctacaggttgtgctttttatccaggacagcgtgtcacggcatcatcatgatgctgttgtcaaaacatgcagatcgcttaacggattgtggcgagcaggacgcattgctcgtgctatcacagaagacgcaagtgttgctggtgtactatattgtattgcatttgcacactgcgctacagatcgaggatat

SEQ ID NO: 13775 - DNA, 338 bp, Zea mays
  Clone ID: MRT4577_112552C.1
cccacgcgtccgcccacgcgtccgcccacgcgtccgacaaaatcaaaccaatgaatggtatggagcatatcctgttgctgcccgtaatcttcgggaagatgagctaggaggagtgatttttggctgcaaacacaacacaatcggtgaatgcctctctaaacagctgtttggtttgccttcaagccatttctcatatgtgaagaatgtcaaacctggcatgcctctatttctgttcaattatagcgatcgaaaaatgcatggaatttatgaggctgcaagtgctggcaagcttaacattgaccactttgcttggagtgatggtggtagaataaagacac

SEQ ID NO: 13776 - DNA, 370 bp, Zea mays
  unsure (1)..(370): unsure at all n locations
  Clone ID: MRT4577_112553C.1
atgcactcgaccttcaccaggcttacaggagcaattccgatggtatatgactagctctccaacgctgtagtaataagtctgtctagcaacgatctgatgtgaactattactgtcgatgggcctttctcatccttatctgtacgaagtctggagaccaacatgatgatctacgaatcagaactacaaggattgttatcattatgattcctgatgccatatgccgagcgaccgtagtccatctgtgaaagccgataggacgttagccaggatagtagtatcaatagagaccatatctgcaataatgacnatgactatatataagtatgataataatacgacatttggtaatgagatcataacaagtcctgat

SEQ ID NO: 13777 - DNA, 413 bp, Zea mays
  Clone ID: MRT4577_112554C.1
aatattttcttttttttttttttttttttttgggtttttttttttttgggttcgccaattttctttaaaaatttttggattggagaaacaagggggaaaccctggttcttggatacagggttcctcccaaacaaggacttgctttggcttgaactagaacttgaactttccgggaccggttaattacatacaaaagaacccgctaacgtttttgggaggtgaagaacttggtgggataacccaattccaagaagaacacaatggccttggggaaatgggcgagcacaacataacccggtaaggcatggtggatgcccagattattcttcaagaactggtttaccaccacgggggtcccaccgggaactggaaggtcacctttgtttttgccaaactgggacgcaacaacgccc

SEQ ID NO: 13778 - DNA, 519 bp, Zea mays
  Clone ID: MRT4577_112555C.1
ggtaccgcgcccccctcggttttttttttttttttttttttttttttttttttttttttttttattcttttttattctgtttttttattgttcttttttcatacatttgctggggcttgtatttaagccggaacaaaaggtctcccccctagacacaaagggggcaggcagaaaacagaaaaaggcgcaggaactaagaggggaaaccaataaatattgctgcaacctacggccaacgggcccccccttctttgagaagcgcgaacggggacggaaaactaggggcgaggagaaagaaaatcgaggggaaaaacccccccccggaaaatatacatgtgctccgcctggaaggagaaggccccggacaggctgccgttgggaggggcgccgaaaaacaccaacgcgagcccctcgtaagctatgccgccgggacccaggaacacgggccgccctttcccaaaaaaaaggtcggggatgggcgtggcgcacccagaagcccaaccccacgctggggcaccg

SEQ ID NO: 13779 - DNA, 406 bp, Zea mays
  Clone ID: MRT4577_112556C.1
gactccgcgctctcccctgctcttgcgctctacatggaaggcgagaccggcgcccaaatcaacggaatcactgctccgcgctctccagacgcggacgggattgcggcctcgatccgcgctctccgggttcgcccagatcgacggcgtccgcgccgcgcttgcccagattgacgaaatttgcagtctccagacgcgagtctggcgctcgctattcgtggaaggcgaggagagacgacgcatcggctctcgatccgcgctctacatggaaggtgaggcagattgggggagtggctcgtggccgtcgcctcggcggcgtcctccgtgccgtccggcgaggtgtcgtccaagcacggcggcgacgactacgtgattgtgggcgggcccaacggcaacgccgtcgcgcgcc

SEQ ID NO: 13780 - DNA, 171 bp, Zea mays
  Clone ID: MRT4577_112557C.1
cacacagatcatgtgaagcattctagaacactgagatcgtcatgtaagagtcgctccagctttatctacacgccattcttaagttgttggagtactggaggattgcagagccactgtcgatgagtgagatctattggcatctgtggcctatttgacacagcttcagacatg

SEQ ID NO: 13781 - DNA, 400 bp, Zea mays
  Clone ID: MRT4577_112558C.1
gggggggccctttaaaattagggattcccccggcttgaagaatattgcacgagggccaatccaaacactagcgccgacactgcctcataggctaggccgacatggtctccggatcgggcgtgtgcgctaagcgcataggggcggacgctccccaccatatgctgggccgtctatggtcgatcataggcactgagctgttcattggccagaaggcggtacgaggtgcagtgataggagatgtggatgtctgtcggactcgtgcgtaagatgatgaattacctgcgcttgctaccatgcggatgaacatcaaggcgtagaagggcccaatccattagcgcgactcggccatgatcctgtggcgcaacatcctagagatcatcccaaacatcatcaagaggcc

SEQ ID NO: 13782 - DNA, 199 bp, Zea mays
  Clone ID: MRT4577_112559C.1
aaagagcgagtacatcattggattttatcggaaacagctctgtacctaacaggctcgtcgtcgaacctgactcccgacatgccttcccagcaaactcagatgttgccctgctccattgccatcaccgctaaggccgtcaggacctagagcatccgccgcggccatgccctacgtgtcgctcaaacggagcgcgtcacct

SEQ ID NO: 13783 - DNA, 4207 bp, Zea mays
  Clone ID: MRT4577_11255C.1
aattcggcacgagggagagagaccacctcctccgctctctctctctctctcttactctgactcgcccgctccggttcgccgctccgccatcgccggcgatcactccactccggcaacgccgcgtcttcgacgaccccaccgacgcctggccccgcgaccccattcctccgattgcaggctcacgccttgcgcttctcccccggcgagggtacgtgctcttgcccagatccgccccgcctccccgcgccccgccacgcgcgccgatcggcaagctgcgtaggcttcgctaccgctggtgcgcgagcgagcgtcgcagccgtcgatccgcgcgtccgccatggatgacttccagggcctgctggcccgcgacttcggcctccgcccgcaggggaaggccgcgcccatgtcggccgcccgctcctcgagtccctccggatccgcctggaccaataccagatccgccgtggggtccgccgctccctccgcgccctcctacgacgagctcttcgggtccgccccgccgccgccgcccaaggccacgccgtcgctcgataacatcttcaactcgttcaaggagcccgcttccaccgcgccgccgcctaagccgaagcactcttccgcgccggtgttcgacaagccggtctacgatgatgacatcttcatcggggtccctggggttaagagctcctcggtgccctatgacgatgtgttcggtggaagccagaaccgcgaggcgccccccgcgttcgatgacctgctcggtggatttggtaagagctcacaggtgaggggagaggtggatgacaagaggaaaccagaggcacctacggctgctgcggctactgggttcgattatttgatcccaggcggctttggcgggagaagctccccgcggcaaagggatgctattggtgcaaaacaaaagaagatttccatgtcaacatctaagcaaccagctagcttaagtgacccctttgttgttctcgaaacaacttcatcctcagcccatccattcgcagatcccttggatgaattcggtaaagctgcaaaatatcaagggaaaagccgtgaaagtactagcgttgggagcagtctgtttgaggattcaagcactttcaatcaggctccaaaatctgaacctattttttaccccagaggtggacaatggcttgaaagataagaatgagtctagcagagcccaaaactcaaatcctgtacagagtttttctaaaggaaactcctcccaacaaccttctgtagaggattttgaaaatatcttttctaagccgcagtctgccagatatgctgatgtccatgttgacattggctcagagaaatatagtgggaatggtataaatgaccagtcacctagatctgatgaatccgaagatgagatatggcttacagcttctgagattcccctcttcacacagccaactagtgccccaccaccttcaaggccaccgccacctcttgcagttaagcaaaaacatggatcaaaatcaacaagaaaagatgaacatttgcggcggtctaggaaaaacaatgaccatcaaagaagttcctcaaatcatgctggtgtttctacagtagatggactagaagattttcccatgggtaagtctcagaatgtgcatgcgttaaatgaggaagaatttgagagaagtacggcagcagcggcatctgcagctgctatgaaagaggctatggataaagctgaggcaaagttcaaacatgccaaggaagtacgagagagagagcgtgatgcaaagcttagaaatagagaacaacgggaacgagatagtgtaacaaggtcgtatgcccaggatcgtgaggacaaagagagaaaggaaagactagaacaagaaagagagatgaagcaaaatgaggaaaaggaaagagagcaaagaagacttgaagaggaaagagaacttgagcgacataaagaaagagaaagagctaggcaagcagtggagagggctacaaaggaggcacgggaaagagcagctgttgaagctcgtgcaaaagcagagagagaggcacgccaacgttcagaacgtgctgctgtgcaaagagcccaacaggaagcacgtgagagggcagcagtggaggctaaagagcgagcagagagggctactgcagaagcaaaggaaagggctgctactgaaggtaaggaaaaagctgctagtcaagccagggatagggctgcagcagaaagagctgctgtggagagagctcagcaagaagcgaggaagagagctgaacgagcagcagtggaaagggctgctgctgaggctcgggaaagacaggctgctgctgcaagagataaaacgagcaaaccagatgatctagagtccttctttggtatgggtgctcgagctaatagtgctccgaagcaaagggctccgactgtggactctatgtttcattctcaaacgcaaaatagagggacttccacttcgacatcaatgaaaaaggcatcatcaacaacaaatattgctgatgacttgtctgcgatatttggaggagctcctacatcagaagaatttcaagaagtagatggggagagcgaagaaagaagacgcgctaggatggaacggcatcaaagaactcgtgaacgagcggcaaaggctttggctgagaagaatgaacgcgacatgcagcaacaaagagagcaggctgaaagacataggcttgcggaaacactggacttggagattaagcgctgggctgctggaaaagaaggcaatttgcgtgcattgctatcaactttacaatatgttctttggccagaatgtgggtggcaacctgtatccctcactgatttgatcactgctgctgctgttaaaaaagtgtacagaaaagcaacactgtgtatccatcctgacaaggtgcagcaaaagggtgcaaatctccaacagaaatatatcgctgagaaggtttttgatctccttaaggaggcgtggaacaaactcaactctgaagagctcttctaaacagcctcacgactgaacatagggtcgcccctcagggtctgcacaaggtactctcggaagaaactcacaagctggagtggcttgaggttggtcggggggaaccatgaagcgaccaagcgaaacctgagctatggttgttgtaatcaccgatgtttgtttcactcccccaattttctttcccaactgtatgctgattcaatcacaactcacagagacatgtggcagctgcccaagctggacctcatccagtaggccagaaggtgtagtatttatcctgggctgtatgcaccgtcagagcgggggttttcttaggccagtgttgtggttatagattaggtacaggttttttttaagcatggagagacgttttactagataatgatgaatgttgcttgtctgatgccattggcatcgtggcaagttcggttgtcttgtttatagtcaatttctggaacatcacttgacctatactctgattcctgttttcttttactcttgtacaaaaaaaaaaaaaaaaaaaaaaaaaaaaaaaaacaaaaaaagcaacgttgtgtatcctcctgacaaggtgcagcaaaagggtgcaaatctccaacagaaatatatcgctgagaaggtttttgatctccttaaggaggcgtggaacaaattcaactttgaagagcttttttaaacagcctcatgactgaacatagcatgacccatcagggtctgcacaaggtactctgggaaggaactcacaagctggagcagcctgaggttggtcggggggaaggggaaccatgaagcgaccaagcgaaacctgaactatggttataatcacagttgttttgtttcactcccccaattttctttcccaactatctgttgattggatgacaactcacagcgacatgtggcagctgcccaagctgaacctcatccagtaggtgcacattagtgccctgttttgtactgtttgtcctcggctgtatgtaccgtcagagctgggggttctgaggccagcgttgtgattttggattaggtacagggcttatttaccatggagagagtgaaaacaatagagatgacccagaataatagattgattgattagagatctatctatatatttatataaatatataggggggagatttcgtggcttatgaaaacagaaccaaacgagatatttccttatctctgtaaccgtatataagggctggcctgct

SEQ ID NO: 13784 - DNA, 453 bp, Zea mays
  Clone ID: MRT4577_112560C.1
ccaaaacttacttctgcgagcccattctatgctcttgacaaaacacggatgcgctacaactagccgaataaaccaggcatcttatgagaaacgagaagcacatagtgtgcttaacttaacaagacgacgactaggtacggggagcacctagtttccttgatccccaaggaaatcgaaggtgatgcacgaaatctcgaacattgaccacagaaaaccactatttgccgtagattgagaacttccatcacttcaccatccacgatgttgcctaattcaataacttgctcatggtaggcaccgggacacaataataccacgacaacgacctcggcctaatatgtgctgagaacctcttgcctgccgttgaagaaaattccatggacgaaaaactactacctgtgacctgcaagctagaatctccacttggcactgctcggtcaaccatcttcccat

SEQ ID NO: 13785 - DNA, 1182 bp, Zea mays
  Clone ID: MRT4577_112561C.1
cattgggtacctcgaggccggccgggacgcgactcctacgtcccactccactggtgcggcgcggagcgaggacgacgtcaccttctccagcccccgcccctgcccctgtgtgggagtaggtgtagccgcgtaagcggcgtaggcctcagctcggctcagcagccgcctcgctcgaaccagaggagccaagcagaggaagcgaggcggcggggcggagatgtcggcggggctggtgaccgacgaggccaccgtggggcggctgtaccggatccggcgcacggtgatgcagatgctgcgtgaccgtggctacctggtggtggaccacgagctcgccaccagccgccgcgacttcctccgcaagttcggcgagtccttccaccgcgaggacctcctcatcaacaagtacaagaagaacgacccatccgaccagatatatgtcttcttccccaacgatgacaaggtagggatgaagcacatcaagaagtacgtcgaaatgatgacgcacgagaacgtctccagagctgtgctggttctccagcagaacctaactccgtttgcgaagtcgtttctcatagagctggagccgaagatccatctggaaattttccaggaggccgagatgcttataaacatcaaggaacatgtccttgttcctgagcatcaggtgctcacaaacgaggagaagaagacgcttctggagcggtacaccttgaaggaaactcagcttccaagaatacagatcacggatcctattgctaggtactacggcctgaggcgaggccaggtcgtgaagatcatcaggcccagcgagacggcgggcagatacgttacataccgctacgttgtatgacagaacgtcagaacactgaagaagaagagaaccacagatatgtcaaaaaaaattcaagctacacataccccacgtgcttgcagacatctgtatcgctttgtagcagcagccactggtaacgatctgtggctgatgtgtaagtgtaagtggattgaataagctgagtcagagcatacgagaattctcatgttgtacacttgtgttttatgaaccgcataaacactcacgacgataaaagaagcctgttttcggagcgacagaagctcctgcgatcaggatttcggatttaaaaaaaaaaaaaaaaaaaaaaaaaaaaaaaaaaaaaaaaaaaa

SEQ ID NO: 13786 - DNA, 311 bp, Zea mays
  Clone ID: MRT4577_112562C.1
cacccgtccgtttgaatctaatatgtaaattatttgtaattcaatttaaaaatttaaaaaaaaaaaaaaaaaaaaaggaaaagagaaaaatttctaacgaatctaacaagaaccaacccttacaatcccatccaatccacgccctatcttttctatataatcacctaatattcaatttccttgccctccttttccacctgtgtaaacctggaaaacccccaccttacccaacttaaacgccttacccttcatttcccctttctacaactgtcataatacccaatatgccccctcctatctccatttccaac

SEQ ID NO: 13787 - DNA, 585 bp, Zea mays
  Clone ID: MRT4577_112563C.1
ctcctatagggcgattgggtctcccgaggccggccaggatcctaaagataccaccatggggatccgtctcggaaacgccaagcgcctcggtaacgaaaggagccggcgcgtgctgacctcgccctacagaacaagctcctctgcgacctggacgccatcacgtccgacgacatcaccgacatccgctgcctcctgccacgtctccgactcccacgaccgcaagagcctcatctacacaggccgcaacagctacgcgcacataaatatgcttgactccaatgctgacgcaacccttctgtagacagcatacttgaaatgaaagactgtgaactctataacctgccaaatattgacgtcaaggcttctatccaatctaatgcatgaagcggctcctcacctactacaggggtcgtcagagatatattatttactcccaatgctgggtacaatccacaacacatgattgacattgcatgccgtcacaaatactgatctcattggactcacaaatgctcttgctggtcagatgctacacgatactcatgccaactgtgtaacccctgaaatatgatcctacacgggttg

SEQ ID NO: 13788 - DNA, 875 bp, Zea mays
  unsure (1)..(875): unsure at all n locations
  Clone ID: MRT4577_112564C.1
cattgggtacctcgaggccggccggggtagccgcttaagcggcgtaggcctcagctcggctcagcagccgcctcgctcgaaccagaggagccaagcagaggaagcgaggcggcgggggcggagatgtcggcgggactggtgaccgacgaggccaccgtggggcggctgtaccggatccggcgcacggtgatgcagatgctccgtgaccgtggctacctggtggtggaccacgagctcgccaccagccgccgcgacttcctccgcaagttcggcgagtccttccaccgcgaggacctcctcatcaacaagtacaagaagaacgacccatccgaccagatatatgtcttcttccccaacgatgacaaggtagggatgaagcacatcaagaagtacgtcgaaatgatgacgcacgagaacgtctccagagctgtgctggttctccagcagaacctaactccgtttgcgaagtcgtttctcatagagttggagccaaagatccatctggaaattttccaggaggccgagatgcttataaacatcaaggaacatgtccttgttcctgagcatcaggtgctcacaaatgaggagaagaagacgcttctggagcggtacaccttgaaggaaactcagcttccaagaatacagatcacggatcctattgctaggtactacggcctcaggcgaggccaggtcgtgaagatcatcangcccagcgagacggcgggcagatacgttacataccgctacgttgcatgacagaacgtcagaacactgnagaaagagaagagaaccacagatatgtcaaaaaaaaaatccagatgcacatagccgacgtgcttggagacatcagacatctgtatcgctttgtagcagca

SEQ ID NO: 13789 - DNA, 906 bp, Zea mays
  Clone ID: MRT4577_112565C.1
cccacgctttcgcggacgcgtgggcgcggagcgaggacgacgtcaccttctccagcccccgccccctcccctgtgtgggagtgggtgtaggtgtaggtgtagccgcgtaagcggcagcggcgtaggcctcagctcgaaccagaggagccaagcagaggaagcgaggcggagatgtcggcggggctggtgtccgacgaggccaccgtggggcggctgtaccggatccggcgcacggtgatgcagatgctccgtgaccgtggctacctggtggtggaccacgagctcgccaccagccgccgcgacttcctccgcaagttcggcgagtccttccaccgcgaggacctcctcatcaacaagtacaagaagaacgacccatccgaccagatatatgtcttcttccccaacgatgacagggtagggatgaagcacatcaagaagtacgtcgaaatgatgacgcacgagaacgtctccagagctgtgctggttctccagcagaacctaactccgtttgcgaagtcgtttctcatagagctggagccgaagatccatctggaaattttccaggaggccgagatgcttataaacatcaaggaacatgttcttgttcctgagcatcaggtgctcacaaacgaggagaagaagacgcttctggagcggtacaccttgaaggaaactcagcttccaagaatacagatcacggatccaattgctagatactacggcctcaggcgaggacaagtcgtgaagatcatcaggcccagcgagacggcgggcagatacgttacataccgctacgttgtatgacagaacgtcagaacactgaagaagaagagaaccacagatatgtcaaaaaaaaattcagatacacatagcccacgtgcttgcagacatcagtatcgctttgta

SEQ ID NO: 13790 - DNA, 702 bp, Zea mays
  unsure (1)..(702): unsure at all n locations
  Clone ID: MRT4577_112566C.1
gagtacatcctgacgggccacctgacggcgaagagcgacgtgtacagcttcggcgtggtgctgntggagctgctcacgggccgccgntccgtcgacaagagccggcgcgggcgcgagcagaacctcgtggantgggcgcgccccctacctccgccgcgccgaccgcgtgggccgcttcatggacccggggctggagatgcagtactcggcgcgcgccgcggagaaggccgccggggtggcgcaccagtgcctgcagagcgtgcccaaggcgcgccccaccatgcgcgacgtcgtcgacgcgctcgagccgctgctggcgctcgacgacgacgtgcccatgggcccgttcgtgttcacggtcggtggaggcgccgccgaggccgcgccggcgcaggccggtgtcgccggcgacgacaatgcggacgcggaggcggccggcaggcagggcaagaggcacgtcatgtcggccgtgcacgcggagagcccactgcggagccggtacgccagcgccgtgaagagaccagagagcccgccgaccctgagcagggcatgagtgccattgcaaatttgcaagtgtacatagctcgctgacagattgctcatggattcttttgttttttcctcctgttttcttggtgatgctgtcaattcgttctctcaagaatttcaaaagggagagttttaaaaactcgaaggaggggg

SEQ ID NO: 13791 - DNA, 350 bp, Zea mays
  Clone ID: MRT4577_112567C.1
cttttcactatcctcacttaacacaacacggccagtgtgatggataaatgccagacacgaaacattattgatttacaccctattaataaaaacctctgaacatatcttataaccatgctccacggactactgactcaaccgtgcatatgcaatcaatactcattcaccttatacaacctcatcttaggtacgaatgcatccataaatttaacctaaaaacactttcatatgccgaataccataataaacccgctactaccttaaattatggcataatgaaatctttactctacaatgtaaccaataatccaaatcaatatcaaacttatactcctctcaagatcattcct

SEQ ID NO: 13792 - DNA, 1724 bp, Zea mays
  Clone ID: MRT4577_112568C.1
cggacgcgtgggacctcgccagcgaccgacaccctctctagctccaagtccaaggctccccttcgccgctgctagcttagctccccgaggctgctaactaagagcgtcatggggctgagggagagcctgctggggtgcttcggggccggcggcggcgaccagcaggagcaggggcacgagcccgcggcggcgcggccggcggccagcagacgacccggcggcaagccgacgctgcggcggctgagcacggcgaacctgcggtcgctgtcgctgcaggacctgtcgcggaagctggagaccacgaagctgcacgccttcacgctggacgagctgagggccgccaccaggaacttctccgccgccaacttcctcggcgagggcggcttcggccccgtctacaagggcttcgtcgacgggcgcctccgcccgggcctccagccgcagcacgtcgccgtcaagtacctcgacagcgacggcgtccagggccaccgcgagtggctggccgaggtggtgtacctcgggatgctcagccacccgcacctggtcgagctggtgggcttctgcaaccaggacgaccaccggatgctggtgtacgagtacatgcccaggcaaaggcctcgagaaccaccttttcaagaatctccttgcgtccctgccatggtcgacgcggctcaagatcgccgtcggcgccgccaagggcctggcgttcctgcacgaggccgagacgcccgtcatctaccgcgacttcaaggcctccaatattcttctcgactcggactacactgcgaagctgtccgatttcgggctggcgaaggaggggccgcagggggacgcgacgcacgtgacgacgcgggtgatgggcacgcacgggtacgcggcgccggagtacatcctgacgggccacctgacggcgcggagcgacgtgtacagcttcggcgtggtgctgctggagctgctcacgggccgccgctccgtggacaagagccggcgcgggcgcgagcagagcctcgtggactgggcgcgcccctacctccgccgcgccgaccggctgcaccgcttcatggaccccggcctggaggcgcagtactcgccgcgcgccgcggagaaggccgccggggtggcgcaccagtgcctgcagagcgtccccaaggcgcgccccaccatgcgcgacgtcgtcgacgcgctcgagccgctgctggcgctcgacgacgaacgtgcccatcggcccgttcgtgttcacggtcggaggcgccgccggggcggaggcggacggcgtcgctgtcgccgacgacgtcgacgaccaggtggacgcggaggcgggcggccggcagggcagcaagatgcacgtcatgtccgccgtgcacgcggagagcccgctgcggagccggtacgccagcgccgtcaagaggcctgagagcccgccgaccctgatgagcagggcatgagtgcattgcaaattttacaaaaggtgtacatagctagctagctgacagattgttcatggattcttttgtttttttttttctgttccttagtgatgctattggttcgttctctcaacaatttcaagggagaggtttttgtttcattttttttcttgtgttattatagtatactgctgaggacacctcaaaagtcgtgaggtgtttgtatactgaaagtttgaggcaacatgtatggcaacatccgctttgacctagaaagacccccaaaaaaaagggagg

SEQ ID NO: 13793 - DNA, 380 bp, Zea mays
  Clone ID: MRT4577_112569C.1
gcagatggtttttgccaaccaaacccccacgtacacggtacaacaccaataggtctggaggggttaacgcattttccaagggtggcctcaccggctttggtttatgatatgtacacaaatatgcctttgtcggaagcaaaagaacacacggaaaaggctaaggttgtctaaaccgttttatatcgcggccgacctaccctgtgttgaggacggacctcaatcatggtttacaacccaagatcaaggttctggggagaccctgatggattaaccttctgaccgttaaacacagaagaccgatcaggtggggagagctgtgccttcttggcgtacaccttgagaagcttgtccaacttttcggctttgtatacacccctctc

SEQ ID NO: 13794 - DNA, 224 bp, Zea mays
  Clone ID: MRT4577_11256C.1
ggggaaggttcaatggatatttgggattatttgaatttagaagtcaaagggttacaacatgacatgaagttgggctggttgtacaaaatttggttttcgggggatgaagggaaaaaccctttgagaggagaaaggccttggacgttcctgggcttgcatgtgcaaatgctgggggggttgaggtttgcgccccaagtaagggatatacccttgcagttgggggt

SEQ ID NO: 13795 - DNA, 291 bp, Zea mays
  unsure (1)..(291): unsure at all n locations
  Clone ID: MRT4577_112570C.1
caccgcgctncgcccactcgctccagccgtttcaccgcgccgccaccgcgggcgcgaggaggccgnncaagaggnncgnggagagcgggcgcgnggcccnggngaacnacggggaggacnanggccgncncgnngncancgncgagggggncgaccagaacagggcacnngnggangccccngananggncaggnnccanggggggggggggggggncncacnnacngacancaananngacannaaacgngnncccaanaagacaggccggaccaaggcgagggaggaag

SEQ ID NO: 13796 - DNA, 357 bp, Zea mays
  Clone ID: MRT4577_112571C.1
gagctagcattttatatatatatatatacggcatgaaacagtatagattattaattatcagctgactagctaggatgcgatcttctttcttcttcttctcttcagtttcctctgcattttgagggcatgtggggccggttgttgggttattctgtgaggctctggcctccggggcactttgagaggacctgatggtggtggtggtggtgattggtgaatgtcactgggaattttggaacttttgtacaggttgatggaggaagcacaggctttaagggaatagacatagcgcttctattcggtctctctattccttgttcgatatggccattgctagtgtcactattttcctcggtg

SEQ ID NO: 13797 - DNA, 283 bp, Zea mays
  Clone ID: MRT4577_112572C.1
cggacgcgtgggttttttatctgatacttttagcaggcttccagcttaatttacagaggatgataacacaggggagctgctgcggttcgatcgaggtcaccgatcgacgacgacgacgacgacatgtacatgctacaaacacgctcacgctcacacaaacttactagtagcagagcacgcgcgcggctagctcgtggaggcagatgccgtatccggcggtgcattcaggcccggtgccgacgcagagaccctgcgcggcgacgaacgctgggcttccgcggct

SEQ ID NO: 13798 - DNA, 262 bp, Zea mays
  Clone ID: MRT4577_112573C.1
ggaaaacattaattttttttttttatttatgcacattaaaagatttaaaatttgcaaagaacaaacaaaaagggaatacaacattatcaaagcatggaatcacattttatatcaccttccgcagcaccacactcactctccccgccggttgtcccctacggacaggcttaaactatgatcttaaacgacgccccgataaacgctgtatattgactttgcacgagtgctaccactgtgtgcacaataggtatggcccgaaaat

SEQ ID NO: 13799 - DNA, 453 bp, Zea mays
  unsure (1)..(453): unsure at all n locations
  Clone ID: MRT4577_112574C.1
acatattcaaggggggaaaggtggagnatattgtgccttcatcacacaactgtgacatggccggatgtgaaccggactgagtgtcanctgattggtatttctnagggtggggggggganccttcttacttcanatggcaacactaaggatnatcttanactcccaactnatnanactcttntggcccanattaagggaggggtcnaaagggggaaggagcttngtnggactgtgcantctgcgatgggggaggagcanatctncgcggtggaggagggggggcccaagtaacttccttggctttggagacgggaccctactgtatctcaacttaaatgggaaaagaagtgtgtcaccaaaggattggtaccgagacattcacctggcttgagctggcttttgctatagcgggcaagggggtnctgggtgtcntacctacctgacttatcatta

SEQ ID NO: 13800 - DNA, 612 bp, Zea mays
  Clone ID: MRT4577_112575C.1
ttcgtgtgcaggccggagggcatgggggaactcgtgttgaggtctatgcatcaacatcttcttcaagaacccaaggttgttggggttcaatgtcggctggacaggggatggtgggggcggccaggtgatgtaagccaaatcgctttcggcctcctccagcagcgctgcgaagacgaggtgctcgaggtggcccagcgggaccacgaactggtgacggaacctgctcaacaaccacgcgcgcttgacctagcccccaccggagaccctcactgtggcctcctgagtcggatcacgcctcaccttgaactgcatcgacgcctcaacctgccggggcaaggtcacgtgccttgcggaggctataagaatgttggggggttgtacaactccatagcttggtgatcacggtggaggactacaacagctcccgcagaaggcctgccagcttgttcgccatggacctcaaccacaacaagctcgatctcttctactgactgctggtgtgcatcagcaccgtcaaccttcatgcatcccctagttcatgtaccggtactttggccgcggcagagtcgacatctgagatatatgaggccttggaattgaggaatggtggat

SEQ ID NO: 13801 - DNA, 689 bp, Zea mays
  Clone ID: MRT4577_112576C.1
accctccgtctccgcctgcgccacagctgccgattcgaaagccctcgtcctgacccctcgcaaaaccctagctccaaccaccatgaagggcaaggccaacgcctccaagaaggatgagggcaggctccgggccggcggcggcggcgccggaaagcgcaagaaggccgccgcgagcggcaagcccaagcgccctccctccgccttcttcgtcttcatgtctgaattcaggcaggagtaccaggcgcagcaccctagcaacaagagcgttgcggccgtgagcaaggcagcaggggaaaagtggcgctctatgtcagagcaagagaagcaaccctatgtggaccaagctgggcagaagaagcaggactatgagaagactaaggcaaatattgagaaggagagcacaagctcaaagaaggctaagactgatgacgacgatggctcgaagtccgaggtcgatgatgaggatggcggtagtgacgaggaaaacgacgacgacgagtaaatagtatctccgctgtcgtgaggtgtttatgaaggggatctattagtttcgtgaggttgttagtttagtgcattagcaaagaaaaagccgaatgctgctagctattacgttgcttttcttttgctaatcacttgtgtcacaactctctgtacctgtttcattgactaatctagtgactagtcagtta

SEQ ID NO: 13802 - DNA, 838 bp, Zea mays
  Clone ID: MRT4577_112577C.1
ccgggagattttcgtgggcggataagcacattcacgcacatccacccgccgccacgcatcgcacgaactcccggtccgaaaggcaaaccagccaccagtcccaccaccaccaccctctgtcttcgcctccgctgccgattcgaaagcacccgtcctgtcccctcgcaaaaccctagctccagccaccatgaagggcaaggctgacacctccaagaaggacgagggcaggctccgcgagcggcaagcccaagcgcccgccctccgccttcttcgtcttcatgtctgaattcaggcaggagtatcaggcgctgcaccctggcaacaagagcgttgcgaccgtgagcaaggcagcaggggaaaagtggcgtgctatgtcagatcaagagaagcaaccatatgtggaccaagctggacagaagaagcaggactatgagaagactaaggcaaactttgataagaaggagagcacaagctcaaagaaggctaagactgaggatgaggatggctcgaagtcagaggttgatgatgaggatggcagcagtgacgaggaaaacgatgacgatgagtaaacactgtctccaaggtcacgaggtagcaaatcgagtgttaggtccccaattagcttactgttttgctgcctttaaatgttaagttgtttcaaacaggtgtttatgaaggggatctattaatttcgcgatgtcgttagtttagtgcattagcaaagaaaaagccgaatgctgctagctgttctgttgcttttcttttgctaaccacttgtgtcacaactttctgtacctgcttcattgactaatctagtgactagtcagttattggttcc

SEQ ID NO: 13803 - DNA, 1593 bp, Zea mays
  unsure (1)..(1593): unsure at all n locations
  Clone ID: MRT4577_112578C.1
atcacgcacatccacccgccgccacgcatcgcacaaacgcgctcccggtccgaaaggcaaaccagccaccagtcccaccaccaccctctgtcttcgcctccgctgccgattcgaaagcacccgtcctgtcccctcgcaaaaccctagctccagccaccatgaagggcaaggctgacacctccaagaaggacgagggcaggctccgggcgggcggcgccgccggaaagcgcaagaaggccgccgcgagcggcaagcccaagcgcccgccctccgccttcttcgtcttcatgtctgaattcaggcaggagtatcaggcgctgcaccctggcaacaagagcgttgcgaccgtgagcaaggcagcaggggaaaagtggcgtgctatgtcagatcaagagaagcaaccatatgtggaccaagctgggcagaagaagcaggactatgagaagactaaggcaaactttgataagaaggagagcacaagctcaaagaaggctaagactgaggatgaggatggctcgaagtcagaggttgatgacgaggatggcagcagtgacgaggaacgctatgcgcttccccacccaaaaggcaaaccaaccaccagtcccaccaccctccgcctccgcctgcgccacagctgccgattcgaaagccctcgtcctgacccctcgcaaaaccctagctccaaccaccatgaagggcaaggccaacgcctccaagaaggatgagggcaggctccgggccggcggcggcggcgccggaaagcgcaagaaggccgccgcgagcggcaagcccaagcgccctccctccgccttcttcgtcttcatgtctgaattcaggcaggagtaccaggcgcagcaccctagcaacaagagcgttgcggccgtgagcaaggcagcaggggaaaagtggcgctctatgtcagagcaagagaagcaaccctatgtggaccaagctgggcagaagaagcaggactatgagaagactaaggcaaatattgagaaggagagcacaagctcaaagaaggctaagactgatgacgacgatggctcgaagtccgaggtcgatgatgaggatggcggtagtgacgaggaaaacgacgacgacgagtaaatagtatctccgctgtcgtgaggtagcaaatcgattgttaggtccccaattagctcactggtttgctatctttaatgttaagttgtttggaacaggtgtttatgaaggggatctattagtttcgtgaggttgttagtttagtgcattagcaaagaaaaagccgaatgctgctagctattacgttgcttttcttttgctaatcacttgtgtcacaactctctgtacctgtttcattgactaatctagtgactagtcagttatgggtttaatgtttggttttggttttatatatttctttgttgctttctgtgcggcctacggaagtcatctgtgctgtatgaatgatgaatatgtgcttgtggctcgtttcattttaaaaaaagaacccganggaaaaatataccaactgatattgttttgggacaaggactattctgggaaggggctttnggtcagattacactcaagaattaacatgacatg

SEQ ID NO: 13804 - DNA, 296 bp, Zea mays
  Clone ID: MRT4577_112579C.1
aggaccacacctcaaaagagtttccggggtttccatagatgtttttttccccttttgtgacacaactgactccctttcttatttcaggtccaggcaaagggccccccaatggcttttttaacccggacaacaaaattcaatcctgacaaaattttttcccatagacattaaaaattccccactggtttcttatcaaggggggatcgcaaaaaagacaaggtcctggtaaattcagggccctgctgcccgaaaccattgggggcctcgaccctcaagtccatcccattgttttgggg

SEQ ID NO: 13805 - DNA, 622 bp, Zea mays
  Clone ID: MRT4577_11257C.1
ggcaaccctcctttgcctcagatacctgcccactacttgagaataaaggatgggagcatacccgcatcatccatccaaaagtacattatgcagaagctcagtcttgtaagtgaatccgaggttgaaataagctgctgcgggcagacagtggggaaccttgggcaacccgtgcgcaacctggtggagcggtggctgagggttggcccggcacgcccgctgcacaccgtgataggctcctccgggggagattacgtgatggtgataagctatgggcggccgaagtctgcgtcctcttgaaaacgcgcccgtcgtcaaccatcagggaagagttcttttttgagtgtcatatactcgatagcgttagcgtagcctgctgctcatcctctcaccgatgtttctaagattatgcttatctgttctttaagaaatcgtttgtttgtttgttcgttcgtggttaccatgcataatacatgtgtgatggaagttgctgtaatttgggatttggtaggctgcctgtgagaactgacgtttaggttggataatatacaaacagaggctagatcgttaacctgagcgatgagtccctacgcgggagagtgctgctgattcagtttttcccttc

SEQ ID NO: 13806 - DNA, 1574 bp, Zea mays
  Clone ID: MRT4577_112580C.1
cccacccgggcggcgcgctcccatccgccggccgggatcgcacaaacgcgctcccggtccgaaaggcaaaccagccaccagtcccaccaccaccaccctctgtcttcgcctccgctgccgattcgaaagcacccgtcctgtcccctcgcaaaaccctagctccagccaccatgaagggcaaggctgacacctccaagaaggacgagggcaggctccgggcgggcggcgccgccggaaagcgcaagaaggccgccgcgagcggcaagcccaagcgcccgccctccgccttcttcgtcttcatgtctgaattcaggcaggagtatcaggcgctgcaccctggcaacaagagcgttgcgaccgtgagcaaggcagcaggggaaaagtggcgtgctatgtcagatcaagagaagcaaccatatgtggaccaagctggacagaagaagcaggactatgagaagactaaggcaaactttgataagaaggagagcacaagctcaaagaaggctaagactgaggatgaggatggctcgaagtcagaggttgatgacgaggatggcagcagtgacgaggaaaacgatgacgatgagtaaacactgtctccaaggccacgaggtagcaaatcaagtgttaggtccccaattagcttactgttttgctgcctttaaatgttaagttgtttcaaacaggtgtttatgaaggggatctattagtttcgcgatgtcgttagtttagtgcattagcaaagaaaaagccaaatgctgctagctgttctgttgcttttcttttgctaaccacttgtgtcacaactttctgtacctgcttcattgactaatctagtgactagtcagttattggttcaaaaaaaaaaaaaaaaaaaaaaaaaaaataaaaggtgcattccaaggcggcaggggaaaagtggcgctctatgtcagagcaagagaagcacccctatgtggaccaagctgggcagaagaagcaggactatgagaagactaaggcaaatattgagaaggagagcacaagctcaaagaaggctaagactgatgacgacgatggctcgaagtccgaggtcgatgatgaggatggcggtagtgacgaggaaaacgacgacgacgagtaaatagtatttccgctgtcgtgaggtagcaaatcgattgttaggtccccaattagctcactggtttgctatctttaatgttaagttgtttggaacaggtgtttatgaaggggatctattagtttcgtgaggttgttagtttagtgcattagcaaagaaaaagccgaatgctgctagctattatgttgcttttcttttgctaatcacttgtgtcacaactttctgtacctgtttcattgactaatctagtgactagtcagttatgggtttaaaaaaaaaaaaaaaaaaaaaattaaaaaaaaaaaaaaaagggcggccgccaccgcggtggatgtgctgtatgaatgatgaatatctgcttgtggctcgtttccagtttagtgagtttttgttttgtgactcaggttaatttacatgagtttgtttgtgactgttaaaaaaaaaaaccacaccc

SEQ ID NO: 13807 - DNA, 392 bp, Zea mays
  Clone ID: MRT4577_112581C.1
ctcctcggttcctcacagtcacagagcctcacgtcacgtgtacctcccccaacccaacccagcccaacccagcccaaaacctagcgggcgaggggccggggaaccgaccgccggacgcggagatggaccacgcggcggaggcgcagcggacggacctgatgacgatcacgcggcacgtgctcaacgagcagagccgccacccggagtcccgcggcgacttcaccatcctcctctcccacatcgtcctcggctgcaagttcgtcgccgccgcggtcaacaaggccggcctcgccaagctcatcggcctcgccggagagaccaacgtccagggcgaggagcaaaagaagctggatgtactgtccaacgaggtcttcgtgaaggcgctcgtcagc

SEQ ID NO: 13808 - DNA, 257 bp, Zea mays
  Clone ID: MRT4577_112582C.1
cacaagctttttttttttttttgtttttttttttttgtgcatcatagtacatcaagcggccgatagtattcattaaaacacaaaactttattatgaccatgcatatattattggtcataccacacatgataatgtgtgtcaggttactggattattacatatatggtatgacagatgattatgcaggataataaccaaatatcatgtattaatgaatcgatcgaccggtagaggtgtatcctcggcggttggtgcgg

SEQ ID NO: 13809 - DNA, 1586 bp, Zea mays
  Clone ID: MRT4577_112583C.1
aaaccaaaaccaaacattaaacccataactgactagtcactagattagtcaatgaaacaggtacagaaagttgtgacacaagtgattagcaaaagaaaagcaacataatagctagcagcattcggctttttctttgctaatgcactaaactaacaacctcacgaaactaatagatccccttcataaacacctgttccaaacaacttaacattaaagatagcaaaccagtgagctaattggggacctaacaatcgatttgctacctcacaacagcggaaatactatttactcgtcgtcgtcgttatcctcgtcactacctccatcctccattatcctttatttcaattcgctcatcatcgtcgtgtgttggggacataaataaagctcttgtgcccatattaaaaaaaaaaaaaaattcggacgcgtgggtcgttatcctcgtcactaccgccatcctcatcatcgacctcggacttcgagccatcgtcgtcatcagtcttagccttctttgagcttgtgctctccttctcaatatttgccttagtcttctcatagtcctgcttcttctgcccagcttggtccacatagggttgcttctcttgctctgacatagagcgccacttttcccctgctgccttgctcacggccgcaacgctcttgttgccagggtgctgcgcctggtactcctgcctgaattcagacatgaagacgaagaaggcggagggagggcgcttgggcttgccgctcgcggcggccttcttgcgctttccggcgccgcctccgcctgcgccacagctgccgattcgaaagccctcgtcctgacccctcgcaaaaccctagctccaaccaccatgaagggcaaggccaacgcctccaagaaggatgaggccaggctccgggccggcggcggcggcgccggaaagcgcaagaaggccgccgcgagcggcaagcccaagcgccctccctccgccttcttcgtcttcatgtctgaattcaggcaggagtaccaggcgcagcaccctggcaacaagagcgttccggccatgatgtcttattttttcgtgttggtggatcaggtgagcaaggcagcaagggaaaagtggcgctctatgtcagagcgagagaagcaaccatatgtggaccaagctgggcagaagaagcaggactatgagaagactaaggcgaactttgagaagaaggagagcacaagctcaaagaaggctaagactgatgatgacgatggctcaaagtctgaggttgacgatgaggatgacgaggacgatgagtaaatactgtctccgcagtcatgagatagcaaatcgagtgttaggtccccaactagcttaccggcttgttatctttaatgttaagttgtttggaacaggtgtttatgaaggggatctattagtttcgtgaggttgttagtttagtgcattagcaaagaaaaagctgaatgctgctagctgttctgttgcttttcttttgttgctgctagctgttctgttgcttttcttttgctaaccacttgtcacaactttctgtacctgtttcattgactaatctagtgactagtcagttattggttt

SEQ ID NO: 13810 - DNA, 369 bp, Zea mays
  Clone ID: MRT4577_112584C.1
atcccccacgcgtccgccaaattagagattcaaaggttgagacagaaaaggttcaaaaaggaaaagaagaagaagaacgtttcaaattcaagaagcctgcatctaggcaatgaaaggaaaaagagaggtggctgtgctctactcgctcgtggatcgaacaaggagtctggcagcagcactgatggttttgttccatatgaatggaaacgtacgatcttttcctggctgattgatctggatgttctatcagtcaacactaagcataaatgtatggatggaagccactcaaaggttttactagagggttttgccactaaggatgggattaactgcagctgctgtaacgaggtctattcagtgcttgaattt

SEQ ID NO: 13811 - DNA, 976 bp, Zea mays
  Clone ID: MRT4577_112585C.1
cacgcacatccacccgccgccacgcatcgcacgaactcccggtccgaaaggcaaaccagccaccagtcccaccaccaccaccctctgtcttcgcctccgctgccgattcgaaagcacccgtcctgtcccctcgcaaaaccctagctccagccaccatgaagggcaaggctgacacctccaagaaggacgagggcaggctccgggcgggcggcgccgccggaaagcgcaagaaggccgccgcgagcggcaagcccaagcgcccgccctccgccttcttcgtcttcatgtctgaattcaggcaggagtatcaggcgctgcaccctggcaacaagagcgttgcgaccgtgagcaaggcagcaggggaaaagtggcgtgctatgtcagatcaagagaagcaaccatatgtggaccaagctggacagaagaagcaggactatgagaagactaaggcaaactttgataagaaggagagcacaagctcaaagaaggctaagactgaggatgaggatggctcgaagtcagaggttgatgatgaggatggcagcagtgacgaggaaaacgatgacgatgagtaaacactgtctccaaggtcacgaggtagcaaatcgagtgttaggtccccaattagcttactgttttgctgcctttaaatgttaagttgtttcaaacaggtgtttatgaaggggatctattaatttcgcgatgtcgttagtttagtgcattagcaaagaaaaagccgaatgctgctagctgttctgttgcttttcttttgctaaccacttgtgtcacaactttctgtacctgcttcattgactaatctagtgactagtcagttattggttcaatatttggtcttggttttatatatttctgtgttgcattctgtttgccctacggaagttgaggtgattcgttccttatgaatgggtcaatagctgcttctgactcttcggtgaatttgtgattcggttaattt

SEQ ID NO: 13812 - DNA, 765 bp, Zea mays
  Clone ID: MRT4577_112586C.1
gccggccgttccggagggtgtcattgtcgcggccaaactaactactcgcaccagtttgttgggatacgtcagccgccgccgccgcgaagcccaattctggcgcgtcctccctgtcctgccaaggcgtgctatttctaattctttccattccttcgccggctatacccttggctacacggcaggccagcagcgccgccgtacgtgccgcggatgacgagtgacgacgaagaagggcgattgttttttgccgggtagccggccgggacgcgggacgtgtgccgcctgccgccgtgtgtgccaatccccgatgggggagacgcaccgcaccgcaccgcaccgcaccgcggcgcacggcggaccaccgtccctggtggcgtggcgtatgtcatgcggcggctaccccgaacccggggctttgaccggcgcgcctccctccctgggcctggccctggtgtggaaggaagggaaagggaccgcggcgtgcatggaggacgcagggagagtgggagacagagacaagggtccacgggtgcgtgaccaccaagcaaaacgccaaccccaaccccggccgaacaaccaagccaagccggcaaaccgcaaacccaagccgacaagccgcgccatcgcatgtgcccgtgcttcgcgcttcccccactgacagtaggggcccgcgcacggtggtagtggtacccaacactagccttgggccatgccgacacgccaggctccgtaacgcggccagaacgcatcgcaaactcgcaaatg

SEQ ID NO: 13813 - DNA, 1550 bp, Zea mays
  Clone ID: MRT4577_112587C.1
cccacgcgtccgcccttgcgtccgccgggccgggccgggacacgcccaaccaccaccaccaccctctctgtcttcgcctccgctgccgattcgaaagcacccgtcctgtcccctcgcaaaaccctagccccagccaccatgaagggcaaggctgacacctccaagaaggacgagggcaggctccgggcgggcggcgccgccggaaagcgcaagaaggccgccgcgagcggcaagcccaagcgcccgccctccgccttcttcgtcttcatgtctgaattcaggcaggagtatcaggcgctgcaccctggcaacaagagcgttgcgaccgtgagcaaggcagcaggggaaaagtggcgtgctatgtcagatcaagagaagcaaccatatgtggaccaagctggacagaagaagcaggactatgagaagactaaggcaaactttgataagaaggagagcacaagctcaaagaaggctaagactgaggatgaggatggctcgaagtcagagcttgatgatgaggatggcagcaccgcgagcgaaccgggaaacgcgctcggcgcttccccacccaaaaaggaaaaccaaccaccactcccaccaccctccgcctccgcctgcgccacagctgccgattcgaaagccctcgtcctgacccctcgcaaaaccctagctccaaccaccatgaagggcaaggccaacgcctccaagaaggatgaggccaggctccgggccggcggcggcggcgccggaaagcgcaagaaggccgccgcgagcggcaagcccaagcgccctccctccgccttcttcgtcttcatgtctgaattcaggcaggagtaccaggcgcagcaccctggcaacaagagcgttgcggccgtgagcaaggcagcaggggaaaagtggcgctctatgtcagagcaagagaagcaaccctatgtggaccaagctgggcagaagaagcaggactatgagaagactaaggcaaatattgagaaggagagcacaagctcaaagaaggctaagactgatgacgacgatggctcgaagtccgaggtcgatgatgaggatggcggtagtgacgaggataacgacgacgacgagtaaatagtatttccgctgttgtgaggtagcaaatcgattgttaggtccccaattagctcactggtttgctatctttaatgttaagttgtttggaacaggtgtttatgaaggggatctattagtttcgtgaggttgttagtttagtgcattagcaaagaaaaagccgaatgctgctagctattatgttgcttttcttttgctaatcacttgtgtcacaactttctgtacctgtttcattgactaatctagtgactagtcagttatgggtttaaaaaaaaaaaaaaaaaaaaaaaaaaaaaaaaaaaaaaaaagaccataaggacccacaagctcccgccttctgttccctttcactgagtgtgaattgcttcgattggagggacccggcccctcgctcgcctcctgcctgtgtttggtttccggtcgctatttctcaccccttgcctagccca

SEQ ID NO: 13814 - DNA, 324 bp, Zea mays
  unsure (1)..(324): unsure at all n locations
  Clone ID: MRT4577_112588C.1
atcatccccccccccactttnncaaatcaaaaatatttctctaataaacaccccatcattctccaatcaactccatcaacttaaattataacatcccacaaaattccattataacaccaccctttttctcaattacaccccttcttcctactctttcttacactcttttaccttttttatccaanctaccttctctcatcccatcttataaccttaacaaaccttcttaaataaacatcatcaaccaaaccaacaatacaaaccaaataataaattcctattattttaattctttcttttaaatttccatttcttatacaaaaa

SEQ ID NO: 13815 - DNA, 1648 bp, Zea mays
  Clone ID: MRT4577_112589C.1
cccacgcgtccgcccacgcgtccgcccacgcgtccgggccaacgcctccaagaaggatgagggcaggctccgggccggcggcggcggcgccggaaagcgcaaaaaggccgccgcgagcggcaagcccaagcgccctccctccgctttcttcgtcttcatgtctgaattcaggcaggagtaccaggcgcagcaccctagcaacaagagcgttgcggccgtgagcaaggcagcaggggaaaagtggcgctctatgtcagagcaagagaagcaaccctatgtggaccaagctgggcagaagaggcaggaccttcaaagggtggtgccaccagagcgagaactgcatcaccgtctgcaagagcgagggcaataccggcgggttctgcaagctcggggcttgcatgtgcaccaaagagtgtgtcgggagtactggcgctgctggtgctaataaagccccacagcagcatttgagttgatgagtagtaatgaagaacgcgtgggcggacgcgtgggcggacgcgtgggcggacgcgtgggcggacgcgtgggcgcgctcggcgcttccccacccaaaaaggaaaaccaaccaccactcccaccaccctccgcctccgcctgcgccacagctgccgattcgaaagccctagtcctgccccctcgcaaaaccctagctccaaccaccatgaagggcaaggccaacgcctccaagaaggatgagggcaggctccgggccggcagcggcggcgccggaaagcgcaagaaggccgccgcgagcggcaagcccaagcgccctccctccgccttcttcgtcttcatgtctgaattcaggcaggagtaccaggcgcagcaccctggcaacaagagcgttgcggccgtgagcaaggcagcaggggaaaagtggcgctctatgtcagagcaagagaagcaaccctatgtggaccaagctgggcagaagaagcaggactatgagaagaccaaggcaaatattgagaaggagagcacaagctcaaagaaggctaagactgatgacgacgatggctcgaagtctgaggtcgatgatgaggatggcggtagtgacgaggataacgacgacgacgagtaaatagtatctccgctgtcgtgaggtagcaaatcgattgttaggtccccaattagctcactggtttgctatctttaatgttaagttgtttggaacaggtgtttatgaaggggatctattagtttcgtgaggttgttagtttagtgcattagcaaagaaaaagccgaatgctgctagctattaatttgcttttcttttgctaatcacttgtgtcacaactttctgtacctgtttcattgactaatctagtgactagtcagttatgggtttttttgccaaaaaaaaaaaaaaaaaaaaaaaaaaaaaaaaaaaaaaaaaaaaaaaaaaaaaaaaaaaaaaaaaaaaaaaaaaaaaaaaaaaaaaaaaaggggggggcccttttaaaggacccaagtttacttacccttgcttgcaaagtaatattttttttttagggcccccaaaattaaattaattggccgtgtttttacaacttgggaattgggaaaaaccctggctttcccaaatttaatcgctttgaaaaaaaaccccttttccccagttggggtaaaa

SEQ ID NO: 13816 - DNA, 272 bp, Zea mays
  Clone ID: MRT4577_11258C.1
ttcttcttgaagagtatccgtagatatacaggaggttttttcatcggggcacagaaggcacttagttgcttcttatccttccctgtaatactatggtgatatcatttttatgtcgtcatagttggcaatatttgtctaattttcgctttatgtgcatgttcatgtttttttattcatattcttataaaagcttaatctgacttgtacttctattttttttcttcatatttattcttttttacatttttattcttttcactttattttttttt

SEQ ID NO: 13817 - DNA, 483 bp, Zea mays
  Clone ID: MRT4577_112590C.1
actaccaatacacagtcgcctgatctggtcagatttacacggaaccgatactgagagagccaaccttccttccactcttccacttccagtatgtcccacggagaaactttccgcagctgcctgcgcccgctctactaccccgagcgcggcagccgcaagcaggtcgtgccatgcatgacgacgccacgggcggatcgcgtgagggccaggaacagccggactagccagcactgtgtgattccagagacatgatggcgcagctggacgcgccagctgctacgccctctgattcgagatggaggtactctccccgtcgaggcatcaccggtcgacatccccatcacttccatctgctgccagacgttcgaggtgctgcacggtggtgtggcggcgctggtgacttatgcgctgccgagcatggtcgcgcacatggcgtctcctgaccgtcgagaaggcacctctggagtcaccatcgaccacttc

SEQ ID NO: 13818 - DNA, 164 bp, Zea mays
  Clone ID: MRT4577_112591C.1
cttgcagttcccgggaccagaagaccccccaaacatgggcagcgcagcacagacgagcagatgagatgatagctacaggccatgactacgggcccgacaacacgcctcgcgggtttgtgcatagaggagctgcagtacatactcgaggggacaacagcctacgc

SEQ ID NO: 13819 - DNA, 400 bp, Zea mays
  Clone ID: MRT4577_112592C.1
aaaaagggccttttttttttttggggggccccaacctttaaacaaaaaactttttttttgagcttttcctcttaaaaaatttaaaggggggcccccccaatggggggttgttggtaaaatgctgttgggtttgtcaaagcaggttggttgaagggcaacaattgttgcatttgtaaaagggggcccccttttggcccaacgggttggtaaaacggaaacaactggggttttgtcaaaaaggtaccagggtttaccccaattaactggttgaaggggaatagttgttgttgttgtaaataaccagggggagttaaatgtgtctcgttggttgattggaaaaaattgttgggggtaggcaaaaaatacctggctgaatgggaattgttgttgttgccaataa

SEQ ID NO: 13820 - DNA, 468 bp, Zea mays
  Clone ID: MRT4577_112593C.1
taagctcggaattcggctcgaggcttattgctgggctagcctttagattttagctctgatagctagctcaaggggttaggtacatacgtacatcgatccatagatcgatagctaggtgactaccatggcgtccctatcatgtgccgccatcaccggcccttactttacgggcgcacgcgctctcgcaatgttcaacaggaggtccttcaccggacgcgcatctctccgcaaggacactgccaccgacgccgaggacgatgtcgccagcgtactgctagccggcggaggtgccatggcccaggaggtgctggtggtcgcacgcgacggaggtctcgtcttacagcccagccagttcaccgacaaggccggcgacaccattacctttaagaacaacgacggctaaccgcacaacgtcgcgtttcgacgaagactatgtgccaagcggagtcgactccttcaagatctagc

SEQ ID NO: 13821 - DNA, 347 bp, Zea mays
  Clone ID: MRT4577_112594C.1
ggctgacctcatctactcgtacgtgcctctcagtgatactcgttctctataaccgagatgagcggaggtggtagagctggtgtcggaccgaccactccggggcatgctcatcgggagctcttgcgcccgcgtgaccggaatggctgccagctgctggtgatccatctgttgaagatacatctgctgcaaagaatgatggggcctatcaagatgctgctgttcgcaccagacaaaccgatagctaccacatggtgtgatggtcagaacactgggaacttacgtagggactgtccttttttttatgtcaacgctggtcatggaggtggctcatctctgctctacctgct

SEQ ID NO: 13822 - DNA, 820 bp, Zea mays
  unsure (1)..(820): unsure at all n locations
  Clone ID: MRT4577_112595C.1
actccgtggcgttggtcacacaaatatgcgtgtactgggatttccccaatcgctgcagcgcctgctcccgtggctgctttcccgcgttttttttgcctcgcgcaccgtagtggtgatggtggaaggcacgaccgcgcgagcctctatgcatgcggctaccacagaggtttctgcgtgcgaggagcgagacactcgatccgcagtggacgaggcggcggtatagtcttctgcggtgctgggcgaggcaggggggacatcgatccgcggaggaggagcgcgatcgtaccttctgcgctgttggccgaggcaagggggctccatccgcggtgaaggcgctcccgtggcttctgcggtggtggccgaggcagggggaagctcgatccgcggtgaaggcgcgcgtctatggcttctacgctggtggccaaggcgggggaagatgccgatcgcacgtgctggttcttcaattccgccgtcgccttgcaccggaggtcggattccccaaaggcatatggtcggcgacggatccatcacctgcgatggtggagaagctttgcgaccaaaaaaccaaggtggaggaccatcgctccctttgttgtcaggcccttccggngttgtccaagatccatttgcatcgtccacgtttggaagcagcgatggcttctctacatcctttgactgagctgctcatggtatgaaactttacaattttccatcgatttacatgtactgttaaattttcatgttactgtgttagtctgtaagttaagcgtgtctgatcaatttgatttagcatatggtgtgatttgagggagagttgtag

SEQ ID NO: 13823 - DNA, 283 bp, Zea mays
  Clone ID: MRT4577_112596C.1
gtcacatgaattacgaaccttggtggccagtttgtccggaaacacggttttggtggagaggcggccattatcttacaccacatgccatatagagttaagtatataatagtctatgggtgagaaagtgcacatatggaacgctgtatatagagggggctcaagaatctacagagcaactcatactctgtgatctaccaaaaaaaaaaaaaaaaaaaataataaaaaaaaaaaaataataaatataacgatttatttttaatttaattatatgaacaaacttttt

SEQ ID NO: 13824 - DNA, 243 bp, Zea mays
  Clone ID: MRT4577_112597C.1
cccgggtacgaccgagctcactagatcggcggcacgcccttttcttttttcttttgtggctttatacagtatgctggctgtcataccgggctctctaagggtcaggagaaaaaaatgtcaagagactgtcacggtacctcagggttaccagatagacgcatgcacacaactttcattctacacgttgtcgcagtctatcaattaagagacagggaccacaccaccacagctatcctattccgc

SEQ ID NO: 13825 - DNA, 413 bp, Zea mays
  Clone ID: MRT4577_112598C.1
acgtacgctcccgcctcgcctcgcctcgcctcgccccgcacgtcctcgtcaaacccccacggtccaaagtccaaacgctctcccctccggcggctcccctcgcctcaaatctcaccagtcaccacaccccgcgcggccgcagcgccgctcagactcaggctcagctccgccgccgaggcgccacgcgcagccatggccggctccgagcagcgcgtcgtcgccgtcatcatggtcggcggccccaccaaagggacgcggttccggccgctgtcgctcaacgtgcccaagccgctcttcccgctcgccggccagcccatggtgcaccaccacatctccgcctgccgccgcatccccaacctggcgcagatatacctcatcgggttctacgaggagcgggagttcgcgctctacgt

SEQ ID NO: 13826 - DNA, 714 bp, Zea mays
  unsure (1)..(714): unsure at all n locations
  Clone ID: MRT4577_112599C.1
gtccggctggagctccactgcaccgcgcctgctccctggtgcttcctcgctgcgccctcccggcctccagctcgctcgcctcagcgctctggccgagcccctcacgcgcgctcgtctctctcctctgcccagccccaagctcctgcgcgtggctccctgctcgcgtctccggccatctaaagcttgtcggagctctctgctccctcgcgcgttccgcttgtgcttcagctatggcgcttcatcgccgcagttccctgtcctctacgcgctctgctttttgtacgcgtgagttcgtcgtctttgttccagtcatccacacaattttctctgtcgtggtcgtcgcgcgtctacgcgcagctcacgccctgctagcccctgctacgggttgtcgagctctctgcccacgcttagctcgctctttgcttgtttgtcgcgcgcacgaattttatctgctcgccacagcatgttgagctcccgcaccatcatcgcttctgtcgcaagctcgttagccacaattatcttgaccacgtcagcttgctagatctgcaactctatatacgttaccctctcgtatcgtcgtcaagcccgntgattctcgttcttctatgctcgatcttgtcgaacccgaatttcggatattagacaaaaataagcgagggccctgtgtatcgcttataagtactcgattgaagacttcaatcgaagatcgccacc

SEQ ID NO: 13827 - DNA, 399 bp, Zea mays
  Clone ID: MRT4577_11259C.1
ggagagattactttgctttacacttttatcaaggttgagtcctacaaaatggatgggagaagggggcagaaataaacaaataaacgcccgtccctatttacccttttttttttcttttaacctataccctcctatctatcctggaccgagacgagaggagagtggtgaggggggaagatcagcggctaaccaaatgtctcagcagaactacatataccatcaagaagcgcttcgtcttcaccaaccaatcccccccttcaaattcaaccaccccaagctttcttgttgccctgcctacttcctatcctctttccacaaagttatatacccctgtacagaggcagctactcagtttgcggccacttccgccgctctctgcctcatcatctcattcacagc

SEQ ID NO: 13828 - DNA, 315 bp, Zea mays
  Clone ID: MRT4577_1125C.1
tcgttttcaggaacaatacgctttgttgtctgacggtgttttcacgaccttggattgacaagcaacggggtgcaaaccagctttagcacattcctcgttgcctgagccttatgcattattttacgcagcattcccttggcaattttatgcttctgacatgacccacgcttgaccgaattcgaccgcttatccatgggccggcggccgcgcagcttacttgtattgtacagcatcagcaggcacaatgccgtctgtttaccagaatgcttaccgcgatcaaagcaagcagggtgcgttcaggtcttattgatcttt

SEQ ID NO: 13829 - DNA, 295 bp, Zea mays
  Clone ID: MRT4577_112600C.1
tccacgttttcgccaacacctaccaagctggcgtccctgcataggtctggactctgaagggcgtgaaatttgctggtaaaatggatctcatgaagctacgtcccccgcattattctcgacagccactgctgagaaacaaatccataggtctgacacggttgtgttcatggcagagctaatactgttggcacgtgtcacgaagctagtccctttcgcccatatggcaaacatggaaaacccagtatgggtcagtatgagaagagccaatggttcatcaaactaacaaattacgcgg

SEQ ID NO: 13830 - DNA, 1896 bp, Zea mays
  Clone ID: MRT4577_112601C.1
tccgcggcttcgtgggcgagttctcagcaccggccgatccatcctcctccgcctccctcggttcggcctctggcctgcacaccatgaactctcgcttccggagcctctggagagccatggctggggctttgcagccgccgtgccgcctcggagctgccgcgtgtagcttgctcgctaagcagcagctatagtagctgagcgagtgcgtccatcgatcggagtcgtccacctccgtctccctttgcgattcggcgtcgtgaactcgtgttcttgagcgtgggggcaaggggcagagcaacaaggagacacttcttcttcttctttacaacaaataagaaagatacggcaataggcaacactattgtgcattgttacggacctgagtcatctgaagcagtatctcccaagcagggtcgatcatgacttttaaggggcccagtgcgaaatctgatatggaggcctcatccggccggctctgcgactactaaatccggctgggcgggttcccggtgcagaccgctccggtgccgctggtccactccccggcgttcaacctcgacccattcaccaacgcggcggttttctccctcgaggaatccgacctcaaggcgctggcggcgccggggtgcttccgggccccgcggtcgtcgtgccttgaggtcgcggtgtactacctggcccgcttcggcgcttcacgctgtggtgtcctcgcctgcgggaggaagcggctggttggcgtgttcagggtggagctcgcttcgtcggaatggcgggacggcaagcccgtgctgctgcaccatgggtgggcgggcatcggcaagggggcggccaggccggagctccacctcagggtgaagctggaggctgacccccgctacatcttccagtttgacgacgagatcgcgctcaacccgcaggttgtccagctccatggcagcatccggcagcccgtgttcagctgcaagttcatccgcgacaggcggccatctcagagtgaccctttgggcggcgggcagtactggtcgagctccagcagcgaggagcaggacatggagatggtgaggcgggagaggaaggcctggaaggtggtgatccacgacctgtccggctcggccgtagccgcggcgtttatggccaccccgtttgtgccggcgccgggcggggacacggtggcacggtccaacccgggcgcctggctcatcgtgcgcgccgacaccacggggtcctcggacagttggcagccgtggggccggctggaggcgtggcgcgaggcggcggcggcggcggcgagcagcggcaaggacacggtgcgcctgcggctgcacctgctcccggaccgccacgacgactgcgtgctcgtgtcggaggcgcccctgagcagcgacaagggcggggagttcttcatcgacatggacaggcaggcgccctccgccacggcggcggagcactgcgcggcgagcctgggcgccgcgtgcgccggcggcggcttcgtcatgagctgcagggtggagggggaggcgaggagcagcaggccgttcgtgcagcttgccatgcggcatgtcacgtgcatggaggacgccgccatgttcgtcgcgctcgccgcggccgtcgacctcagcgtcaaggcgtgccgcccgttccgcaggaaaccgaacaagaaggccgcctcgccgtcgcccgaccacctcgagctcgacacctaggaacgcagaacaggaaggccccgccgactagcacccatggccgcccatggatccatctaactcgacctgtaaattcacttaatttcaagagctggactgaatcgtttgccacaatcaaaactctgttgtttgactggcctcagcagttagtacatgtttggaagtaaattaattttacagtcataatttatag

SEQ ID NO: 13831 - DNA, 329 bp, Zea mays
  Clone ID: MRT4577_112602C.1
acatggagaatgaagcactcgggtgcattttttatcgttcacataactgtgcttcctctttcatggagatactgctttacatgccatgcgttaactttgtctagtacacgctttgtgcagcatgttcccaacgccgccgagagacatgaatccatggtgaagcccatcttcaagtccacctgcttgagcaccgcggcgcaaacagggagcggaacggcctctaacattcctaacgggttggccgggcccaagctgtaggagatgccaacccacctggtgagcatgacgactgcacgggcccttagctcttggacctcttgatattcctt

SEQ ID NO: 13832 - DNA, 528 bp, Zea mays
  Clone ID: MRT4577_112603C.1
atgactggaaaattaatttacttccaaacatgtactaactgctgaggccagtcaaacaacagagttttgattggggcaaacgattcagtccagctcttgaaattaagtgaatttacaggtcgagttagatggatccatgggcggccatgggtgctagtcggcggggccttcctgttctgcgttcctaggggtcgagctcgaggtggtcgggcgacggcgaggcggccttcttgttcggtttcctgcggaacgggcggcaccccttgacgctgaggtcgacggccgccttgcgccacgcctccagccggccccacgggtgccaactgtccgaggaccccgtggtgtcggcgcgcacgatgagccaggcgcccgggttggaccgtgccaccgtgtccccgcccggcgccggcacaaacgggggggccataaacgccgcggctacggccgaaccggacaggtcgtggatcaccacctttcaggccttcctcttccgcctcaccatttccatgtcctgctcctcgctgctgg

SEQ ID NO: 13833 - DNA, 1040 bp, Zea mays
  unsure (1)..(1040): unsure at all n locations
  Clone ID: MRT4577_112604C.1
ggccctaggggccttttttttttttttttttctcataacaatataacacacattttatatataagttatcgtagtatactggtattatatattcccgttgtaacgcacgggcactcagctagttataatatttgcggttaagtgaactggacgtaggagcggtagtcggtgttgggcctccagttcgccgggatgacattgtaagccacgagcgtgctgccggactcgctgcggatgcgcatcgagaaggggcccctgagcgggcggtaggagtcgaggcgccagacggatccccaggagcggcgcatcagcatccattggccgccggagccggactccatggcgtccatctgcaccacggtgccggccttgttggcgtactcgaccagcaccgccaggtagttgcggttggagcccgcctcgacgtggaagttcacggtcagcccccggtggtcgcaggccaccctccggaactgcatgtcgatgatgcccgcgtgccggagcctgtcgttcatgccgggcctcgccatggacccgaacgccgtgccgctcaggtcgaagtggtacctggccaccgggtagtagttcatgtccgtgatcatcaccgtcctcacctcgccggagcaggcagggttgttcttggcggtgcaccgtatctgctagcatgcgccaataattagcccgtcctggaacaggggctggttgccgcacgacgtcatggacatgaacggatactggttggtgttcttgaacccgcacgcgccgccgttgtcgttggggccggcaccgttgggcgcgccgtaccaggtggccttggccgcctgccagccgccgccgccgctggagcggagttggcgcacagcggaggtgcggttcatcgccgcttgcgcgccgcttgcgccggaatgcatgacgacaagcaccgcgaggagggcgacaagtgcagcagctgccatctcagctcgtgtagtgtgtgtaccaacanaaaccttgtattaggtgtatgctcgtgtgagatcccggcccggccggcctcgagg

SEQ ID NO: 13834 - DNA, 1392 bp, Zea mays
  Clone ID: MRT4577_112605C.1
tttctccctcgaggaatccgacctcaaggcgctggcggcgccggggtgcttccgggccccgcggtcgtcgtgccttgaggtcgcggtgtactacctggcccgcttcggcgcttcacgctgtggtgtcctcgcctgcgggaggaagcggctggttggcgtgttcagggtggagctcgcttcgtcggaatggcgggacggcaagcccgtgctgctgcaccatgggtgggcgggcatcggcaagggggcggccaggccggagctccacctcagggtgaagctggaggctgacccccgctacatcttccagtttgacgacgagatcgcgctcaacccgcaggttgtccagctccatggcagcatccggcagcccgtgttcagctgcaagttcatccgcgacaggcggtgagtgtcttgctcgcgatcaatcatattgcaattgcacttgcacgcatgcatcaagttcatctgaatgcttgtgcctgcatgcaggccatctcagagtgaccctttgggcggcgggcagtactggtcgagctccagcagcgaggagcaggacatggagatggtgaggcgggagaggaaggcctggaaggtggtgatccacgacctgtccggctcggccgtagccgcggcgtttatggccaccccgtttgtgccggcgccgggcggggacacggtggcacggtccaacccgggcgcctggctcatcgtgcgcgccgacaccacggggtcctcggacagttggcagccgtggggccggctggaggcgtggcgcgaggcggcggcggcggcggcgagcagcggcaaggacacggtgcgcctgcggctgcacctgctcccggaccgccacgacgactgcgtgctcgtgtcggaggcgcccctgagcagcgacaagggcggggagttcttcatcgacatggacaggcgggcgccctccgccacggcggcggagcactgcgcggcgagcctgggcgccgcgtgcgccggcggcggcttcgtcatgagctgcagggtggagggggaggcgaggagcagcaggccgttcgtgcagcttgccatgcggcatgtcacgtgcatggaggacgccgccatgttcgtcgcgctcgccgcggccgtcgacctcagcgtcaaggcgtgccgcccgttccgcaggaaaccgaacaagaaggccgcctcgccgtcgcccgaccacctcgagctcgacacctaggaacgcagaacaggaaggccccgccgactagcacccatggccgcccatggatccatctaactcgacctgtaaattcacttaatttcaagagctggactgaatcgtttgccacaatcaaaactctgttgtttgactggcctcagcagttagtacatgtttggaagtaaattaattttacagtc

SEQ ID NO: 13835 - DNA, 513 bp, Zea mays
  Clone ID: MRT4577_112606C.1
ccacgccgccccagcaccagccgccgctgtgcacctttccgccccagcgccagccgcctccccggccacgcctgtcctcgctgactccaacatcaacggcaacgctgccgactacttccgtgtccaaccgtcgacggcgagtggcggctcgccgcagtcgtcctagtcaagttagtgctaatcagccatggttatttgtagagcctcgtgtctaattaaccaaccctaatggagcgagcaatggtgggatgcatgggactatcgaatatgggagcgctagtgagaaggctgctgctggtctttgttaatggtggagcccaaagaaggatcgtggggttttgggatctgatgatgtaatgattcaggattagcgcttatggtactagtagactgttagaccaactccactgaactgtactttgtcctcgtctaggatatcatgttgttccatataaaaatgcgatctgtccactgttgggttggctttaatacatatcgatttttacttttaag

SEQ ID NO: 13836 - DNA, 380 bp, Zea mays
  Clone ID: MRT4577_112607C.1
cccacgcgtccggatcgcggaccaggctctgctctcccgccgccagctgctgggccgggtcctgcagtacgccgtctctacgtcgtctgccaggaacgcacccttcgacatcagggccaactccagccctccacccaagcaatgtgcctacaggcagactatgttcgcgttcaagcactccctctcctacctcgatggcacgctgcccagcgactatcgcttagacccactaggcctctcggaccccgagggcaccggacacttcatcgagcccaagtggctgacctatggcgaagtgatcaacggccgctacgccatgctgggcgcagagggcgccatcgacccggagatcttcagcaagatgggcatcatgccccccg

SEQ ID NO: 13837 - DNA, 201 bp, Zea mays
  unsure (1)..(201): unsure at all n locations
  Clone ID: MRT4577_112608C.1
aagtggaggagctagttgtaacattaagctgctgccattacacatatatacgttgttacagaatcccctaacacacagggagagnataactacgtgcttttgtatttttggcatcttcggcatgttacaaaaaaatttaagatacaactactagtttttattgactttacagacagaccgacccgacgaggtgagcagtac

SEQ ID NO: 13838 - DNA, 775 bp, Zea mays
  Clone ID: MRT4577_112609C.1
ccgggtaaatctttagttatattctatccctttgagtctatttactggctcttaccagttaccatgtcaaattcggtttttccctacctctcgttccgttgctatcgtgccttagagttctactacacactggtgtctttggagacccctgttggacatgtcaaaactatctcaaccggtgatggacaagtttttcttcaattggtgctacccctagcctattacgtatgtcatcattctagactcgatctcttctattttgaccataaatccaacgcaacatacacattttcacaacacttatgtgttgaacatatcatcttttgtaggcaacattctccaccatacagcatatcaggactaattgtcgtcctatacaacttgtcttttagcttctatagtaccatattgtcgtatagaaaaagccagatgccacttcatccaccatgctttgattctatggctaacgtcttcattaatatctccgtctgtttgtagcattgaaagtccagattgcccattactaataaatgatttgaactgaagaagtcatttgcaaatacacaatgtgatggatgaatattgaatatattttttcctgattattcttactggatgctcttgctatgcagatgatgatatcatcctcctctcttttgtcaatattagtaattgaaagagttgatgagaggggtgggctatcttgtttggtctcactcctatctcttatattagtgagcagtgcatgtgaaaggtataaatatttgtcacactc

SEQ ID NO: 13839 - DNA, 740 bp, Zea mays
  Clone ID: MRT4577_11260C.1
tttggtgggggaacaagagaagacatggagagattactttgctttacacttttatcaaggttgagtcctacaaaatggatgggagaagggggcagaaataaacaaataaacgcccgtccctatttacccttttttttcttttattaacctataccctcctatctatcctggaccgagacgagaggagagtggtgagggggaagatcagcggctaaccaaatgtctcagcagaactacacggctggcactgtccagagacacccggcgacgaggagatcagctcacttcagcccagctagcaccaccaggtcaaatcaaagaattcaccacacccccaagggttgaggagacaacgtgagcagggtgtggctggttagcactgcctaacatcagtaatggtgtgccttcttgagctctttggaggacgacggggcagaggataagaaatccacgttgaagcgcttcgtcttcaccaaccaatcccccccttcaaattcaaccaccccaagctttcttgttggcctgcgtacttcctatcctctttccacaaagttatatacccctgtacagaggcagctactcagtttgcggccacttccgccgctctctgcctcatcatctcattcacagcagccctcctccgggaatcagactgctgctgcaaccttctgagatgctccttcaaatccctgcaccgggcactttgcactctgaatctttgcaagcccgggcgtggagtt

SEQ ID NO: 13840 - DNA, 564 bp, Zea mays
  Clone ID: MRT4577_112610C.1
acccccccccctcccccccccccccccctctcaaaaaataataaatcttttcattttacttgtctgcattttacagggcaaataaataatcaaaaagcattggtcatgttccaacaattcaacatttgctgttctaacacaaaatttttgcttcttcatctgagcttgtttgttttcagttttgtaaagatgaaaacttaaaaaaaagcagatgaaacttcttcccgtgaagtatccattggaagtatcggtacggatggtatgtccagaggttttgtcctttttgttactgacaatttcaatccttctgtggtgtgtattgaacctcctgtagtcattttcaccggaggagctcctggggcaatctgaaagttaaatcttcgaataagcattgcgattgctaccacattctcaaaggaagcaaacatgtcgcctatacatttcccgcggtcctccaccgaaaggtaagtaacctgaagttttggttcgtctcatttgggtttgggccatccaaaggccatctctcggaattgaacttttctgcattatcccaatgcagaggac

SEQ ID NO: 13841 - DNA, 661 bp, Zea mays
  unsure (1)..(661): unsure at all n locations
  Clone ID: MRT4577_112611C.1
tcgaggccggccggtccggggatccaccagctgatcttttcctctcttctcgcctgccagttgcaccacagcatctgtatcgtcggaggccgggactgcgtggccatggcgccgcccaacgactccgagccatgcacgcaccaccggctgcccgcggacgagctgcagccgccgccgccggctacgtgctgcggcgccgctttggacgaccgggcgccggcggcggcatgggcgtcgtcgccgtccgagcctgaccaggtggcggcggcgcctgctgctcaggaggcggagaagaagcagaacagcgcgacgacgacggaggccgaagcagcagcgggaagcggcgccgggcgggagctggtggcggcgcggcggccggcggcggcggcggaggagagcgcgcgggagcggctgaagcggcatcgcgccgagatggcggggcgggtgcggatcccggagatgtggggccaggagcggctgctcaaggactgggtcgactgcgccgtcttcgaccgcccgctcgccgacaccgaggggctgctcaccgcccgcgacgcgctcgtcgccgagtgcgccgncgcgcgccgncggccggccgtctcgcacggctccgcggggcgcccgctacgggtgcacaacggctggtcgtgagcgctgcaca

SEQ ID NO: 13842 - DNA, 549 bp, Zea mays
  Clone ID: MRT4577_112612C.1
ctggccgggatagccgtatctgctatgtggacgaagcgaaaggttaccatctgcgccacggctagatctccacctcgcctactcaaaaccgacggctagcttcaccggagagagcgcggctacgttctctgggccgttatattgtcctcccagattgaggtcgaccgcttttacatctacattctcaaagatggggacctcttctggcgcgagtttacattcgcaacctactacgacccaccggatgctgcctcctatgcatggtccacgcccatcaagcgtgtaaacctcgatcttgctgacctctacggagcaaggagcctcgcctgacatgcatgagcctgcatcaaactgatagccagggcgtgatttcgccactgagagcgccaggtccagagacacatggccagctgagccataccagagcactggggcagaggctggcatggatgctgctacgaaggcgaggagaaacgaggtggtaaatggggtatccaatccgtaggccatacatggaccctcctcacggatgagtgctatgctgctgcc

SEQ ID NO: 13843 - DNA, 352 bp, Zea mays
  Clone ID: MRT4577_112613C.1
atttctaaaaaaaaaaaaaaaaaaaaaaaaaaaaaaaaaaaaaaaaaaacaaaaaaacaaaaaaaaaaaaaaaaaaaaaaaaaaaaaagtttgtaccttgcccgggcggccggttggaaggggcaaatggctgaaattttccataaccctgtccgcctgttcgggcctccttctatgcgggcccaagggccccctatgggggtgtcgggttacaatttacctggccgcgggtttacaacttcccaacctggaaaacccctgaaactctccccattcactcgcttttgggccttacccccctttccccttttggcgtattgcgaaaaaggccagagcccctcgcctttccccc

SEQ ID NO: 13844 - DNA, 759 bp, Zea mays
  unsure (1)..(759): unsure at all n locations
  Clone ID: MRT4577_112614C.1
gaaacgaatgcgaatttatttgtttatcaccttttgtttttggggttttcttcccccccccctctcccctcctcctctcttcgttcactcctctgcgtccggtcttcttcgtcccctccgtcgccttcacacctgcttgccatttgcgatttcaccgtcccgtcccgtcccgtggcgcaacgaccgccgccttccggccacccggtcgcggctcccccggattcgcgcccaccgcgcctccggatcgtctcggagatctgccgctgagggagttgcatataatctgagctggtgcgattgcgagtgtaatggagagctgccacagggtgctcgccttgctctcccagccgcatgaccccgcgcaggccaggagcatagctctgggcacggacgaagcatgtgccaggttcaggaaggtggtctctctactgagcaatggaggagcggggctaggagaagccgggccgtcatgcggaagcgcaagcgcaagccgtcctagagctaagcttgttagcagaagacagaatccagggttcttgacccagaaaggcttcctggacagcaacaccnccggtcgtggtgttgaacagcgcccatccttctactacctccgcgcaggtgtaccctagaactggagctctcgtcgatgcacagagcgtgcaccccctcnggagtcggaggacctcccaagctggtccagcccttgtcggcgcacttttcagttcggcagggtgccgggcttcggtatcagttcccgaa

SEQ ID NO: 13845 - DNA, 1092 bp, Zea mays
  unsure (1)..(1092): unsure at all n locations
  Clone ID: MRT4577_112615C.1
ggtgtacggattttcgtggcggtttggtgcttgccgcctttgtctggccgcgagttcctggcgtgcgaatctttggattattatttagggcgcgttccgtccgtgcggtgggggttctcctcgcgtcctttttgatgcgtccgcacgcaagagatcgtcgccccggatcgtttacttgccgcggccggcgaccgtcggtctcggcgtccgcgcccgccgcttctgggatttcttgcggagacggctccccatcccgtcgtcccccgtgatccgctccgctcacgacacgagctggctagctctactaataggctttctccgatgcctgttgcgtgcgtggtgaactgttcttgcgataaaagagctgagcttctgagccttacgtaggatctgagtgattcttttttttaacctgctgtccagatctgccgctgagggagttgcatataatctgagctggtgctcctcaagtgttcggaagaggtccctgttttattcgttttttgttggtgcgagtgcgagtgtaatggaggaagtggaggaggcgaacagggaagccgtggagagctgccacagggtgctcgccttgctctcccagccgcatgacccggcgcaggccaggagcatagctctgggcacggacgaagcatgtgccaggttcaggaaggtggtctctctactgagcaatggaggagcggggctaggagaagccgggccgtcaggcggaagcgcaagcgcaagccgtcctagagctaagcttgttagcagaagacagaatccagggttcttgacccagaaaggcttcctggacagaacacccccggtcgtggtggttgacagcgcccatccttctactacctccgcgcaggtgtaccctagaactggagctctcgtcgatgcacagagcgtgcaccccctcggagtcggaggacctcccaagctggtccagcccttgtccgcgcactttcagttcggcagtgtgccggctcggtatcagttcccgaatcagcagcagcagaagttgcaggccgagatgttcaagagaggcaacagcgnggtttaaccttgaagttcgagagcgccagtggcact

SEQ ID NO: 13846 - DNA, 277 bp, Zea mays
  unsure (1)..(277): unsure at all n locations
  Clone ID: MRT4577_112616C.1
gttattggagtcggagaggagaggaaagcaggaggaggcgacaggtgctcgcccgccccaccgccgggaagactcgctccgccgcccgccgcccgccgcccgccggagatggcgatgaccgtggaagtgctcgctggacttgcgtgtatgttctccacgagcgttcttttgcaaatcctggcatgtgctttgtacaacaactggtggcctatgttagcagcactcatgtatatcattgtgccaatgccatgncctggttctttggcgacggatccac

SEQ ID NO: 13847 - DNA, 106 bp, Zea mays
  Clone ID: MRT4577_112617C.1
cctgtgaacacccatggcgccctcttgcttggaatcgtggtttcaaccggttaggttcctgagatatcctgcaaaaggcctttgagaacctgaaaattcccgtttt

SEQ ID NO: 13848 - DNA, 572 bp, Zea mays
  Clone ID: MRT4577_112618C.1
gggaccctcgaggccggccggggcaactgttcttgcatcctgcctagctcaagacacagccgaaaagagagactcatccatagatgatgcctcccctaggagcagcacggcgagctactaccgtgccctcctctatccggcgtgctgaggcttctacacgctccacaaagacgagctcaggctccccttgtgtgcggcacctatgccgtaaccatggacgacagcaaggggcagcgtatgtgacacagctcatacgactcctcttagggctgctgcacagcgaccatggaagccgtatccttctcccccaacaaacatcaactccgccattgaagtccaccatacatagacaccgatatcgacatgaatctatgtaaacgcacagaagttatgactatctccgatgagaaatatattagacatcacatcgcaagcctacagttcttttagccgtaaaataactatggctgcttgatatggataatgataaatattatggcattcaacctgtgtgaggataacattcatgataattgatgagaaccctgcagatgttactattaatctgaata

SEQ ID NO: 13849 - DNA, 152 bp, Zea mays
  Clone ID: MRT4577_112619C.1
acggacgcgtgggtaaggtttaaatgcagtcattttggagaactcccttgttcatgcttttgtcgggcttcttcaaaaggagagaggactttcttcatgacatgatggcatgtgaggcatcttccttttctccgcaacccttgtcatggcct

SEQ ID NO: 13850 - DNA, 326 bp, Zea mays
  Clone ID: MRT4577_11261C.1
aaaaaaaaaggtttttgccgatacaaaccccgaattacaaaataattgataaaaaaaaaaagggggttttttttttttcctttggggggcccaatttacccaaattttaaccccaaagagcctttttaacttccaaatttaaagataccccttttcccacataggaagctttttttttggatttccaaaaaaaaattttaacaaaaaaaccacatttcgaaacttattttgtaggcgggatttccaaaacggccccccaaaaaaaaacaactaattttttggggtccttgacggggaggtttttggggtggggggaaaaataaccc

SEQ ID NO: 13851 - DNA, 501 bp, Zea mays
  Clone ID: MRT4577_112621C.1
cattgggaccctcgaggccggccgggatcctcgtcccaatcgacaatcaatccattggccctccaccacacgacaaaatgtgtcttctcgtcaggaaattctcggcgccaattgccaagacgatgtggactttctacggctctggtgttgtcatcctctacggtgtcactctggcgtgaacggcatgccccagggcgacgagtacaagaacgacccgcgaaaccacggcgacaagaagcagtcagcgaaccactaggctttacattgtctgacgcgaaaagcgcatcttgagcatatggatgttatcagatgcacagaacaataaccgcaaaaatggcagaacgtatggaaatgtcgtactgagactgccatatacatatcaccaaattactcatgtgcacaccaacaggtatagggctgttctgcccagactatagattctagtgtgctctacaatatgctccacctccgacgaacacaacaaaaaagaacgagtacctg

SEQ ID NO: 13852 - DNA, 435 bp, Zea mays
  Clone ID: MRT4577_112622C.1
ctctgatgaagatcctcaccgagagaggttattcctttaccactactgcagagcgggaaagggtgagggacataaaggagaaacttgcgtatgtggcacttgattacgagcaagagctggaagcagcgaagagcagttcctctgtggagaagagctatgagttgccggacgggcaggtgataaccatcggtgctgagcggttcaggtgccctgaagtcctcttccaaccatcgttggttggaatggaagctgctggtatacatgagaccacttacaattccatcatgaagtgcgatgtcgatatcagaaaagatctgtatgggaatattgtgctcagcgggggggacaaccatgttccctgtatcggtgatcgcatgagcagggaaacactgccctgccctagcacatgagatagggtgtcgcccgctgacggaa

SEQ ID NO: 13853 - DNA, 405 bp, Zea mays
  Clone ID: MRT4577_112623C.1
accttgtactcgtgggaccacacgtgcagacagggggggctttttgacttaaagctcgtcatcccccgtagctaaggcacaggctcagctggaacggcagccaatacagcaagggccgacgaaactgggtccaaggaccgccagcaaggacgacagtggccacgggcacgagctgccagggcgagctgcacgcaccccacgacacgaacctggggacgaaaggcctggtggactccagggcgaagaccagtcggtcgatcttccaccatcgcgctggaagccgtgagcgacatagagggtccggcgcctcttgcgccgtcgccacagtcccgtgcctcccatccgggtggcggccctttcggagacccccagcgaggacctagtcgagcacgctaagcactcgcg

SEQ ID NO: 13854 - DNA, 810 bp, Zea mays
  Clone ID: MRT4577_112624C.1
ataaccgcgtgacggccgtccgctcacaagttcgctaccccgctcgccatgccgccgccctccctcgtctccatcctccccgccgcgtccatctcgccacgaagacgccaagcaaagcaccccaagacccccaccgcgagccatcccttcttctcccgaagacttgtgtcccaaccgccgcgccacgcctcgatctccccctccgctgccggcgggagcgggagcgacgagctccaccttctcgagaagccgttacctgccgtcgcagaggataacgaggccgaggaggagctcgagtctgctccggtgtcatcaacagaagaagcgctcgcgccttttctcaagttcttccaggtgaagagcaccgaccccgacgtgggcgcagacaccgcggatggcgaggtgccggaggaggcgtcaaggagagatgtattgtccgccgctggtgagcgtggggttagttactacgaccccaagcccggggacttcgtcgccggcgtcgtggtccggagtgacgggaggacgctcgacgtcgacatcggttccaacggcgaaccagcgctgatgctgaccaaggagtcggcgccggtgcccggggaggagttcgggtacctagcgtgcgacgtcgcgtccaagtgtgcgccggagtttgcagcggaagggcgggtcggcgtcgtggtcaggcaattcaggggaggaggagaggggtacggggaggcgatcatcgggaggaatgggaaggagaaagttgcgccggtgctgcgcgccggtacgatcgtgttcgctgaggttctcggccgaacacttggc

SEQ ID NO: 13855 - DNA, 378 bp, Zea mays
  Clone ID: MRT4577_112625C.1
cggaacaaccgggacgacccacgcgcccgcttataaccgcccgggaacgaagctgaaacaggggccctggagagaggagagcgacggggagagggagaaaaccgagcagaaacccccgacgagagacaaggatagacggccggcaccaaaaccgcaagtgaacagaaaaacggaacatgaaaaacagaacccggcaaagcagggaggcgcgccaagcctattagcgaccatagaccacgcagggataagaatagaagaaacgaagaacgagaccctgcagagcaggaacgagcagacaagacctagacactagcgtaacataaccagaaaaggagagacccccgagaaaaaaacgcaaaaaccccacacggcggcccg

SEQ ID NO: 13856 - DNA, 503 bp, Zea mays
  unsure (1)..(503): unsure at all n locations
  Clone ID: MRT4577_112626C.1
ttcccggtgtcgnacccacgccgtccgnaaaaaaaaaataaaaaaaaaaaaaaaaaaaaaaataaaaaaaaaaaaaaaaaaaaaaaaaaaaaaaaaaaaaaaaaaaaaaaaaaaaaaaaaaaaaaaaaaaaaaaaagggccccaaatttcccttattggcgccccgggttaaaacctttgggcttccaaaagggtttgggggcaagcctcaccgctctcgggggggaaaggtttccccctgtttggaaaaaatgggccccccggtttaaccttttaaagggggccgggccttttttggtggaggaattggcaattttttttcagtcgggaagggttcttttccccaaggccgctttttttaaaaaaattgccggtggccggaaaaaaaatttgttgggtttttaaaccattttccccggctggggcccccccctttccaggtttttgaaatttttttgccaccatacctggtcccccgtcctaaccccattaaggggccgctg

SEQ ID NO: 13857 - DNA, 228 bp, Zea mays
  Clone ID: MRT4577_112627C.1
aggacagaataattgtacaaataacatgagcttcgacagggttcttatcccaaataaaaaccaaccatttcaacccaatggatctgttcttaatttaaacacattttatttgggctagcccctaacatgcaaatggttcacaggcttatgtgtgcaggcaccatcataggatctgatctgggctcgtgaagaacagcttctacttgtgcaggctcatttcggtgtccg

SEQ ID NO: 13858 - DNA, 577 bp, Zea mays
  Clone ID: MRT4577_112628C.1
agagaaatatttgaagggttataaggcccgtttttcttttttgttcactgcggtcgcgttcgattccttttggctgtgtccatgctcgctgcctacaatacgcagccacgcaggagtcctcgacttctgtaaattctgtaccaatgtaataccagttccagtttttgttttccacaatgttgctggcgctggctcaggcactcattaaaaaaaaaaaaaaaaaaaaaaaaaaaaaaaaaaaaaaaaaaaaaaaataaaaaaaaaaaaaaaaaaagcaaacttgcatatttttataaaacaattgaaaaaataaaaaaaaaaaaaaagggggggggcccttttaaaggacccaagtttacgaccccggcctggcaacgtaaaactttttttttgggggccccaaattaaatttcccggcccgggttttaaaaacgtggggacgggaaaaaccggggggtacccaaattaaaacccttggaagaaaatccccttttccccagtgggggaaaaaaaaaaaaggccccccccaatgccctttccaaaaattggccacccctaatgggaaaagggacccccc

SEQ ID NO: 13859 - DNA, 297 bp, Zea mays
  unsure (1)..(297): unsure at all n locations
  Clone ID: MRT4577_112629C.1
ggcgcggacgcgtatgcgaagcgccacctctaaaccttaccgtgtatggagtctgacagcttctacctcctcgcctccgggtccgttatggccggggcaaacctctcagcttccgttaccggacctagccaagttacgtgttgtnttttccaacgctcctccatcaactaatccgttgcataggcaaactgtgttgttggagaataccatacatggactattgaggggccttttatgcctatagataagaaactcgtgcctcctggaggtggtcttggaccgcgtgcactactcccg

SEQ ID NO: 13860 - DNA, 302 bp, Zea mays
  unsure (1)..(302): unsure at all n locations
  Clone ID: MRT4577_11262C.1
ctaaacctccatggcaatattggaatcgttttgaccaaacaccagctgagtaaccaaatcgcaaattcacggcacgataggatgctagttgtgtgtgtaccgtttgtttacaacgtgttagtcactttatagcgtaatgccaactagaaaaataaaactgggtggtgactagcgatgagctgagctataccaggaacatgccagaagtctatctctgcagcttcaggtgcaaccgacatggacaatctgctgcctctgtactttttttttttgctctttgcattgacaaatcttcagngacc

SEQ ID NO: 13861 - DNA, 268 bp, Zea mays
  Clone ID: MRT4577_112630C.1
caaaaagaaggggccgggctaaacaatttgagggttttttgtaccacctattttgcccatgttttacaaacaagatccatgtggacccttaggccccatttaacttttactaaagttttacagtgttggcttaaaaccacccggtatacacttttccacaccgtgttccttttccagccttaggaaacggattttgcattcctttttccccctttaagcaaaagtttttttttttccatcgtcaaaacttttggtgcttgattcaaaa

SEQ ID NO: 13862 - DNA, 259 bp, Zea mays
  Clone ID: MRT4577_112631C.1
ctcgatttatgaatcacaacagccagcccaaatgtgagaccctcaagtggacagtgaatggggacactcgtgtgggcctgtttgccgtctgtgacattcctgcagggacggagctgacttttaactacaacctcgattgtctgggcaatgaaaaaacggtctgccggtgtggagcctccaattgcagtggattcctcggggatagaccaaagacctcgacgaccctttcatcagaggaaaagggcaaaaagaccaaaaa

SEQ ID NO: 13863 - DNA, 285 bp, Zea mays
  Clone ID: MRT4577_112632C.1
cccacgcgtgcgaacattaactggaaatggtttttctaaggcttttaccatgaggggtaggcgtcttggataccttgcatcccataaacattttgtctcaacacgtggatagatccaaagccagttcaccgttaagtgctaacagcatataacacgaaggcagggattgcaaatctgaatcttgcatatgctggctggaaaacaatattaactatcgtcaaagcattgcacgaacgccgcgactattttgtaaaaaaattcatggaactgcctggtatgaaaata

SEQ ID NO: 13864 - DNA, 661 bp, Zea mays
  Clone ID: MRT4577_112633C.1
cctcgaggccggccgggatctactttcatttcatatgcacgattgcagatgacactccgcccctgtcgttggtccccctcgatcccacactggtgcgtaacatgcaccgataatggctacactcactgtcccagacaatggtacctcccgtatgccgcatgactgcacacacttgagctatgcattccccgggtggtgcacatgccaggtgctcatcatctccatcctcatgcaccaggactccacgctacgactagccgtacggctggtttaccactaagtctactgggatgagctcctccgctccagtcacgttcgtgctctccggtcactcttagagacccttgatccaggggacactcgacccttcgtgacagaacgcgtagatgtccaacgagggtgagcgtaatagcaagtcacgaaaccgtgcgctcaccaagatcgactaatacgcgcacctccgcggagagctcactaacagatatgcctcacactagatgtcttagacctcgcttgcggaagacatcactgcaaactgcactgccaactgcctcaagctatcggcgacacttagtagtaatgaccgatatgaagtagcagaatgtaacactacgtcggtcacattcataaatcacactacttcttgagatgatccatcaca

SEQ ID NO: 13865 - DNA, 272 bp, Zea mays
  unsure (1)..(272): unsure at all n locations
  Clone ID: MRT4577_112634C.1
gaggggcatcatctcatccgattcttaaactaaggtattgtannccaaaaaaattgtctgtttgacaaaccaagggcatactttatgaccataaatgtttttgggcaccgttgttaccatctaatacgatatttaccagtgtttggagacctaaaattccatccaaaacaaatcgtttgaataattcttctctacatgaattattaattctatttgatttgaaacgtaaaaactccatcactttctctcttgaaaggaccgataacccatac

SEQ ID NO: 13866 - DNA, 514 bp, Zea mays
  Clone ID: MRT4577_112635C.1
gaggagagaaccccgtgttttgcgtggagaaggcaagccgctcgacgctcgtcgatgtcgtagcgatgcacaaatcggaatcaccgtcgttcttgcaaacgccgattgggtttgtttatggatcgagagatgatgatcgagccattgatgtggtgccaaccacaagatgcagttggtggacgacctgaagaatgatggacatgaccagtggatgctcgccaagcgagtgccacccagcaaacactgtctaagtgttaaattaaaggagagagagggatagacggaaagtgcagtgtgtcatgacagcaaccccagaccaaatattcatcctgatggtgagagcaggataaccaacctgtatctttgctcaattgctccccaaaggctataacagggactgcagatgcaaagaatatgtagagcgtaggtgccagtatcctgacaacagaattcatgtagcacagtgaacacaacaggctaattaagtaatgatgacatgtcaagcaattacaac

SEQ ID NO: 13867 - DNA, 2120 bp, Zea mays
  Clone ID: MRT4577_112637C.1
ggcccccgtccctttccctctcctacctccacctccacgacaacaagcaaatccccatccagttccaaaccctaactcaaatgctcgctttgactgcctcagcctcatccgcttcgtcccatccttatcgccacgcctccgcgcacactcgtcgccccccgcctacgtgcggtcctcgcgatggcgggctccgacgacccccgtgcagcgcccgccagatcggtcgccgtcgtcggcgccggggtcagcgggctcgcggcggcgtacaggctcagacagagcggcgtgaacgtaacggtgttcgaagcggccgacagggcgggaggaaagatacggaccaattccgagggcgggtttgtctgggatgaaggagctaacaccatgacagaaggtgaatgggaggccagtagactgattgatgatcttggtctacaagacaaacagcagtatcctaactcccaacacaagcgttacattgtcaaagatggagcaccagcactgattccttcggatcccatttcgctaatgaaaagcagtgttctttcgacaaaatcaaagattgcgttattttttgaaccatttctctacaagaaagctaacacaagaaactctggaaaagtgtctgaggagcacttgagtgagagtgttgggagcttctgtgaacgccactttggaagagaagttgttgactattttgttgatccatttgtagctggaacaagtgcaggagatccagagtcactatctattcgtcatgcattcccagcattgtggaatttggaaagaaagtatggttcagttattgttggtgccatcttgtctaagctagcagctaaaggtgatccagtaaagacaagacatgattcatcagggaaaagaaggaatagacgagtgtcgttttcatttcatggtggaatgcagtcactaataaatgcacttcacaatgaagttggagatgataatgtgaagcttggtacagaagtgttgtcattggcatgtacatttgatggagttcctgcactaggcaggtggtcaatttctgttgattcgaaggatagcggtgacaaggaccttgctagtaaccaaacctttgatgctgttataatgacagctccattgtcaaatgtccggaggatgaagttcaccaaaggtggagctccggttgttcttgactttcttcctaagatggattatctaccactatctctcatggtgactgcttttaagaaggatgatgtcaagaaacctctggaaggatttggggtcttaataccttacaaggaacagcaaaaacatggtctgaaaacccttgggactctcttttcctcaatgatgttcccagatcgagctcctgatgaccaatatttatatacaacatttgttgggggtagccacaatagagatcttgctggagctccaacgtctattctgaaacaacttgtgacctctgaccttaaaaaactcttgggcgtagaggggcaaccaacttttgtcaagcatgtatactggggaaatgcttttcctttgtatggccatgattatagttctgtattggaagctatagaaaagatggagaaaaaccttccagggttcttctacgcaggaaatagcaaggatgggcttgctgttggaagtgttatagcttcaggaagcaaggctgctgaccttgcaatctcatatcttgaatctcacaccaagcataataattcacattgaaagtgtctgacctatcctctagcagttgtcgacaaatttctccagttcatgtacagtagaaaccgatgcgttgcagtttcagaacatcttcacttcttcagatattaacccttcgttgaacatccaccagaaaggtagtcacatgtgtaagtgggaaaatgaggttaaaaactattatggcggccgaaatgttcctttttgttttcctcacaagtggcctacgacacttgatgttggaaatacatttaaatttgttgaattgtttgagaacacatgcgtgacgtgtaatatttgcctattgtgattttagcagtagtcttggccagattatgctttacgcctttacagtgaccaaggagtcaagggccccacatattatatttatttacccctgctttccttgt

SEQ ID NO: 13868 - DNA, 2060 bp, Zea mays
  Clone ID: MRT4577_112638C.1
ccacgttatccgcagccatgagtccaccccccgtccctttccctctcctacctccacctccacgacaacaagcaaatccccatccagttccaaaccctaactcaaatgctcgctttgactgcctcagcctcatccgcttcgtcccatccttatcgccacgcctccgcgcacactcgtcgcccccgcctacgtgcggtcctcgcgatggcgggctccgacgacccccgtgcagcgcccgccagatcggtcgccgtcgtcggcgccggggtcagcgggctcgcggcggcgtacaggctcagacagagcggcgtgaacgtaacggtgttcgaagcggccgacagggcgggaggaaagatacggaccaattccgagggcgggtttgtctgggatgaaggagctaacaccatgacagaaggtgaatgggaggccagtagactgattgatgatcttggtctacaagacaaacagcagtatcctaactcccaacacaagcgttacattgtcaaagatggagcaccagcactgattccttcggatcccatttcgctaatgaaaagcagtgttctttcgacaaaatcaaagtgttgggagcttctgtgaacgccactttggaagagaagttgttgactattttgttgatccatttgtagctggaacaagtgcaggagatccagagtcactatctattcgtcatgcattcccagcattgtggaatttggaaagaaagtatggttcagttattgttggtgccatcttgtctaagctagcagctaaaggtgatccagtaaagacaagacatgattcatcagggaaaagaaggaatagacgagtgtcgttttcatttcatggtggaatgcagtcactaataaatgcacttcacaatgaagttggagatgataatgtgaagcttggtacagaagtgttgtcattggcatgtacatttgatggagttcctgcactaggcaggtggtcaatttctgttgattcgaaggatagcggtgacaaggaccttgctagtaaccaaacctttgatgctgttataatgacagctccattgtcaaatgtccggaggatgaagttcacaaaaggtggagctccggttgttcttgactttcttcctaaggtcagatggattatctaccactatctctcatggtgactgcttttaagaaggatgatgtcaagaaacctctggaaggatttggggtcttaataccttacaaggaacagcaaaaacatggtctgaaaacccttgggactctcttttcctcaatgatgttcccagatcgagctcctgatgaccaatatttatatacaacatttgttgggggtagccacaatagagatcttgctggagctccaacgtctattctgaaacaacttgtgacctctgaccttaaaaaactcttgggcgtagaggggcaaccaacttttgtcaagcatgtatactggggaaatgcttttcctttgtatggccatgattatagttctgtattggaagctatagaaaagatggagaaaaaccttccagggttcttctacgcaggaaataacaaggatgggcttgctgttggaagtgttatagcttcaggaagcaaggctgctgaccttgcaatctcatatcttgaatctcacaccaagcataataattcacattgaaagcgtctgacctatcctctagcagttgtcgacaaatttctccagttcatgtacagtagaaaccgatgcgttgcagtctcagaacatcttcacttccagatattaacccttcgttgaacatccaccagaaaggtagtcacacgtgtaagtgggaaaatgaggttaaaaactattatggtggccgaaatgctcctttttgttttcctcacaagtggcctacgacacttgatgttggaaatacatttaaatttgttgaattgtttgagaacaaatgcgtgacgtgtaatatttgcctattgtgattttagcagtagtcttggccagatattatatttatttaccactgctttccttgagtaatttgtaccaaaagaaggaaaaaaaaaaaaaaaaaagcggcc

SEQ ID NO: 13869 - DNA, 643 bp, Zea mays
  unsure (1)..(643): unsure at all n locations
  Clone ID: MRT4577_112639C.1
aattcggcacgaggcctgagtccaccccccgtccctttccctctcctacctccacctccacgacaacaagcaaatccccatccagttccaaaccctaactcaaatgctcgctttgactgcctcagcctcatccgcttcgtcccatccttatcgccacgcctccgcgcacactcgtcgcccccgcctacgtgcggtcctcgcgatggcgggctccgacgacccccgtgcagcgcccgccagatcggtcgccgtcgtcggcgccggggtcagcgggctcgcggcggcgtacaggctcagacagagcggcgtgaacgtaacggtgttcgaagcggccgacagggcgggaggaaagatacggaccaattccgagggcgggtttgtctgggatgaaggagctaacaccatggtatggttcagttattgttggtgccatcttgtctaagctagcagctaaaggtgatccagtaaagacaagacatgattcatcagggaaaagaaggaatagacgagtgtcgttttcatttcatggtggaatgcagttggagatgataatgtgaagcttggtacagaagtgttgtcattggcatgtacatttgatggagttcctgcacttaggcagtggtcaatttctgntgattcgaag

SEQ ID NO: 13870 - DNA, 397 bp, Zea mays
  Clone ID: MRT4577_11263C.1
ggggaaaccggttttacttggggttggaaacaccagtggtgcagaaatggggcgatacatatggttgccacctgataaaaggcaagggtgacacaaataaataccaccgttcgggcctacatagttttaaacaaaatacttatcatatgaaatactttacgcctgccgggggttacttttaatacttatgaacccccacagcaacccattaccacaagggcttggcgggtacaaaaatttcaaaacctggccttaaggaaaaaaaattacaaattgtcccttaccacgaatttaacataaaaaccccacccgccttattaaccccttttccaagggattttaacaaaaccaaaacttaccaagtttcttaccacccttttttgatttggtttttctt

SEQ ID NO: 13871 - DNA, 2549 bp, Zea mays
  Clone ID: MRT4577_112640C.1
aattcggcaataggattttatctcattcaaacttgggattactcagacacatgcttaagttggtgttatggttcagttttggtaagaggtgtcccttgttaaaaaagtctctgtattaattgacattgatcagtactgtagtttgtttatcttcattgacttccaagatcctgtttgtgttctgctcatctgtgtcgatccatgcaaaagagttcacaatggtctatgcttatatgttattgctgaacattgatatgatggtgggggctttttcacactcaacagcagttggcaaactacggcaggagctgccagatgttccttctgatgctcgtttgatctttccacgttacaccttagatgaagctgagactgtatgtcactattatatgaggcaaaagatcattcggcgcgagaatttttcagaagagaaatggaaaaagatatactacttatcaaatggaaatggtgcagagatgagatggcttgctgcctttgtttgagtttctgatacctggattgtactcagttttggtcggggtgtaaaaaggtgtgcagctctgtttaggaaatgctttctacatctccgggataacttccgtagtattgttgatccagctgttacaacaaacctcaactatacctagaaaacaaattgtcttggatggcccacggagttgtggtaaaagcattgcacttgcgatgcttgtccattgggcgcgtactgaaggatggctggtattttatgttccacaagggaaggattggactcatggaggattcttctatagaaacacatacagtgattttttcgatacaccagtacaggctgccaatatcttgcagaattttttgaagtacaatgaaacacgtttacaacagttaccatgccaaatttttgagcctattcccctgggagaaggtgctggtgttggaatgatgaaaggggttgacacaatggaaatgcctgaagggtccacattatatgatctcattcaaactgggataactcaaacacatgcttcagttggtgttatggttcgcttaaggaaggagctgtcccttgttaaagacgtgcctgtactatttgccattgatcagtacaatagctggttcacattcagtgacttccaggaacctgtaactgtccgatcctgtcgatcgatccatgcaaaagagcttacaatggtcaatgcttatagatcaatgctgcacaatgatatgatggtgggggctttttcacactcaacagcagttggcaaactacggcaggagctgccagatgttccttctgatgctcgtttgatctttccacgttacaccttagatgaagctgagactgcatgtcactattatatgaggcaaaagatcattcggcgcgagaatttttcagaagagaaatggaaaaagatatactacttatcaaatggaaatggtgcagagatgagatggcttgctgccttcgtttgaggtagatatactgtccctgaagtttctgatacctggattgtactcagttttggtggtggtgtagaaaggttgccacctctgtttcagcattccgttacacaccacagttcattgttgtgtacttgtagtccgtctcttgacatctctagaagaaagtttggcgtcaacatcatttgtgctgagtagaacttgaggagataaggcataagtatgtggctcagttacatgattatatccttaggcttctttcagttctcgctcagatgctagatacaaaataatgtagcattgttattggagaagttttcacatgttttggctccgccgagcacgatgagtatgatgagttgatgccaatctactcagcatgcttgctactatgttgctgaattgagctccgttgagtattttttttttaaaattactgtacgaatcgaacaattatttgagttgggaacaatattcttctttgcggaacacaaagtttactcaaaggttacaaggcatagcttgagtttgaattttgagtttttgaaacctggaatgtactcagttttggtggtggtgtagaaaggttgccacttttatttcagcattccgctacacaccacagttcattgttgtgtacttgtagtccgtctcttgacaccgctagaagaaaaattggcttcaacatcatttgcgctgagtagaacttgaggagataaggcataaataatgtagcattgttattggagaagttttcacatgttttggctccgccgagcacgatgagtatgatgagttgatgccaatctactcagcatgcttgctactatgttgctgaattgagctccgttgagttttttttttaaattactgtacgaatcgaacaattatttgagttgggaacaatatttttttttgcggaactcaaaggttacgaggcatatcctcagtttgaatagtttagcttacccttgtatcctcagtttgaatagtttagcttacccttgtttctcggagagatgcaacatattgatttagctacattgtctattccggtgtactcctaagccgtttatcgattttccttttgg

SEQ ID NO: 13872 - DNA, 3011 bp, Zea mays
  Clone ID: MRT4577_112641C.1
gccctctcctacctccacctccacgacaacaagcaaatccccatccagttccaaaccctaactcaaatgctcgctttgactgcctcagcctcatccgcttcgtcccatccttatcgccacgcctccgcgcacactcgtcgcccccgcctacgtgcggtcctcgcgatggcgggctccgacgacccccgtgcagcgcccgccagatcggtcgccgtcgtcggcgccggggtcagcgggctcgcggcggcgtacaggctcagacagagcggcgtgaacgtaacggtgttcgaagcggccgacagggcgggaggaaagatacggaccaattccgagggcgggtttgtctgggatgaaggagctaacaccatgacagaaggtgaatgggaggccagtagactgattgatgatcttggtctacaagacaaacagcacctaactcccaacacaagcgttacattgtcaaagatggagcaccagcactgattccttcggatcccatttcgctaatgaaaagcagtgttctttcgacaaaatcaaaggtatgttcagccattgagtacaaactgccgagtgccgactaacaaaatgtcataacattgctagtatcaatgcctaccatcatcaattgaagtagtttgttagttactttaaggtaactacttgataaattcttatattcctccatttatttttccttcaagctatgtgtttatgatctgcggtgattatgtcattttattctaaaaaaaactcgacctgcggagggtaagacaacccctggacattatattaagaagaccttctcaagtgggttgagaaaaccctcaaacccctgctccacccatacacagcggcaccgtagcccatgtgagaatgacagcgattggggccatgcattagacctgtgctttggcgtgggacggacgaggggatttcccccgaacccctgccgtagcccatgtgagaatgaccgcaactagggccggacattagacttgtgctttagcgtggaacagatgaggagatttccccccgaacctctgccacacccatacacaacggcactgtagcccatatgagaatgaccgcgaccagagccggacattagacatgttctttggcgtgggacagacgagtggaatttttaaccttagattgaaattcactctcacagggagttgaactcaggacatgagggtgctactcagaccacgtaaccaactcagttagaggccttcgtatgtcattatgttttaactgaattatgttttatctgtggctctttgaagattgcgttcttttttgaaccatttctctacaagaaagctaacacaagaaactctccaaaagtgtctgaggagcacttgagtgagaggtgaaccttcgtattcttcgtgtcttgcattgatatgaaatttaaaattgcaatcatatatcaatatatcatactagtattattttctttaagtaagtcttgagctatgcgttatacctatcgattcctcattattttcaaattctgaaaatcaatattatggtatcccatataatatacaccattgcagtgttctcttttgagtgtagagaactagagataatagaattatcttgtttgaaaacatttgcagtgttgggagcttctgtgaacgccactttggaagagaagttgttgactattttgttgatccatttgtagctggaacaagtgcaggagatccagagtcactatctattcgtcatgcattcccagcattgtggaatttggaaagaaagtatggttcagttattgttggtgccatcttgtctaagctagcagctaaaggtgatccagtaaagacaagacatgattcatcagggaaaagaaggaatagacgagtgtcgttttcatttcatggtggaatgcagtcactaataaatgcacttcacaatgaagttggagatgataatgtgaagcttggtacagaagtgttgtcattggcatgtacatttgatggagttcctgcactaggcaggtggtcaatttctgttgattcgaaggatagcggtgacaaggaccttgctagtaaccaaacctttgatgctgttataatgacagctccattgtcaaatgtccggaggatgaagttcacaaaaggtggagctccggttgttcttgactttcttcctaagatggattatctaccactatctctcatggtgactgcttttaagaaggatgatgtcaagaaacctctggaaggatttggggtcttaataccttacaaggaacagcaaaaacatggtctgaaaacccttgggactctcttttcctcaatgatgttcccagatcgagctcctgatgaccaatatttatatacaacatttgttgggggtagccacaatagagatcttgctggagctccaacgtctattctgaaacaacttgtgacctctgaccttaaaaaactcttgggcgtagaggggcaaccaacttttgtcaagcatgtatactggggaaatgcttttcctttgtatggccatgattatagttctgtattggaagctatagaaaagatggagaaaaaccttccagggttcttctacgcaggaaataacaaggatgggcttgctgttggaagtgttatagcttcaggaagcaaggctgctgaccttgcaatctcatatcttgaatctcacaccaagcataataattcacattgaaagcgtctgacctatcctctagcagttgtcgacaaatttgtccagttcatgtacagtagaaaccgatgcgttgcagtctcagaacatcttcacttcagatattaacccttcgttgaacatccaccagaaaggtagtcacatgtgtaagtcggaaaatgaggttaaaaactattatggtggccgaaatgctcttttttgttttcctcacaagtggcctacgacacttgatgttggaaatacatttaaatttgttgaattgtttgagaacacatgcgtgacgtgtaatatttgcctattgtgattttagcagt

SEQ ID NO: 13873 - DNA, 1723 bp, Zea mays
  Clone ID: MRT4577_112642C.1
gctcttcgctttcactgacacgttcgggtccttcgcccaccgtgacgcgaacatctatgtcgacttcactttggatgaatggaatgccatgttaccagaagggctgccagcagggatgatgaaagagtttcaggagacaagacggtgtgctgtgatggtgaggaaaagcttcctagatctccgggataacttccgtaggattgttgatccagctgttacaacaaacctcaaagataccagaaaacaaattgtcttggatggcccacggagttgtggtaaaagcattgcacttgcgatgcttgtccattgggcgcgtactgaaggatggctggtattttatgttccacaagggaaggattggactcatggaggattcttctatagaaacacatacagtgattttttcgatacaccagtacaggctgccaatatcttgcagaattttttgaagtacaatgaaacacgtttacaacagttaccatgccaaatttttgagcctattcccctgggagaaggtgctggtgttggaatgatgaaaggggttgacacaatggaaatgccggccggttccagaatatgatctcattcaaactgggataactcaaacacatgcttcagttggtgttatggttcgcttaaggaaggagctgtcccttgttaaagacgtgcctgtactatttgccattgatcagtacaatagctggttcacattcagtgacttccaggaacctgtaactgtccgatcctgtcgatcgatccatgcaaaagagcttacaatggtcaatgcttatagatcaatgctgcacaatgatatgatggtgggggctttttcacactcaacagcagttggcaaactacggcaggagctgccagatgttccttctgatgctcgtttgatctttccacgttacaccttagatgaagctgagactgtatgtcactattatatgaggcaaaagatcattcggcgcgagaatttttcagaagagaaatggaaaaagatatactacttatcaaatggaaatggtgcagagatgagatggcttgctgcctttgtttgagtttctgatacctggattgtactcagttttggtggtggtgtagaaaggttgccacctctgtttcagcattccgttacacaccacagttcattgttgtgtacttgtagtccgtctcttgacacctctagaagaaagtttggcttcaacatcatttgtgctgagtagaacttgaggagataaggcataagtatgtggctcagttacatgattatatccttaggcttctttcagttctcgctcagatgctagatacaaaataatgtagcattgttattggagaagttttcacatgttttggctctgccgagcacgatgagtatgatatgagttgatgccaatctactcagcatgcttgctactatgttgctgaattgagctccgttgagtatttttttttaaaattactgtacgaatcgaacaattatttgagttgaaaacaattttttttttgcggaactcaaaggttacgaggcatatcctcagtttgaatagtttagcttacccttgtatcctcagtttgaatagtttagcttacccttgtttctcggagatgcaacatattgatttagctacattgtctattcctgtgtacctatgccgtttatcgattttccttctgtaacgaataactctttaataaaaaaaaaaaaaaaaaagcggcc

SEQ ID NO: 13874 - DNA, 264 bp, Zea mays
  Clone ID: MRT4577_112643C.1
gacggaacatctggaacattagacaggatgctgatcttctggacaatcacacttgtccggctgggagcagccaaaggaaaagaagtttgctatgaggacctcgggtgcttttctgacactgagccctggggcgggacagcaatcaggcccctgaaaattctcccctggagccctgagaagataggcacccgcttcctgctgtacaccaatgaaaacccaaacaactttcaaattctcctcctctctgatccatcaacaattgag

SEQ ID NO: 13875 - DNA, 296 bp, Zea mays
  unsure (1)..(296): unsure at all n locations
  Clone ID: MRT4577_112644C.1
cccacgcgtccgggaggacgtgaccacaagctcttggattngccctccggccnnttgaacgtagaaagatatatatttttcggggcaccnccgacgccgcgcacagcgtcgccacacaacgctccgacagaatgttcttgctccagagggaacggtcgctggccctggctctgggcgggagcgctgcgagccagatggaacgcatcgagccgtgcaccgtggaccagctgaaatcaatgctgcacgccgagcggaaggcgctcggcgcgctgtacgccgagctgggggaggagcgg

SEQ ID NO: 13876 - DNA, 303 bp, Zea mays
  Clone ID: MRT4577_112645C.1
ccactactttacaactctgttcctaatacaactatgcgtgcctgtttcgcttcacaattcgagaaaacaaagcatggaatcaaattgttgcttagtttttacacctaagaacatttcctaagtagcacacttcaatctttggttcgactgattgtttgcaattcaccaccatggcaccgtcatgttttggccattgttgtctgcagatcaacaatgcaggaatttcaggcgttcaccgtgatccagttttgtctgctgcggtcaaggataaggtacccttaatctaaagcaaaagaatacaaa

SEQ ID NO: 13877 - DNA, 104 bp, Zea mays
  Clone ID: MRT4577_112646C.1
tgttctcatgaagtagcgcagaaaggcttgtgagacgcacactacctaaaagatcgcctgaaggtagccggaatcggagcgatgctttacgagctcagtcccac

SEQ ID NO: 13878 - DNA, 431 bp, Zea mays
  Clone ID: MRT4577_112647C.1
ggggcccatgggaagctgctggatttctgaattttcagattgaaaaccgtaactagaactaagttcagggtttgataacagaaacagcttttgttgccaaaaatgaccgcattggcaaaattgaccttatcgaggcaacaaagttgctcgtagctcaaaagttctttccttttatgaaatgcagctggaggcctttttttatttgaagggggaggtgggggctcatatttggtgggttccctaagcacccctttggaatgggcccggccccatttaccccacccttttattttttcccccaccccttgttggggtagggggttaaaattccaaaattttgcttactaaaatgggcaggaaggttgtccttttcaaaatctaaatcttcagaggcaaatttgaaagcttcaaaaactttccgagcccgttga

SEQ ID NO: 13879 - DNA, 281 bp, Zea mays
  Clone ID: MRT4577_112648C.1
ctcatcacgtgatgggagccatctaactgggatttaatagagggatttagacctccgtctctacaacaaaggtgatgaggagtactctatgtgttcccgaggctggagggcgcttccaggtctagaggaggattacgtaggcttgtgtataagctctggagggctcctaccttgctgctattgtgataaggtattcactttgagtatatcaggacttgtaataaatgtgactcttgctatgtaataaccttcagctttataaatgaaaagaacgttttgtc

SEQ ID NO: 13880 - DNA, 381 bp, Zea mays
  unsure (1)..(381): unsure at all n locations
  Clone ID: MRT4577_112649C.1
gtgtgtcaatgcaacaagaggcacgtttgatattttgagntaatcccaaaaaaaaggaagggaaaaaataaaaaaataaaaaaaaaaataaaaaaaaataaatataaaaaaaaataaaaaaaataaaaataaaaataaaaaaaaaaaaaaaaaaaaaaaaaaaaaatggggctgccctttttagggatcccaactttccttccccttcattcccacttaaaacttttttttttgggtccctaaaatcaatttcattgcccgttttttaacaactttgtacctgaaaaacccctgtttttcccaaataaatttcttttgcaacaattcccctttttccaagttgttaaattttaaaaaggccccccccctttcccttttcct

SEQ ID NO: 13881 - DNA, 232 bp, Zea mays
  unsure (1)..(232): unsure at all n locations
  Clone ID: MRT4577_11264C.1
acccacccatcccccacgcgtncanttaactttttatctattctttcacacacactaaacttgacccccacgttttttgttaacaaacaaaaaaccaacttcctatttcttaaaacctctgaccaatgactagactttctccataatcaccatcctattaaatctgagctctctttattcaactatgtgcttcgatattacatcttttctttaataatacatttccttcttt

SEQ ID NO: 13882 - DNA, 368 bp, Zea mays
  Clone ID: MRT4577_112650C.1
ccgacctctacggtccctcgtgcactcttacagcctcctgaagcggcacaagagagctcatagagccgctcccaaggcgctggaggacgggcacagcctcagcgtgtgacacccgaaggacataagaagccatcgcttctgacacctgactcatgagaccgtggatcctttacatgtgtacttgccaaccaagctgtgctggcagatcacacacgacgcggaacaaggagaactttcttaatttgcgcgagacgttagacgagtgtcggaacatgagtggggctcttcagagaccgaaaggcccaagatcctcggagctgcatggaatagcttagcccaccaccagggcgtctgatggacggactaca

SEQ ID NO: 13883 - DNA, 1739 bp, Zea mays
  Clone ID: MRT4577_112651C.1
atttcatcccagaagagccccgtagcttgaagggtattgtatggaagtgtaggtcttgtggcgatacacttctgaggttcacaaaccagggtcctccatctgatgcctgctgcattgagaacgatgacatcaatgcatcctgtgggaacatgctttgttattggcacaaccacaagaatgactgttctggtacatatgaaaaaacgatgaagttagaagcaccatctcaaaagaaagttgcaggaggtgctcagttgcttctgactttgccatcagaaatgtccaacattcaagaatccagttcatctatattgcagttagagtggagtactaaatccacagaaccaaatgctgaagacaagcatctttgtctagggagtggcagcaatgggaaacctcagggaagtagctcctcgaagaaagcaggtaagaggaacagtcctgaaatggttggggaaacaagtgttctgcctgctgcggcccaaggaaaacccaatcaaaaccatggattggttgcgatggcgaagcaagcgcctgcgtctgtggaaggctacagtgatgcagaatcaccggggagacatacatcaaagaaagctggcaagcgacataagcctgatgatcttcagaaaagcagtgttctcccttctgtaccccagggaacaacaaaaccaaagcatgcgttggttgcgacagagaataaccctctcccctcagcagagcgccgcaacgatgcaaaatcgccaaaaaccaatacctcgaagaaaccaggagactggcatgagctccagattgctcagaaagcctgttctcagccagctgaccctcacaaaaaactgaagcaagacctgggtgcaccggaaaagaaagaacttttctctttgatgggccccagcaatgagaagttactgggcaggaggtcctcaaagaaggcaagcaggcagcatgaccgcgaagacattcaggaaaaaaacaccatcctgccaactgcccctggaatcagacccaaagcatcagcctttgctgcatcagagaagcggcgaaagggaaaatgcaaaaggaagcctgtggaggaaaaggagtacgctgtgatgagtgcgtggctgaactactacgaatcagacaggtcaagtggatcgcccgagccccttgtaaacaaaagaacagagcgaaggagaagagaaagggcaagaattctgacttattcacgatcaaagaagaacaaaactgagccattggccagctccgggacacatgcctctgtcagtagccacaaaatcgagatggcaccgcaagaccatgcagttgttactactggtaaccaggtggcggtggctccagcaactgaagatcaggcgcagccctctgctgattctgctccatgcctggatcttgttccatttcttcagccagcagatccattgacttctccagatcaaagcactgcccgagacatgatagtgatttctgatgacgactgacccttttcgatgatgatatcctctatcacattttggatggttgccgggctaattcagtggatgtggcgagtatgccatactatattagaagtgacatgctgtgcttgttcttactatagagtagtgtctgagggccccaccgaagtcccttaaactctttcgcgaacatgacgcgagaatgcaggtgctgcagcttgaacttgatttcttgaacaaaattcttggagttcagtactctcctgtgcttctgctggtgcttct

SEQ ID NO: 13884 - DNA, 410 bp, Zea mays
  unsure (1)..(410): unsure at all n locations
  Clone ID: MRT4577_112652C.1
gcagagaaattctagctgggggaccggtctgcaattccccctcgctcgccattgtccgtaacctcgaccaagacgcgagccgggaatggagtccgggagctcggtgcgtttcggccaccaggacgtgacggctgctggcggcgtgcacgcaggtaacgccggcgctgcttcttctcatcagcaggtgatcccgggcacgggcatgacgatgcccgccggcatggcctccctcctggtgggccgcctcgggatgcaggcgccgcctggcatggtgctgcccggaggagccctggcggcggcgtccgccgggtacggcggcatcatgtccagcgccctgcgcgccgcctggagcggngctcaacagcagctgccgccccacgcgggcggtggcatcggcgggcatagggcgc

SEQ ID NO: 13885 - DNA, 2227 bp, Zea mays
  Clone ID: MRT4577_112653C.1
aagattgtggtgctcttaaagttaacccttttgccagcaagaacaatactgctgtgtatcagtctaaattgggcacacaacctgtctatgttgtggcaactagggcaaattgttttgcttctggttcgatgcagacaaataacagtgataaagaacttgcatccagtgccatggaacggattgatagcgtgaagaacagaacaagtaaagaaacaggatttgtcactgaagcttataacaatgatgcctttagtggtggtattactgaaaagggttttgcgcagttcagtaacagttctactcacataaagcccaatgcttctggccattgttcactacctgaatcaaaaactccaacaaatggaagtgatatcaactgcatcaagggctcttcggttaatagaggtgatgttagcttcacaaatggctcgtttgtcaataggcccatcaacaacaatgaaccaaatgtagctaggcttgaggtgatggagaagttgaataatgtgatgcaaaaccgttataatgatcacgctcctggttttgatcctcatgctgcagctagtgctagccggaatgccaatggtcttatgcctatgcatgccaattttggttgcatgtcctctacagttcaatctgttgctaatgtttcaacgaccagcacatctcaagatcagtgtgatttgcaacttggatttggtgtacagaagcagcatatattttctaggcatggagagcttagaacggctacagctcgatcccctctgcctgggagcattgccaaaagaaattctgtacccactgaatcctcacagtttgagagcatggatgggcctaaatctttccccaatggaacatcgcagttcggaggctttgcaaggcctacctttgtgcctgctgcaccttctcagtttgggagcatggctcaacctaattatgtgcattcttctcaatcctctcaattcacaagcttggttcaaccgaattctgtacctcctgctgagtcctcgcagtttggaagcaaagcccaatctagttctgcaccccttgctaaaacctctcagttcaagggcatggctggaccaaattctgtacctcctgctgagccctctcagtttgggagcatgattagacctaatttggtacctcccgcatcttctcagtttttggggagcatggttcgaccaaattctgtaactccagaatcctcacagtttgggagcatgaccagaccaaactctgtacctcctgtatcgtcacagtttgttaacatgcccagtcaaaattttgtgagcgcatccgagccaactctagttttggggtacgcaccgcagattggaagtgaccctccacatcaagtccagttaggatgggatttgtccttgccaaggatggttactggcggcagcatggtcacttgtttatgtatatggtgcaacagtcagttccatcattttggccctgttgatggacagcaggctagttcttttggcttcatttgccccacctgtaaagataggatgtctggtcatcacagtatgcccagcaatggttcatggcagccttgaggtgcagtgctgtttgttaatcatctgcatttctgcatctgagggatctcgtggttttctgtacaccatgtctggcgactgttgaggacagaaaattgtccgcacaagcagaagtggtcccgcctccaagttcagtggactgtcaagggtagctgggagctggaatgtgtttagttggtactagggtatgcaatgagagaagttgggtttctctactacttgtcaaagatagcaatgggagaccatgatgaattcaggccatctttttttttcttgaatccaccagttaagctggcatgtttgtcggagctatatctcaggttattttgagctctagcttcgatggggagttgacttcattattggtactgaacttaaaatgactccagtccagtgtcttgttggttgtgtaaattatttgttagctcaggtggattaggcgcctagctcttgctgtaatatttccctaacactgggcagcctttgtctatcctttcctgatgaggttctgttagtcaagctgaagtacatttctaggtaagcgtggctcttgattcttggacgtaaaatgccaagaggctatacgttcgtttccgcctgtttcaaccttacaaggtaagaagaaaggaaatccaaacgaaaaaaaaaaaaaaaaagcggcc

SEQ ID NO: 13886 - DNA, 487 bp, Zea mays
  Clone ID: MRT4577_112654C.1
attgcgccaacacattctaattgcattgcaagcattacctaaccaacacaatgatggtgaatcatgccttatacagcgacaaaggacacctccatcttcgcattaacacaaatttcacggctaaaatattggcccgttcaaaataaaagccccagaagaatactgggtgtgttgacaccgaaccacgcactggtttacaattaagtgtgccttttacagaaccctctcatgacgagcctcaacttttgaacttattgaaggcaggcttctccccataaatacacaccgggcgctggaaacttttatgtcgcttggaccctgataggttcttgttttaccaatgttcagagttttttgagacctatatgctgctctggctttcaatgcacaattaaaaatactgagtatatggagctgatatggaaacaaaaatgtttggtgctctggctaacccaactccagttctcttgccattgccttttttttg

SEQ ID NO: 13887 - DNA, 783 bp, Zea mays
  unsure (1)..(783): unsure at all n locations
  Clone ID: MRT4577_112655C.1
ctctcgcccctcgcgttatctccgctcccctcgcgcagcccacgtacaaaacgaaacaaaaaagcgccgagtaacgcactgccccgccgcagatagagaattgcggtgcctaccgctctcgcggcggccatggaggcgacggcgcccgactactacggccgcgacaagaagggctccgacctcttcgtcgtcgacgacctcctcgcgctgccgtgcgacgacgaggaggaggaggaggaaggggtcggcgaggcgccgttcctgccggccaacgccgccgccgtcgtcgtcaagcaggaggccgggttcgggaacgtgtcggccgactcgtccaccgtcacggccctcgacagctgcagcaactccttctccggcctcgccgacggcgacttctccggcggcctctgcgagccgtacgatcagctggcggagctggaatggctgtccaactacatgggcgagggcgaggagagcttcgccaccgaggacctacacaagctgcagctcatctccggcatcccctccgggggcttcccctcggcgaacggaccacctgctccggcggccaccgctgccacggcgcagcccggcatgttcctgccggagggccccgtccccgccaaggcccgtagcaagcgctcccgcgttgcgccgggcaactggtcgtcccgcctgctcgttctcccgccggcccgggcctcccgncgtcccccggcgtcatggccatctcgccggcagagtccggcgtctcagcccaggcattccatgtcaagaagccctcca

SEQ ID NO: 13888 - DNA, 543 bp, Zea mays
  Clone ID: MRT4577_112656C.1
cattgggtacctcgaggccggccgggatacatattgcccgatcgcccatcctcccacgcggtcacgcagacaaatggcgctctcactctcctacctcgacatcgtcctctcaacgtctgcgtgaatccacgtgaaccctcaagagtcacccggacaagctcctgagcgaggggtatgcctacaagcgggatgttatcctgcctctcagggcctccacacccgaatccacctaatgtttcgatgctccgatgcccgcggaggaccggatgggtgcctaggacgaggccccggagaatgctttgccgtgaatcacactgccaaaatatgcaaagcatacgatgacaggaggttccgcgacatcagggcatccccgccactgccccttgcgcgacggccatgtgccgcctcttgctgaatgagggcaccggtaaggtcttcatcatcttccagcagaattaacgagcatcatgatggaaaccacatgttccacgtcttctgcaagggacccttgatggctctccctgttaagaacaactatgacga

SEQ ID NO: 13889 - DNA, 757 bp, Zea mays
  Clone ID: MRT4577_112657C.1
gttgcccgcaacccaaagcggatcaaaccctagatctcgtccccgttcctccgatcctcatggattcctcctcctcctcgtccagcctgagccagcagcccgagttcgattacctcttcaagctgctgcttatcggcgactccggcgtcggcaagagcagcctcctcctccgtttcaccgccgactcctttgaggacctttcccccaccataggtgttgacttcaaggtgaagatggttaccattggtggcaaaaaactcaagcttgccatctgggacacaggcgagatggctggtggtacgagcagcatggcaacgtggcggccggcatggcttgtgcgcggggcgataacgcgggagaccagtgtgggctccatcctctcctggctggctcaacttccaggcatctggggaggagcattagggctgcagtggcgcgtggtgagggctgtggcggtgcggtgcgggacagcaagaagcctcgttgtgcagcatgaatggatgttgcactttcttttctaagcaataggatggtgttggatggtgcatagaggcacgaaagttacatggggacttaccagagggcagaggcaggttaccgaatccgagatcaataataccataaaagaatcgttttggtctgtccttttcccccacaattatttcgaagagctaaccattccactggacagtgtcattctcgttctgattttgcccagctttatcctatctatttatacatcttccattctttgagt

SEQ ID NO: 13890 - DNA, 303 bp, Zea mays
  Clone ID: MRT4577_112658C.1
gtgaaacaacaaatgaaatatgtattgccctttaaagaccaaaattttaacagatcagactacctagcgacatcaagtccctgtgggtaacatacccaacaggttagattgtcccaagttggcaagaaagagaaatacattgttgcttcactggaaagcacagatggagttgaatttgcatgattaagtgaaatgttcatacctcttggggctgtgtaaaaacagttgtattgctcatggatgatgacattgtaccatgcatcataggagggtgggggagcaatagtgaaaatgctggatcaa

SEQ ID NO: 13891 - DNA, 352 bp, Zea mays
  Clone ID: MRT4577_112659C.1
ataaaagattattgttcatattcaggaatttataaaaaacacttcaaaaaaggggggtgcttatccataataagatgagccacacaaaatctttttgaaacttgtttaaacaactttatgcacgacccacgatatattattgaatacacatactcattgtttcgtttaaatcaccatttaaatatacctgctttacttgatagggtactagaactacttgctcctaaaaaattcacagaggtataaatactattctcccattttgaacaaaaccacaaaatatttatcaaccatgcttaaggtttaaccaactaataaataacgcttcatctaagacattttaaaattcctt

SEQ ID NO: 13892 - DNA, 2991 bp, Zea mays
  unsure (1)..(2991): unsure at all n locations
  Clone ID: MRT4577_11265C.1
tgggtacaccggcggggacggctgcacgtcaagacctccacgaccacgactggaccgccgccgagcggcgacggcccctccctcctccattcccccgcgtccctctgccggatcctcccgtccccgccgctctccgcccgggcgcggacgttcgaaagattccttccgtgcacccttgttaactaaacaatgaggcagcagactggtaagcgtccctcccaacacagggaatatgaaagagaagaaaggaaggaccaacacaagaggccgtttccccgtgctcaggaaagctctaataatgatgggctggttctttaccgtatactctgtccagacagtttgattggtagtgtcataggaaagcatggcaatgtgataaatgctatcaggcatcagacaagtgccaaagtcaaggttgttgacccgtaccccggtgcagacaaaagggttatcttggtatattgctacgtcaagcatagagaccttgatgctgagggtgatgacaatgagcctgtttgtgcagctcaagatgcattacttagggtgcataatgcaattgttgatgcactgcagacattacataagaatcataaagactctgataagaagagcacagaggaagctaacattcttgtgccagctagtcaggcatcaaatgttataggaaaatctggtgctgtcatcaagcatcttcggtcaacatcaagagcattcattaaagtgagcccaaaagatccaagtgaccctacacattcatgtgctatgagttttgataattttgttcagataactggtggtgctgaagctgttaaaaaagcactgtttggagtatcaaccatcatttacaagcacccatcaaaagagaacattcctcttgaaacttcaattcctgatcctactccaagcattataatcccttcagaacttcctgtctatcctgctagtaacttttactcggccccagatgctgctataccttctgtacatccaagcatgtctgtcttagggtcaacacgtcatgttcccgaacttgctgtacctgccgatgatcatggtcggctgcctatttatcaatctattcttccagttattcctacttatagtgccccaaaatgttcaggagaacttgagtttcgtgttttatgccctggtggaaaaattggcttggttattggaagaggtggggctaccataaagaatataaggcaagagagtggtgcaaggatagatgttgatgatgcaaagaatgacaaggaggaaagtatcattaccattatatccactgagtccaccgatgatgttaagtctgccgctgtggaagctgttttgctgcttcaagccaagatcaatgattctgaggatgatagaatgaatcttcgccttcttgtgccaaataaggttataggctgtcttattggcaggggtggttcaatagtcaatgacatgaggaagaagactaaggcaaacatcctcatttcgaagggcgataagccccggagagcatcttccagtgatgaacttgttgaggtatctggagaagcagacaagctgcgtgatgctcttgttcagataattttaagacttagggaagccgttctgaaagagagtgttgaaagccaaaattctgacagggatggcaaactaactgttgctgcctctgattccttatatggaagcagtcttcctttgcctgcattattacctcacaaccaacaaattgcccccttgggctatgatagaagaggtgaatctgagcgagctctggaagtattccctcgtaccagttcgtatgggtatagttccatgcaggtcacggatgatggctatggaggacttccatcctatgcatcaaaggcatatgaagaacatgtaccacgtttggaaatgactgtacctgctagtggcatctcaaaagtaatgggaaaacatggcacaaacttggacaacattagaaagatttctggagctcacattgaaattattgaaccaaaatcctctcgtcatgagcatattgcttacatatctggaacctctgaacagaggcattcggctgagaatttgatcaaagctttcataatgtctacctaagattccttctgtggtctgagaacaccatttcatcaatttgatctcttttgacttctgctatccatagtttccctgggtttgtgaacatcaaacgtagtgttttctcccacctgtccaagttcccaatgaatactgggcatatctgagcaaggtgtactccagtggtagacaaggcactctatgttccttagatcttcaactgttacctatttatgttggcatacttatcataattcgcgtgtcttactctaaattatctcaatgactggaccagttgctgcttactgatatctctttctattgtcctgccaatactgagttgattattccttcacaactacagtagaggggcctgtttctcaacctcaacgtctgattcactttctgcttagtgtagctcttataatttcatcccatcagactgctatctgattcattaggttagtagtaccaatgccctatttggaatttggaatgcgagaatgaacctttcacgaaaggcttgtccaaaactccttgagattcctgtgtttcaaacactctttggaattcccagtgaatgctgttggctgattcatttggtgcttattgagtttttgtatctctactctgcctatgctgctagctgtgaccttagagaggatcttgttccttgtcaatctgactagttcacccattgcttgcttcggtagttcggttcttatatctttgtcatgtcattaccttactctttcatcatcggttccaaagagttgcttgtttttctgctaactctgctgaggaaccataagttctttgtaaacttgcctganaacccctagaggcctagacttttaggagcaaccatgtacataagcttagtcacgttcttggatcacaatatgcagaacaatttttttagca

SEQ ID NO: 13893 - DNA, 414 bp, Zea mays
  unsure (1)..(414): unsure at all n locations
  Clone ID: MRT4577_112660C.1
aaaaaaaaaagaaaggggcgcgcgcacttacacaaccacaaaaaaccaatcaacaaaacatttttacacaaaaaaaaacacaaaaacgcaggacaaaaaaattttgttggtcgttctaccanaacccncaacacaaaacattcacattgaccttcctaaaaccccaacacaatccgatcagatcatcgctcccctgactttcttaaccgcctccaaatttgaactcatgcaagacactttaaacaaaatggagcataccatctaccccaaaacattttttcatgctctcaacaaaaccttgaaagcaaacccatacagccagacaatcttaggctcacatgctactgaaataaacacatacaacaacctttacgaataatcctcttaccacctatgcccaaccaactttttcac

SEQ ID NO: 13894 - DNA, 197 bp, Zea mays
  Clone ID: MRT4577_112661C.1
ctctaagacaccgggaagaggtgaacatctcaacctctatgtgcgcctggtcttcattacggacaactggagcgagctgaaccaaaaccggaatgagcactttacaggcccctgctgcgttcgacgagctttaatgtacgactgactgttgaaggatcttctacacaatgatcctcaaggtcatccggaagaacctg

SEQ ID NO: 13895 - DNA, 2120 bp, Zea mays
  Clone ID: MRT4577_112662C.1
cgcacagccctaggcaccaaactgcccacacgcacagccgcggagccgccagagcctgacgctgccgccgtcggccgtcctccgccctccagttcttaaggaaagatgagtttgatatcccagaacgcggtccagaagcgctgcctcagaaaaagtgaagctgataattgcaatgatgaggacattggctctccgacctctatagatgcagaagttgggaaggaagcaaaattgaagaatcacaataaggaaaggaagaagaaaaagactaagttgttggaatcccagcagaacaaagaggaagaggagatgcggcagctggagagctcattgtttggttccctttatgctccactggagtttggcactgaggtaggggctgcagtagctcctgaccgggatgcgcctttgtttttcacagataggtctgctggtggtggcatggattattttcctacatatgaggaggatatggcccatgaagatgaggaagacatggtgggtatcaagaggaggaagcctgtatgggtggatgaggaggaagaaatgacagaggtggacattgtgaaggttccaaggttgaggaagctgagaaaagaggaagatgagcatttgatttcagggaaagagtatgaggccaggttgcgtggtcagcatgcaaaattgaacccctttactggctgggctgatatggaccagaaaacttctcttcctgctgcgtcagatggtgagtctgatgatgagggttgtgtcgatgatattcttcggaataatgatgagcttgttgccaaggatactgtcaagctcttacctgggatgctggaattctcaaggctcgttgatgccaatatccaggatccatcaagtggtcctatcaattcagtgcagtttcataggaatgggcaactgatgcttgctgcaggtttggacaagcatctgaggtttttccagattgatggaaagagaaaccccaagatccagagcatatttattggggactgtccagtacacaaggcttcttttctacccgatggctctgaggtgatcctatcaggcaggaggaagttcttctactcatttgacctggtgaatgctgctgttagcaagattggacctttgacgggacgcgaggagaaaagcctggagacctttgagatatcacctgattcgagaaccattgcttttgtcggcaatgaagggtacatccttcttatttctgccaagacaaagcagctcatcacaaccctcaagatgaacggaagcgtgcgttcgctggcttttgcggatggtgggaaccagctactgagcagcggtggagatggccatgtttaccactgggaccttggaacaaggaaatgcatccacaaggcaacagatgacggttccctggctggcctctcgctctgcacctcgcgggatagctctttgtttgccacaggctccagcagcggcatcgtgaatgtgtacaagagggacgattttctcggcgggaagaggaagccgctgaagactatcgagaacctgaccactgatatcggcgagatgaagttcaaccatgacgcccagatcctggcgatcagctcgaggaaagagaggaacggcatgaggctcgtgcacgtcccgtcgttcagcgtgttccagaactggccggggcctcggtttagtctccactatccacggtgcctggatttcagccccggcagtggcttcctgtccgtaggacacgcaggtggaaaggtcctgctgtacaagctccaccattacgagaatgcatgatgaggctaggatggttgcttggcgaaaacccattcttgacattatatttgtactcatgaacactccaatactccatgaatcgagtgagtgtatgctggtccgttccagtcattgtgcctttctatttggtgccgctggtgtcaatgctttggtgcaggctggcgatctcgtacatgtcttttactcttttgtagtcgtacgcaagtcgttgtgctgctgtttgctttattatagtggtggactgagttggttgcagaagtttagtttttttttggcaagagattgcagaatcactgttgtcaactgtgcttaaaattggacttgattgcatagctcttacacct

SEQ ID NO: 13896 - DNA, 368 bp, Zea mays
  Clone ID: MRT4577_112663C.1
gaacctgaaataactcagtgagttgattaattttatgctcttttaaatgatatggccagtcatgtgccagttgaacacctcatttttcctctgtaatgtctgaatctgaaatttgacaaaatttaattaattttatgcccttctaaaagaactataacaggcggcgctcttacgggcgccctatcaagaaaatgcacaacttcctatggctaaggtcagcggctacttaggagtttgttggattcaatagcaatagatatacataagtggtagcttccaggttctcatcacaacgcacagaacatcatgcaaggatcgggcatctcatcaagcatgtagtcatctggggctttagtatcacagagacc

SEQ ID NO: 13897 - DNA, 364 bp, Zea mays
  Clone ID: MRT4577_112664C.1
aaatcaaatactattttttaataaagtgaatattagataagtaattgagacattagtttaacaatctaaacgaaactgatcaatagtgcatcgctcttgtgtatttatatctagggtagatatgcttagcggggaaaaaatactaacgtccagtgtctagaggggccctctgttttttggggcccggtgcgaccgcacccgccgcaccccctcatggccggccgtggcccagaatagaattttacataaacagcactaacaacacttgatacatcctcacgtgctctccttgctacttgatgcctcaagccccttctccgcgccacctaccgccgtcgccctgggggttgcaggtgggggctta

SEQ ID NO: 13898 - DNA, 419 bp, Zea mays
  Clone ID: MRT4577_112666C.1
cggctcgagcggtggtgggcatctccgccgcgacggccgtgctctgcgaggccatgtcctggctcctcatctaccgcaccgccacctacaactccctccgcgcctcctacgcgcagcccgcatcgtcgcgggctaagaagatggaccgcgtcgagaccagcctcaaggacgctgcgcgggagctctcgctcgacaagctcaagtcaggccccgtcgtcgcctgcatgctctcagacgtcttcagcctgctcaactccctcttagagggcccgaccgttgccaagctgcacttagcgcccatcccgctcggccagcggatgagccacccgcggacctgcccgggaacgatcccacccacggttcatgggtctcgctctacttccctctgtcctcaacctgccaaccaacctgcaaaactg

SEQ ID NO: 13899 - DNA, 821 bp, Zea mays
  Clone ID: MRT4577_112667C.1
agcagtggtaacaacgcagagtactttttttttttttttttttttttttttttttcccttttcaaattcaatttgaattcagatctaattcaaaccttttggcccttcattacaattttatatttgggaaattagaggtactaaatctggagatatttaattatttattcattcatatccttttatcttttttttcttctctccatatttctagaattccctttaaatcttaaattctcatctaggtattaatatattctctttatttatttttttttgggtgggcacaaaatgcacaccacaaacataatatccagcatgatgcataattttaatggcatatattcttttattaattatttgcttttgaatatgatgttcacttgggatgatgcataaagtttaaacccacataaggagaaattgtttctctattggtattatttctagcaaattataaagtaggtgttacaaatcctaccccccttaaaaataatctcgtcctcgagatttaggaagaacgagggaaaagatggggaaaatctatgcgaagctcttcttctctttcccatgttgcttcatgttcaccatggtgactccattgcactttgcacatctttatcaccctatttctcgtaactcgagtcaatgtgtcaagaatcttgattcggtactccgtgtaagtcaaatcaccctggacactgagctcttccatcggtaactgttcctcagggacacggagacacttcttcagttgagatacatggaacacattatgcacatctgatagagcccgcgtactctgcgttgttaccactgct

SEQ ID NO: 13900 - DNA, 451 bp, Zea mays
  Clone ID: MRT4577_112668C.1
cgtccattttttttttttttttttttttttttttttttttttttttttttttttttttttatctataaaattataatatttattttttttttatagattaattaaaacaatttagcttgggagcctgaacaagccgggggttaaagtttttttccagccctaaacctaaacaaaacaggggggggcaataataataattaacaaaacttgggagttcgacgaacgggcacgaaaaccgaccgacgcaacgactgaaccactgaacgactgaagcttctgaaaaaacagtgagccgaggaccaccaccatttttttttttttaaggggagctaagctaatgctaatttaaccacgacgacttcacgaaagccctccaccgggggcttccccctttttgctcatttggacgggggccccaaaaaaatctccgagtcaagccttttggaccgga

SEQ ID NO: 13901 - DNA, 261 bp, Zea mays
  Clone ID: MRT4577_112669C.1
attattagtttgctttatttattatcagttattttttaagacatttttgttatgtaataaagttggtgacatttgtctctatacactgagtcattatatgtgttgatcttaaatctgggtttgccccttaaatctgggtgtgacagtgcgcgatggcggtggaccccgggatgcgtgcgacggcggcaccatgcgtggcggcgacgacaattccttgatccagatgcacgacggtggtagctctccgatccgaaggcatgg

SEQ ID NO: 13902 - DNA, 245 bp, Zea mays
  Clone ID: MRT4577_11266C.1
cccaggagaaccaagatggtcgttactctctgacctatatctacactgggctgtccaagcatgttgaagacgttcccgcgtttcaggcccttggctcactcaatgacctccagttctttagatacaacagtaaagacaggaagtctcagcccatgggactctggagacaggtggaaggaatggaggattggaagcaggacagccaacttcagaaggccagggaggacttctttatggagaccctg

SEQ ID NO: 13903 - DNA, 1266 bp, Zea mays
  unsure (1)..(1266): unsure at all n locations
  Clone ID: MRT4577_112670C.1
gggaaaaaaaatttnnannaaaaaaaaaaaaaaaaaaaaaaaaaatccagccgtccggccgatcgtaccgtatacggcatccccgcctctgccaccaccggtccagtccctgatggacacgccgccgccctctctgccgccgtccgccctcctctggccggacctcctcgcgggcgcggcgtcctccacctgccgcctcgtcgccgcgcattcccgtcacttcctggccctatcctctctcctccttctcccgctcgccctcctcctactcgccctcccctgcccgttgttctctgcctccgcctcctccgccgcctcccctcccgtacatctccgggtcccgcaggatccgtcgaggtacccactacccatcccgctgccgctgctcgcccttgccgccgcgctcctctacctcgccgccttcgccgccgccgcggccagcgcgcacgcagggttcttcggtcgccccgtccggctcctcgcctcgctccgctcagtgccagcctcactcctccgcctcatcctgaccgccatcctggcctccccgctcgcactccttccgctcctcccgctccccgctgcgctcggcgccgcgctgctcgtcctcggcttcatccttttgtccccgttctggtccctcgctggcgccgctgccgtggtcgaatcggccacaggcttcacgccgctccggcggagctgccagctcctctctaccgcccgcctcgcagcgctctcctcgttcctggtattcgccgccgggattggggtcacgctctggggcttcggcggtgtggctgccgagaggtacgacgctggggctgggtgggctgggacggcgcctgtggtggtcaaggcggtggctggcacagcgctgctggccgtgatgatgctgtacgggatggtggccaacgttgtgctctacatgcactgccgcgcgatgcacggagagctcgcaggggagatctacaatgagttcgccaacatgtatgtcttcctgccctatgacgatggaaaagatcgccatgttgtctcagtggtcacggtgtggccatgattggtttcagtggaagcaatcaaggttttggtctggtgtgcgtttcagttctgtgcataagtgtgtgtaattgtgatggaatgttcagaacatgtagactactattagtgtaaggaatccatgcgatggaatggtcagaacatgtaggctactattagggcagggaaccatgcttttnggttttggactaagataaaaaaagaattggggtg

SEQ ID NO: 13904 - DNA, 664 bp, Zea mays
  Clone ID: MRT4577_112671C.1
cttttcccttggctattactccaacaggtgttaatacttcaacaactagtacagcaatgcaagatataggatttgacccaacgggatgggaacttgctcttgtcactacctcgagtagcaacaccaattcactggctgtggacagtactttgggcggtggattcgacaagctcacgttggacagcttgtacgacgatggaacctacaggcagatgcagcaacagttgccatacggtgcagtacctcacaatcccttcatggcgagcgaccctttcgcggtgtcgaatcaagtagcttccccgccatcggttcaaatggccgccatggcgcagcagccccagcagatgcaaccaaatcccttcggaccaccatcgcacccacggcctgtgccaaacccattcctcgatgccggcttcggccctttcccagcagcaaatggaaatggaatgcacgcacaagccaacccgtttggaaccgcccaacttctatagcttcacaccgtacagccacggttacatactcgttgcgcaatgccaacccagattccagagttacatactatgtgttgagaagttcaatctccttgcgtcacaaacgtcaatgccagctttgtcccgccatctctcgggcgttgccgcttggtcaattcttgtacagctcgtgc

SEQ ID NO: 13905 - DNA, 436 bp, Zea mays
  Clone ID: MRT4577_112672C.1
gttaggcgtgaccaaaacaatatagccgtggcataaaaaaacgacaggagtacaaggcaacgaacaaagggaagggatcaccaaaccaaccctaccgtaaaggggaagggaaaccccagcccgggcccgggaaaaaagacccaacccaaaagccaagccggaaaaaaaaaaaacggggagcggaaaagccaaaccacttgccttgggcaaaaaaaaaaaagagtagggaacggacccgcccgcccaacaagccaagaacttaaaaggcaaaggaggaggcgccacaaaacaaagcacggaaaggaagcccacaacccaagcggcgtggccgggcagaacagcagagggagaaaagaatacgaccaaaacaaagctagggaggggaaaaaaccccgcccaaagtcaagggaggagaaaagtaatcggtaaagaaaaa

SEQ ID NO: 13906 - DNA, 411 bp, Zea mays
  Clone ID: MRT4577_112673C.1
cggacgcgtgggcgacggcgtcatgcatgcatggatatatacaccgtacctagtggtagactgatatataggtgatttctttttttctttttttgtgtgtgtggtttgatatcaacatccagtagctagctagcaaaccaagcactccgacccatttgcatgcctgcatgtattgacctgagcacctggtactgctgtgtgatgccattagaaaagcaagcaagagagcttgctagctagctacagctcaagtgatcaggggccaagagcacaaggcgtgcagctgattaattaagcaagtttcatcccagcctgtcgtccattgatctggcgacagtactcagtagtatgtatatgcattggatatgtgctctgatggcagaggtcaggaagacgatggacccaccagcc

SEQ ID NO: 13907 - DNA, 201 bp, Zea mays
  Clone ID: MRT4577_112674C.1
ttccctgttcaagtgcgatttctatctaggagacgcgctttattttgaagggggggcgatctaatacattaaggagatatgcagtttgcacttgcatagtacactaactcatgatctcaccagataagatcttgttagggtgataggaataacagttaggataaatcaataatagaatatctatttctctttaatattctt

SEQ ID NO: 13908 - DNA, 937 bp, Zea mays
  Clone ID: MRT4577_112675C.1
aattcggcacgaggccaaacccatccgtcttcgggactagggtcccggcatccatcagtgcaagggcaaggcagttggccgccgcgcctccgcccccgcccccgccccgcgggtctcccctcctgctccggtccagggcgccccggccccccctcgtccgaatcccgtcggtggtgagccgccgccgggtgtggcccgcgagctgcgacgcgccgacgatgctgccaaacggagaagctccctccggatccatgccgccggtgcctgccgccgacgcgaacacctctaattcagatgacactagatttgatgcgtcacagtatgccttttttggcaacaatgtgctggaggagattgaactaggcggattcgaagatgataacagcagtaatgctgctttcgctggactcgatgatttagagcgcccactttcttctcaggggattgcactagaggctgaagatagttcattttcagatcttgatgatcttgcaaatacattctcaaagctaagaagagatgttaacctaccaaagcatattggggtaaataaccttgggacttctttttcaagagaaagttctgctgctgctgactgggcgccggaatttgaatccccactctggtccgatcagcatgtgctagttgctaaccaaggaccgaatggcaatggcctggtggtctccacagcatcattcttctctccttgctgattccagattgcacagaacatcctcatcccctcagcaacaggaacaacacaatcatgatgcacctattcttggaccaaggccatctcctttgcaccggacatcttcatacccgcaaaaggagcctcagtacaacccagatgaagtcattccaaatgcaccatacatgtgaaaccatctacctggggggccacccaattcagtgcctcgacaaccacatcagatga

SEQ ID NO: 13909 - DNA, 526 bp, Zea mays
  Clone ID: MRT4577_112676C.1
aagcaaaagggagcaggatactccgtctttttacaaaaaatttcttcagtcatcccgtaacattgtgaaaatgataagggtgggacctaataaaaattttttaggtgctacaggaagctcaacctacaaaggagctttcttatcctaaggcttggcggggcttcaaacatgaaacagagtcttggttagatggacaagttccggcatagtattgtatcccaaaacatttgatgtcttcacccaacaaatttttggtgctccaccaattgcggcctcagggagccgttctatcatagggaagtttatttatcactctcttatgagatcagatgctactggacaaagatcggtactaccagtccatttaaagtgcacttaaaggttcgcccgttttgcgaactggtcaaaaacatgctcgttgggtatttgtttcctcagctggtccaacttgtcgagctatccctggaagccaaacccctgatttggaaaaaaaaaaaacagcctggcatttggtgtttgatttcaa

SEQ ID NO: 13910 - DNA, 656 bp, Zea mays
  unsure (1)..(656): unsure at all n locations
  Clone ID: MRT4577_112677C.1
gtttcttccttcccctacgcctacaccaccactcctttgtccttaccggagagaggcagcgctcttcgcggccgccgccgaaaccatccctggcggaggcggccggcgaagagtcactccccccttcgtcgtgagtagaagtgagtagtcacttcctgctctccccgcgctctctgcggtgtcggaggttgaccgcgatctcagatccaccgaatccgattccccggcacgatcgagccgaatcgggagcccctaaaccctcaatcgtcggcggcgccgccgaaccacctagcctctgactccccctttactgggtgagctccccttttgctgtgatcccacgggacacgaggtgcagcccgcccccttgttggatcggagcgtcgacgatgatcgtcgggaggaagaatgccggcaaggcctcccccttcttgctcatcctcatctcggtcggctgcttcttcgcgacctacaacttcctcacaatggtgggccacagccgaagcggagacgggccacgcaaattgctcggcagcgggnatcaaggcggtgccgtggccttcgggtctggttcggacccgtcgaagaggttccacgtcgcccttacggcgacggatgcgctgtacagccagtggcagtcgcggataatgtactac

SEQ ID NO: 13911 - DNA, 827 bp, Zea mays
  unsure (1)..(827): unsure at all n locations
  Clone ID: MRT4577_112679C.1
tccggcctataccgcaggatgtagaaatgatggttttgagaatctccgggccctaaccatagacctatgtccattggttgggaaaatccctatttggttatcaaaactcacaaaactggagatattagatctatcatacaatcaccttactggaacaataccatcctggattaacaggctggaactcctcttctttctggacatatcaagcaacaggcttacaggggatattccacctgaattgatggagatgccaatgctacaatctgagaagaattctgccaagttggacccgaagttccttgagttacctgtattttggacacaatcacggcaataccgtttgctcaatgctttccccaatgtattgaatctatgcaacaacagcttgacaggcataattccccaagggattggtcagttgaaagtgctcaatgtcctcaactttagcaccaacagcttgtctggagaaataccacaacaaatttgcaacctcacaaacctgcaaactctagacgtgtcaaataaccagctcacaggtggactcccatctgcactgagtaatcttcacttcctttcttggttcaatgtgtctaacaatgacctagaagggccagttccaagtggaggacagtttaatacctttacaaattctagctacattgggaattccaagctatgtggtcctatgctcagtgtccattgcggctcagtagaagaacctcgagccgtaatgaaaataaggcacaataagaccatcttggcgcttgccttaagtgtgttctttggggggcttgccattcttttcttgntgggacgtcttattt

SEQ ID NO: 13912 - DNA, 918 bp, Zea mays
  Clone ID: MRT4577_11267C.1
cttcgagctcatctaatatagcaaccacacggcccgaaaatggcatccgctttgcgcgtactcgctctcctcctcgtgggcgccgcggtggcggacgccgcgagcatcgtggtgaccaacaagtgcgcgtacaccgtgtggccggcggcgctgccgggcggcggcacggtgctgaacaccggggagtcgtggcccatcgacgtgcccgcggggacgcggagcggccgcgtgtggggccgcacggggtgcggcttcgtcaccaacggcacgctggggcagtgccagacgggcgactgcggcggcacgctggcgtgcagcaaggtcgggttcgagcccatcacgctggccgagtactcgctcggcggcacaggcgccgaccggttcgacatctccctcgtccacggcttcaacgcgcccatgtcgttcctcccggccggcggcggcggcggcggtgccaggtgcggccgcggcgggccgtcgtgccccgtgcaggagatcacgttcgactgcccctccgagcagcggcgggtggccgggtgcggcaacccctgcgacggcaagagcagcagctgcggccccaacaacgggacggagtacttcaagaaggcgtgcccgcagacgatcacgtacccccgggacacgaccaacaccgtcttcacgtgcccggccgggacgagctacgagatcaccttctgcccgtgagaaaccacgagctggcaagcgagctagcgagctgagccaccgacacgtacggataggatcggagctcgtgatggattttggtcctgcatgggctctctctgcagctcgtgtttgcgtacgtatatgtaaacatcggtttatagatcatcatcttatgatgtcatctatatatattatatatttctggatgatatcaggttacttaaaaaaaaaaaa

SEQ ID NO: 13913 - DNA, 2121 bp, Zea mays
  Clone ID: MRT4577_112680C.1
gtaaaagccgccgcctccaacccttgtaaaagtttcttggatagtccgtagccgcttgccctgttcgcatcttcgcgcgtggcgcacaccgctccagctctccttcgacgggcacggccgagccgccttcgtcttggccgcagcggtgcgcgctctccatggcgtcctaattagcctagccgcaacgccgcgcccgtgcctgcggcatggatgaaccccttcttggcaatggtcttaagaccagcgggaaaagagagagcctggtagtggccgaggtcagaaaacagatgtaccttgctgggccactcatcgctgcatggatcctacagaacattgtccagatgatatctatcatgtttgtcggtcaccttggtgagcttgccctctccagtgcctccatcgccacctcctttgcaggcgttactggcttcagcttattgtctggcatggcgagcagcttggacacactgtgtgggcaatcgttcggggcaaagcagtactatcttcttggcatctacaagcagagggcaatccttgtgctcactctagtcagccttgtggttgcgattatctggtcatacactggacagatccttctactctttggtcaggatccagagattgcagctggggcagggagctatatccggtggatgattcctgcgctatttgtgtatggtccactacagtgccatgtccggtttctgcaaacgcagaacatagtcctcccagtgatgctgagctcaggtgccacagcactgaaccatctgctggtgtgctggctgctggtgtacaagattggtatgggcaacaagggtgctgccttggccaatgccatctcatactttaccaatgtatcaatcctggcaatttacgtcaggcttgcaccagcctgtagaaacacctggagagggttctcaaaggaggcttttcatgacataaccagcttcttgaggcttggtattccatctgcgctgatggtttgcttggagtggtggtcatttgagctcctggtacttctttctggacttctccccaatccaaagcttgagacatcggttttgtccatttccttaaacacaggctctttagcgtttatgatcccttttgggcttagcgcagccataagcacccgtgtttcaaatgaacttggtgctgggcgaccccatgctgcccatctggctacccgtgtggtcatggtgctggccatcgtggttggcgtattaatcggactagctatgattttggtgcgcaatatctgggggtatgcatacagtaatgagaaggaggtggtcaaatacatctccaaaatgatgccgatcctagccgtgtcattcttgttcgattgcgtgcagtgtgttctttcaggtgttgctaggggctgtggatggcaaaagattggggcttgtgttaatcttggtgcatactaccttataggaattccagctgccttctgtttcgcctttatgtaccatctaggtggaatgggactttggttgggaataatctgcgcactcgtcatacagatgctattgcttctcacaattaccttgtgcagcaactgggagaaagaagctttgaaggcaaaggacagagtatttagtacatccgtaccagctgacatgatgacatgatatttctgaagatatttttttgaaggaaatgcccatgaaactttgccaaggaacatactaagaattggttgttcagattcaaggcctttctccatgccatcagaatgatgcttgggtctagtaatagctcctgagcagtctgttttttacttttggtcaatactcaatacatggaagatgtttggtttgaagaaccacgccatcctagatgaggtggtatattataagttgatataacggctccatactagttattgaggaatgagacgatgattatctcatgtaataataatgcttttccccctctagttattgatgtaagacaattgaggcaaatgaacaaaatgtcacatttgattaaataagttgcattgtctatttgtgcagttgtttgggaaataattaaattgtaattttatagtttttaaggagctaagattcagtatattaagaaaatattctcgaaaaaaaaaaaaaaaaagcggcc

SEQ ID NO: 13914 - DNA, 2622 bp, Zea mays
  Clone ID: MRT4577_112681C.1
tggggtacccccgaggccggccgggagccgccgcctccattccttgtaaaagtttcttggggagtccgtagccgcttgccctgttcgcatcttcgcgcgtggcgcacaccgctccagctctccttcgacgggcacggccgagccgccttcgtcttggccgcagcggtgcgcgctctccatggcgtcctaattagcctagccgcaacgccgcgcccgtgcctgcgaagtagggtgtaaagttttgtatatgatgccaggcatggatgaaccccttcttggcaatggtcttaagaccagcgggaaaagagagagcctggtagtggccgaggtcagaaaacagatgtaccttgctgggccactcatcgctgcatggatcctacagaacattgtccagatgatatctatcatgtttgtcggtcaccttggtgagcttgccctctccagtgcctccatcgccacctcctttgcaggcgttactggcttcagcttattgtctggcatggcgagcagcttggacacactgtgtgggcaatcgttcggggcaaagcagtactatcttcttggcatctacaagcagagggcaatccttgtgctcactctagtcagccttgtggttgcgattatctggtcatacactggacagatccttctactctttggtcaggatccagagattgcagctggggcagggagctatatccggtggatgattcctgcgctatttgtgtatggtccactacagtgccatgtccggtttctgcaaacgcagaacatagtcctcccagtgatgctgagctcaggtgccacagcactgaaccatctgctggtgtgctggctgctggtgtacaagattggtatgggcaacaagggtgctgccttggccaatgccatctcatactttaccaatgtatcaatcctggcaatttacgtcaggcttgcaccagcctgtagaaacacctggagagggttctcaaaggaggcttttcatgacataaccagcttcttgaggcttggtattccatctgcgctgatggtttgcttggagtggtggtcatttgagctcctggtacttctttctggacttctccccaatccaaagcttgagacatcggttttgtccatttcgtgagttaactttgcatgtgacacttccaatttgattttcccttccttggttgtaactctttagtttcctgcagcttaaacacaggctctttagcgtttatgatcccttttgggcttagcgcagccataaggtcagactgagcagatcaggctcacaaactttaacatgtcatgctgatcaacagattattgtggcactgatatgtttcttttgctcctatagcacccgtgtttcaaatgaacttggtgctgggcgaccccatgctgcccatctggctacccgtgtggtcatggtgctggccatcgtggttggcgtattaatcggactagctatgattttggtgcgcaatatctgggggtatgcatacagtaatgagaaggaggtggtcaaatacatctccaaaatgatgccgatcctagccgtgtcattcttgttcgattgcgtgcagtgtgttctttcaggtaaatgtatcaatgatacttcaagtataccaaattttgcaaagacagtgaacccatttcctaatcttttgggttgatatatttttatctctttgtatattatgaactgtatttattcctttggaacaatatcacctacatcatggctcacacaatagcggattcttgatattgtcccaggtgttgctaggggctgtggatggcaaaagattggggcttgtgttaatcttggtgcatactaccttataggaattccagctgccttctgtttcgcctttatgtaccatctaggtggaatgggactttggttgggaataatctgcgcactcgtcatacagatgctattgcttctcacaattaccttgtgcagcaactgggagaaagaagctttgaaggcaaaggacagagtatttagtacatccgtaccagctgacatgatgacatgatatttctgaagatatttttttgaaggaaatgcccatgaaactttgccaaggaacatactaagaattggttgttcagattcaaggcctttctccatgccatcagaatgatgcttgggtctagtaatagctcctgagcagtctgttttttacttttggtcaatactcaatacatggaagatgtttggtttgaagaaccacgccatcctagatgaggtggtatattataagttgatataacggctccatactagttattgaggaatgagacgatgattatctcatgtaataataatgcttttccccctctagttattgatgtaagacaattgaggcaaaaaaaaaaaaaaaaaaaaaaaaaaaaaaaaaaaaaaaaaaaaaaaaaaaaaaaaaaaaaaaaaaaaaaaaaaaaaataaaaacataaaaactacacaccacccaaaagacctatattaacatccctcaaacacacacctcagaatacataaaaaaaaaaaggcccctgggggccggggccgttaaaaaaaagggccccccccggctcgggggatatcccaattacggtttttcataccccccccccccgggggg

SEQ ID NO: 13915 - DNA, 4967 bp, Zea mays
  unsure (1)..(4967): unsure at all n locations
  Clone ID: MRT4577_112682C.1
cttgtggactattcattgattctagctggattgctttttcataagagttttggctcgaaaaacgcagctgcacatctttatattaagaagaggggaatttaaggtccaagaggaccagtacaataaccaccctatggtggccagcaacaagcataataaaaccatccataggaaaaagatacaaagagacgaccaatgaaaaaattaagtcgagcttgctgcgcctagagcagcagcaaaaccaaggcttccgaggtgtttggcaccagcttgcacccacccataaagatagctcatcgaggaagcttctatgcaccttgccaatggttggcaaatctccatcgaaaataactctgtttctatgcaaccaaaggcaccatgctcccaaaataatggcactgttgaaaaaatttctcttgcttctgtgcacctgaatggtcactagtccccaccaatcagcaaaattagtatcttctggtcctggagttaagtggcccataccaaagggggagaggatgctatgccaaaactgcctggcgaagacacaaccagtcaacagatgctgaactgtttcttgctcttgttcacataaagggcatgcttccggatggggaagacctcttttttgcagcctgtcagctgtccaacacttattctgcatggctaaccataaaaaggtcttacacttaggaggagcccaagatttccaaagtcttttccaaggttcgaaggtgatggagcccaaaaacagaaccttgtagcaggacctagaagagaaaaggcccgaagactcgaatctccacacatggtgatcctcctgagaagtgagcacgatctcacccagggtgtcccaaagcgtaagatattgttgtatccctataagggagagggttggcttgatgtccctgacccacgacatgccctctaaggcttgatgcactgtcctggtagaggcaaactttntatccacctttgagatcacttcaggtgccagatcagcgatagagcacccatttatccatctgtccctccaaaaaaagggtgttattgccattacccacattagtgtacatcgaactggccactagtttccttacttgtgactgaacagggagatcctatccactccaaggcctattggggtcagtcttgatgagccaaagccatttagcttgcagcgcccaactcttatatatcagatttgggataccaagtccaccaaggtccagcggtctggtgactttatcccacgccacaaggcaatgcccacctttcacatcttttctacccttccacaagaaacctcgtcgaattttgtcaatagcactgataacccacttgggaacattcatggcgatgaaaagatatacggggattgcagagagcacgaaccggaccaaggctgccctgccagcaaggtttagtagtggagccttccaaccgggcagccggttagctatccactgcaaaaggtccctcctccccaacttcttatcagaaacagccagctgggaggagatccatcatatactctaggcagaataggtagggtatgaattggttaggcaaggatcaatctgttattgggtgtttctataaaccatgtgatccttacctggatatgtggaactctattttggactgaccgctggctgcatggtcaatgcatctcagaaattgtcccttctctgctaaatagagtttcaaaaagattgagaaaaaggaaaacagttcagcaagctctcagggataacagcaagtagctataaatgcataaatatcagaacttactgggaagtaataagaaaagaatgtaacctctgagttggttaggtgatcaggtcctgagttcgaattccaatgagagtgaggtctcgttgattctcctggtttgcaagacggtgacatatgggcgtggatccttatgtaggtgatgagactcaaagtagataaagatctacttataggggtggacgacctcatgttcggagaggtcacttttgtgactgtattggagattatttttcttaaggggtgggatgattttaataaactaaaacagatagactggactgatgaagcagccaagaaccacttccttggttatttattaatagacgagaacaccatatgatggccggatgaagtcaaatgcaatctggttggtacttcccaccctcaatgacaaacatcgtccatctaaaaaaattgtagcagttttagccatctccctttgtactactgtaaatatactcccttcaccaaaacagtattgatattgtaccgtgccaaaaggtcctatctcaataggtctagaaagtagaactcgcaagctttggcaaagaggagatggaatgtacaagcagcgtagatttatgcttagaagtaaaactatctaatatagcaatagtaaatactttgacaaattttcattgtcgtgtagaattaactaaatatcttacacattataaatataattgtttgatgtcatgacgaacctgaaacctgttaagaatcttccccttgagaaatgcaaacaagtagagaacaggtaccttgttgctgagctccatgcaatcatggacaatacctcaatttcaaccaaaaggttgataggttcctggaaaacaggaaaatagaattgcacactcccttcgcaggcattatcctgttcaggttcaaagggactttctcagcccatctcacaacagtccaggctaagaggctctcagacatctcattagataagatggtagaacagctgctgatgccttagccactagccagaacagctgctgatgccttagcctcatttagattggatggctccgaggaaaccttatttctgagctgcatagctttctggtacatagatctcccctcctgcttcaccatgttgttccccactaattgttttccttgcagccaaaaattcagcactcatagcattcattccttgtatcacagcttcctctactgttccataaccattttcatcagcatacttcctgatatcctccgtgattttcattgaacaaaacttgggcccacacattgagcagaaatgtgccactttggcaccctcagagggcaatgtttcatcatggaaagccatagcagttactggatccagagataaagcaaattggtcaagccatctaaactcaaaccttgccttgctaagtgcatcatcccaagcttgtgcatagggatgacccttcgccaaatcagcagcatgagcagaaattttgtaggatattacaccagtcttgacatcatcacgattgggcaacccaaggtgctcctttggtgttacatagcaaagaagtgcagtgccaagagctccaatgttggcagcaccaatggctgaagtgatgtgatcataaccaggtgcaatatcagttgtcaaaggacccaatgtatagaaaggcgcttcattacaccactccaactgtttctccatgttttcaggaattttatgcattgggatgtgacccgggccttcattcattacctgcacatctttcgcccatgctcgacgtgttagttcaccttgagtcagcagttctgcaaactgtgcactatcatttgcatcataaatggaaccaggcctcaaaccatcaccaattgataatgccacatcatactgattgcatatgtcaagaatgtcatcccaatgttcatatgcaaagttctccttgtgataagttaagcaccattttgcatggattgagccaccacgtgaaactatgcccgtcattctctttgctgtaagaggaatgtaacgaagcaggacaccagcatggattgtgaagtaatcaacgccctgctcagcttgttcaatcaaggtatccctaaaaatttcccagctcagattttcagcaataccatttactttctcaagtgcttggtaaataggaacagtcccaataggaaccggagagttgcgaataatccattcccgcgtctcatggatatgtcgccctgttgaaaggtccatgacagtatcagctccccacatcgtggcccactggagcttgtgaacttcctcctcaatggagctcacaacagctgaattcccaatatttgcattcacctttacaaggaagtttcttccaacaatcatgggttccaattccaggtgcctcttgttggaaggaattatggctcgtccacgggcaacttctgtccgaacaaattcaggactaaggttctcacggctggcacagtataacatctcctctgttacaattccctgtttagcataatacatttgtgtgtaccgaggactacccagcttttccctcctatcaatccattccttccttatctttgggagtccaatccttgggcttatattttgaggaccgctggtgtcatatgtatcaaagtgcttctgatctccagtcaaatggactctccggaatggaaccttgaggacatgacctgattcctcgtggatgatttcacttgattctttggtactccttggaaagcattcttcaaaagatgggagtggcagaaattctggagctgttgggtcgactgtgtgcctattttgcttggtttttggtggctctgctattgactggtcagtcactgaagcagccttggggatcaaataagcgacgctagtgttcctgtcttgcgcatcttgaaggcgtggaatgccaccaaaaccagataacagtgcagtttttgggaacttcagggcgctgcagctactcttcaaagtcattgctggtgaaaatgagggttgcagtgcagccatttcctcggaggaacggcgggtccggacgcgaggcggcgatggttggcgacggcgagagaggagcgcgtgtggagtggcagatttttcctttccttgtatataggacgccgtgcggaagaggatagggcacgggtggccagtggccaggccacaccacgccgggaacgagcccggccggcctcgagggtacccaatg

SEQ ID NO: 13916 - DNA, 1476 bp, Zea mays
  unsure (1)..(1476): unsure at all n locations
  Clone ID: MRT4577_112683C.1
cggccgggaggtcctccactcaaccgcagaggcagcaaagagaagccatagcacagctgcacaggagcggacgagcccaggcgccaagaaatcaccgcccgtcccggtccgtcggtatggtggcggcgatcgcggtggcgtcggcggggctcgggatgctggcgggcgtggccatggccaacaggtcgttgtcgtccgacggcgccgcgcagtggaggcccgggggcccggcgctgcggtggggcggcggaggcgccccgcgctgcgaggcgtgcggcgggtcgggcaaggaggagtgccgcctgtgcgcgcgctggtccgacgccggggcccggggaaagaagcagagccgctccgggtgcggggcgtgcgcgggcacgcgccgcacgccgtgccggtgctgcggcgggtccggcaccggccgccgcgcccccgtgcggatcgccacgtccgcgcgcgccgcgctgaccgcccggactgccagatgaccaccggaccgtccgaccgtcccacgcgccggcgccgacgccggccgtgtctcaattcgcctctcctcgaccggggctctcccgggtcatggatgaaggcggctctgtctgcggcgggcgacaagctggctcagcggattcacgggcgcggagatgttcgttgctgcttcttttttggatggacaaaaagaaaaaaaatcgtagggactatagcggcatatgtttagccaactagacctagattgattagcaaatttgtcaagatatgctcaaatatttatttggatttgctgtctttgcacactcgctcatgccgagattcacgcttctctgactgccaagagaacttggcgctgcaggcgatttatgtccgaattttcatcttcgtctctctaagcgtcgaagatgtcgcttaacaaaggcatcgcaaccttggggattagtcgataccaagaatacatttaaaccggagcctgcaaaatcccccaaaaccgtgccaaatttctacgcagcatcgagttcagaggggggcagtgaactaagctaggcatgtgcgtgtcaacgcacgaatcaaaatggaacccgtccacgacccggccactgcgactgcgtggtgacacgacggagaatctttctttaccttccggatggtcctaaacgggtgatgtgatgtaagtaactgcaatattttctgcaagaaaaatattagagcgtgcatatatatctctggcagtctgcactagtgcactgcactgactgccgtggcacatgaactctcaacctgcaccacagaaacattcgtgcagcaatcgacaacacatgcattgcatcctgaggcctgaaaccgaccgccaccgaacgaacatggagatcaacatcagatcaacctctctgcaaagcctttctgcagcagtactcccacagcacgcactcatgcagttgcccagccaggcggccacccgtagcctccgaatcagacagctncgtg

SEQ ID NO: 13917 - DNA, 779 bp, Zea mays
  Clone ID: MRT4577_112684C.1
ggccgcttttttttttttttttttggataataaataggctacaaactcacgatataggactactttgcatatttattcacgtccaccataaatacgccaaggttttccaatgggacaagccaaaaaaaatcatccacatgaccatatccatccatctacagctactcaaactcaacatgtctggcttttgcgcgatcctcccgcttgcactagtgatatgatacatgcattactatgatattgtagggtcgtaatctccacctcacatcaatggggagtagagataacaaagctcgacgtccctcctgaatggaaaggtacgcgtctgtctgtgtggccgtgatcgtgtctctctgtagtccgtaaactaactccaacgactcaccaaaacgcggaccaacctgtgttgtgctacgcagtgtggcagatctggctggtgctgctgagcctcttcgtgtcgttggtcgtcctcttctatgccttcttcacgcacgcgaggctcaacctgaggccatagaagaagacagccagtcacctcaaaatctctgatggcgccctcaaggcatgagggttgttgccgactgcgaccacacctcgctgtttggtgcggcgtgctttgtagggatgcataccaagcatgaaacttcagaaagattgaggtaaggatgcataccaagtctaaggatgatgcctttgcttaaggtttttcaaccttgctagaacatatctgtggttagaactttatcagaactacgtgcaatctgtttgaatctcgagcc

SEQ ID NO: 13918 - DNA, 1190 bp, Zea mays
  Clone ID: MRT4577_112685C.1
aactaaataacttgcacattataaataaaattgttagatgtcatgacgaacctgatacctgttaagaatcttccccttgagaaatgcaaacaagtagagaacaggtaccttgttgctgagctccatgcaatcatggacaatacctcaatttccaccaaaaggttgataggttcctggaaaacaggaaaatagaattgcacactcccttcgcaggcattatcctgttcaggttcaaagggactttctcagcccatctcacaacagtccaggctaagaggctctcagactgttgagaacacaggcaccccatctcattagataagatggtagaacagctgctgatgccttagccactagccagaacagctgctgatgccttagcctcatttagaatggatggctccgaggaaaccttatttctgagctgcatagctttctggtacatagatctcccctcctgcttcaccatgttgttccccactaattgttttccttgcagccaaaaattcagcactcatagcattcattccttgtatcacagcttcctctactgttccataaccattttcatcagcatacttcctgatatcctccgtgattttcattgaacaaaacttgggcccacacattgagcagaaatgtgccactttggcaccctcagagggcaatgtttcatcatggaaagccatagcagttactggatccagagataaagcaaattggtcaagccatctaaactcaaaccttgccttgctaagtgcatcatcccaagcttgtgcatagggatgacccttcgccaaatcagcagcatgagcagaaattttgtaggatattacaccagtcttgacatcatcacgattgggcaacccaaggtgctcctttggtgttacatagcaaagaagtgcagtgccaagagctccaatgttggcagcaccaatggctgaagtgatgtgatcataaccaggtgcaatatcagttgtcaaaggacccaatgtatagaaaggcgcttcattacaccactccaactgtttctccatgttttcaggaattttatgcattgggatgtgacccgggccttcattcatcacctgcacatctttcgcccatgctcgacgtgttagttcaccttgagtcagcagttctagatcgcgagcggccgctcgcgttctagatcgcgagcgatctagaac

SEQ ID NO: 13919 - DNA, 2536 bp, Zea mays
  unsure (1)..(2536): unsure at all n locations
  Clone ID: MRT4577_112686C.1
gcgctcctctctcgccgtcgccaaccatcgccgcctcgcgtccggacccgccgttcctccgaggtggtcaagacctctacgagctatacggtccgctgtccagcatctattaagggaagcaagccaaatgaagaatttgcacttagggggcgtccaactcttccatatccttttacctggctcaaattccatagaaccagccaagaaacgttggaaatggctgcactgcaaccctcattttcaccagcaatgactttgaagagtagctgcagcgccctgaagttcccaaaaactgcactgttatctggttttggtggcattccacgccttcaagatgcgcaagacaggaacactagcgtcgcttatttgatccccaaggctgcttcagtgactgaccagtcaatagcagagccaccaaaaaccaagcaaaataggcacacagtcgacccaacagctccagaatttctgccactcccatcttttgaagaatgctttccaaggagtaccaaagaatcaagtgaaatcatccacgaggaatcaggtcatgtcctcaaggttccattccggagagtccatttgactggagatcagaagcactttgatacatatgacaccagtggtcctcaaaatataagcccaaggattggactcccaaagataaggaaggaatggattgataggagggaaaagctgggtagtcctcggtacacacaaatgtattatgctaaacagggaattgtaacagaggagatgttatactgtgccagccgtgagaaccttagtcctgaatttgttcggacagaagttgcccgtggacgagccataattccttccaacaagaggcacctggaattggaacccatgattgttggaagaaacttccttgtaaaggtgaatgcaaatattgggaattcagctgttgtgagctccattgaggaggaagttcacaagctccagtgggccacgatgtggggagctgatactgtcatggacctttcaacagggcgacatatccatgagacgcgggaatggattattcgcaactctccggttcctattgggactgttcctatttaccaagcacttgagaaagtaaatggtattgctgaaaatctgagctgggaaannnnnagggataccttgattgaacaagctgagcagggcgttgattacttcacaatccatgctggtgtcctgcttcgttacattcctcttacagcaaagagaatgacgggcatagtttcacgtggtggctcaatccatgcaaaatggtgcttaacttatcacaaggagaactttgcatatgaacattgggatgacattcttgacatatgcaatcagtatgatgtggcattatcaattggtgatggtttgaggcctggttccatttatgatgcaaatgatagtgcacagtttgcagaactgctgactcaaggtgaactaacacgtcgagcatgggcgaaagatgtgcaggtgatgaatgaaggcccgggtcacatcccaatgcataaaattcctgaaaacatggagaaacagttggagtggtgtaatgaagcgcctttctatacannnnnncctcgaggccggccgggttgacttggttatgatcaggccgggtcagccattggtgctgccaacattggagctcttggcactgcacttctttgctatgtaacaccaaaggagcaccttgggttgcccaatcgtgatgatgtcaagactggtgtaatatcctacaaaatttctgctcatgctgctgatttggcgaagggtcatccctatgcacaagcttgggatgatgcacttagcaaggcaaggtttgagtttagatggcttgaccaatttgctttatctctggatccagtaactgctatggctttccatgatgaaacattgccctctgagggtgccaaagtggcacatttctgctcaatgtgtgggcccaagttttgttcaatgaaaatcacggaggatatcaggaagtatgctgatgaaaatggttatggaacagtagaggaagctgtgatacaaggaatgaatgctatgagtgctgaatttttggctgcaaggaaaacaattagtggggaacaacatggtgaagcaggaggggagatctatgtaccagaaagctatgcagctcagaaataaggtttcctcggagccatccattctaaatgaggctaaggcatcagcagctgttctggctagtggctaaggcatcagcagctgttctaccatcttatctaatgagatggtaagcagtatgtgaataaagctggtgttgcttaccttcagtttgtgaatgccattatgtactgtaataaaaaaactctgtattgtactccctagcattatcattatgcttttgtcttctttgtatcacaatgggattgttagtgatgaaaattgcaccaggggtgcctgtgttctcaacagtctgagagcctcttagcctggactgttgtgagatgggctgagaaagaccctttgaacctgaacacgataacgcctgccaagggagtgttgtaattgtatt

SEQ ID NO: 13920 - DNA, 1487 bp, Zea mays
  Clone ID: MRT4577_112687C.1
cagaactccaagaaacagttgcacacttgaggcaagaaatcagtaatttatcgaaggctgcaaaaagcgaggatagttttgctagcgtgcagtctagtgaaccatcaacagcaagcactgatactagggatcaaacaaatgaaatctcaaaccgtgcaaatatgtcctctagaacaacggacttaaatgagtcaggatttatatctcaagtgctcaagcaggcttcagaaattgaaagtttgaaacaagaaaatctgaggttggtggaagagaaggatggactggaaattcatagtcaaaagttggcggaggaatcatcctatgctaaagaattggcttctgctgctgcaattgaacttaagaatttggcagaagaagtcactaggctttcttatgaaaacgcaaagctgaatgcagacttagctgcggcaagagagctaaatgcatcgatgtcaagaagtaacatccaccctgacccaaagcgtcgtgatcatgagagcggaattttagttgaggagttgcagaaagagttggttgctagttgtcaaagggaggccgtattagaggacacactatctcaaaaggaccgaagagagagtgagcttctaaagattattgatgatgcaaaatgccgtgagcatgagttgaaaaatgaactggcaagcatgggggcccttctttcgaagataaagaaagaaaactctcaacaggatgtatttgaatttaaagcaaagcaaaacggctttcactcatccaagactgatagtggtagactggtaagtgaaatgcaagcatcggataatgggtgctgggatggcctcagtacttttgaagaagcaagagctgcatacaattttgaaagaatgcgctgcaaggaattggaaagcatcgtgtccaaactaaagggtgaggacctcaggggcctagatgttaaagttcttgaagaactacaaaacttccatgtagaagcactgtcaaggatctgccaagaaaagatggcaagtcaggcgctatagcaaaaacctttcctgagacgagtagccgctttcatgcaggccagagcttatttctcagatgtcccttcaactttatgcccatctctctgaagttccactcacaatttcacatagttgctgctactgcaaccgggacaaccttgattagtccgcctttggacactgattcctgcgtttaaccgacagaaaacgaagcaaaatgcggttaaatagcaggcgctaatggtcactgagtagttagcatgcagatactcccctcctgtacagctttttattaaatatagtagcagtggtattgtaggagtacccggattgtatttatactggtaatatatgagccggtaaaacccgaaggtggtgtttctgttatacctggaccgtgctctgcccttcaaaaactgtagtaaacccgaacggacgctgatgtagctttggcaaacttgctgttgatgtgatgcatgactgccgtgc

SEQ ID NO: 13921 - DNA, 757 bp, Zea mays
  Clone ID: MRT4577_112688C.1
aacactgttccacggcgcacggcgagctcagtacagcacagtgaggggaaggagcactggggagacagtagctagcgttgcgagttccccggcggcaatggcgtggtggaagaacggcgccttggtcgccgcggcgaccctcgccgtggccgcggtggtctgcgccggcgtggcggcggcggcgagcaagttcgacgacgtggtgcagcccagctgggccaacgaccacgtcctgtacgaggacgacctcctcaagctccgcctcgacagctcctccggcgggggattcgcgtccaagaaccggttcttgtacggcaaagcgaccgccgacctgaagctcgtgccgggggactccgccggcgtcgtcactgctttctatctgtcgtcggcgggggacaagcacaacgagttcgacttcgagttcctgggcaacgtcaccggcgagccgtacctggtgcagaccaacctgtacatcgacggcgtgggcaaccgggagcagcgcatcgacctctggttcgaccccaccgccgacctccacacctacgccgtgctctggaaccccagccaggtcgtcttcctcgtcgacgacacccccatccgcgtctacgacaacaagaacgcctccgccaccaagctcaagggccaccaccgccaccccaacaacgccaccaacaccaccgccacccaggcccacgttccgcgttcccgtcgccgcagccccatggccgtgtacagctccatctggaacgcggacgac

SEQ ID NO: 13922 - DNA, 733 bp, Zea mays
  Clone ID: MRT4577_112689C.1
gaatcctggtggagcggctcgtgctcgtcgctgcgggtgtgtgcctggaggaggccgatctggcgtccgggctgttcgccgtggacgacatctcggaggcggccagcctgctgctgccgcagcggccggaggatctgaggaggttggtggagctcaccttctgcaaaccaccaaagttcatgccgtcctgcttcatcagggactacatcagggttatgtgtactgaaaatgtgaaagaaaagactgagttgttatatgccttgatcagtggtaggaagctttcggaccttcccaaaattaaccagcaaaccttgataatttggggagagcaagacagggttttcccattagaacttggcttgcggttgaaaggacatttgggggatacatcggaattaaccatcgtcaaggatgctggccatgccataaaccgtgaaaagcctgcagagctttgcagacttataaagaactacatcatcgacccctcggtcaaataccgggatgatcgcaagggatgttggaagtttgcgttaagaaggtttgctggatcgagcctgaggaaggtggactcgagccggccactgatataatgcacatatatattgacttgtataccatgtaagaaattccgactttcatctgtgtctgtcttaacattgataactgttaagtcttaccaccaacgtatcctaaagtctgcagtgtgcatttgtgttggagtgctggtcgcact

SEQ ID NO: 13923 - DNA, 301 bp, Zea mays
  Clone ID: MRT4577_11268C.1
agggggccatatggcgtgcttgaatgagaggctgatgaaagttgtgattacccagaagtatgtgaaggatatgtctactcatcaccaatgctgcgtctatacagagattactgtgtgccgaaagatctcgcagaatgagaagtccaaggtactcccgccttatgaccccgcctggtactacttgaggccggcattggatatgcgtacgatctactggcgacactgaaatgccgtagccggttagcacaagacctctggttgtggttagacgaagagttcccgtctacctatcttaagctag

SEQ ID NO: 13924 - DNA, 208 bp, Zea mays
  Clone ID: MRT4577_112690C.1
tcgtttttattggatcctagtttgcgatctcgggagggtctaatgattaagggggcaggttatctcctaatttcaactaaaaggccggcatcataacgcacgaagctgcaggagtacatggacgcacccatgctacaggctttgcaccgtatcctgagggctacatgtccaagcatatcacaatggctcacacttctttgcctttaca

SEQ ID NO: 13925 - DNA, 189 bp, Zea mays
  Clone ID: MRT4577_112691C.1
ggcaggcgtcgctcatcaggactcactctctctcggatccaaattaggaccgcaccacggcgagctgcgaaggacctccccaggaccggagaagggctccgacccactgggccaacagggcgaggccccccaccaccggtggggtgctactaccgacgcggtcgcgcacatagctccaaaccctaaccc

SEQ ID NO: 13926 - DNA, 673 bp, Zea mays
  Clone ID: MRT4577_112692C.1
cactccgagccaaccaaccactccggacccctcctcccccacccagccttcttcttctccacctccgccacaggttccaggagagctcgcctcgccttgctgctacctgaagccaccagcggaggcacgctggagggagcatgaatgtctccgtcgtgccccggagcgaccgcgaggtcgtcaagggctcggccaaggtcacggatctgcaggaagccatccatgccaagcctaagaagtattatcctgctaggcaacggctcaccctccctgcacaacctggaaaatctggaaagccaattgtcctcaaccaaaaggccagcctatcggaatactgcgagaagggttccgggtcatgtctagtaccgcttgacaatcacatcaatgcagtgaatgtgctgtagccagtattttgccctccttgcttgtttgcttgacctcatctggtactggtagggtctttttggtcactacaggttgttaggatcttgagaggggatgattcgaaataaataggctcatctttcattacttgctatatatacagttctgttgtatgcttgcaaatctatttgatttggttgctgtttgttcttgtgtatattaactgtctatatgtgctcgtatattagggtgacgtcacagcaggatatatctcgtgcaaggctctggt

SEQ ID NO: 13927 - DNA, 426 bp, Zea mays
  unsure (1)..(426): unsure at all n locations
  Clone ID: MRT4577_112693C.1
ctcggcggccgccatgtgatggttctgcgnaatcgcccttacgcggccgggcgggggctccttttacatggtggcccggctgtgaaaaaaaatctttaccgtactagatccaacaggaaatctaaggtgggctacctaccttgatggccctgtgtggcctgaaccattcttgagtcgtataacaacggttaccgtgggggcgttaatgtgtgaacaaaacatgagggcgcaacagctacgaccactggggctagcaaaccttgctagcctactgtgagtaaagaagtttcttgcattcaaccaactaggttcattgaactctgcttcttatttgcatcaacaacaactaccatgcagacagctacctgctggctacctggagcaatttgttgcatgtaagcaactagcagcatggtactctgctgc

SEQ ID NO: 13928 - DNA, 318 bp, Zea mays
  Clone ID: MRT4577_112694C.1
gaggtcccggagactcataaggctatattcgggaggtgggtgcatactttccacaacggtctctttacagaaacatctgtagagcaggcatcgatcgccaatatcacatgttcacggggatcattccatattggcaaggttctcacataaacacacaacgtccccgctgtcgtcgctactcgacaagactatcattaatagtgctgggtctgctggctaatttggcacacttaaactaacttattatgcttgtgttagttggtgaaataaaacgactctcaaaaatcagagtgtagaacacttagccggtgacaaaac

SEQ ID NO: 13929 - DNA, 260 bp, Zea mays
  Clone ID: MRT4577_112695C.1
gggcaacaaaccaagggaacaagggccttgtggcccggtttttttatttggccaacagaattatgcgtcgacaaaaccccgaaattgcacccagtcataaacaaggggataccatgagtcattcgggggataacaaagtattggggcggggctctggttgaaacctttggaaccatgccaatggggtaaaaccgaggctgccggcgacatccatgaccaaacgggagcgggcgccggtctttttgagccgcttcatgggc

SEQ ID NO: 13930 - DNA, 1660 bp, Zea mays
  unsure (1)..(1660): unsure at all n locations
  Clone ID: MRT4577_112696C.1
gttaaagaaaacaaaagataagcaaccattaaagggtccgagaacaaataagcaccatgttgcatgttttgataaattgattactacaaattaatgatcgcttccctcaagattgaaacaaactgccgtttcaagacaaaacttgtgtacacaggagtggaacagatgagatatgtgcaagtcattgtgggttttggaatctgcaacagtcgtcaatatcgcttttcatgcttcacgtaggtctgtcatctcaaacctgacatttgggttcatgtacacatgggagcaatgctcatagattggtgttccatctaggggctcctcatgagggtggaatccagttgcatcacaatcatggatcacgcccatgccacatggctccgttagatgaaatatgccatgttttcttgttgtatccgtaggagccataactattgcaatcgcttccggaagcataatctgatatgcgtaatgattatgaagatcaatggaagataggaagcaggtctgtgttggatgtgtatgaatccaaccaagagataaaagggagcctttgtcctgaacttcaaatatttcttcttcattcgtagcttgacatgaatcagatgttgatttctgcttaggaattatcaatgttgtcacataaaagggtctctttttcagagtaccagcaagaattccacagtttccaaattcttngcggtatttanctcagcgagcctcaggaaacactccattaatgccactggggtttcatagattcttcaacctccaatacatggtcatgcctcagtggctagagaatccatctcgataccattgaagcccattaggtcctagtatcgagtgtctcgataatgtttcctcttttggatacagcatgttggtagatggtttcatagcatgtctataaggttgaacattctgcgacatagctgcttgatgctttgaaccaggtaatggtttctgcagtagtctagtagggcttccagacaaggacttcgacacatatgggcctggggtatggtgctccaactcactacttgcagcataggttccatatacaccattaggttcatctgcacccctgctattaccggtggcaatttgttgctgcacaactggcttaagggactctagctcattgacaataccaagaattttctcagagttgtgtgggcctttcttcaggaattccttttctctagccttaaatgcattataatcgcgatgtttgggtatggtctcaagcaacaagctcgagtatctcaggaggaggatgtagaggtccagaacattcttctcttctcgatacacattagcctggcggaggaggttgtcagcgatgcggaaatagtagtggatgcttatgcggtggtccacggcgataggccgcgccatggactcgatgcatacgtctctcctagtgccgtgagatagttccgaagccatctcaggtggggtgggactgactccgcggcaggccaggcgatggatctccgcttcaacccgctacggcagcgcaaaagtcgacgggcgatcacggacacggaagcggggtaggacggggggcgtgcttgaaggaaaacgtgggaaggagaaggggaatgtcgcgttgatgttttgggccggccccgtgcgagcccggccggcctcgagg

SEQ ID NO: 13931 - DNA, 311 bp, Zea mays
  unsure (1)..(311): unsure at all n locations
  Clone ID: MRT4577_112697C.1
caaccaaacacaccaaaatttttattccccccttcaacttatttttacctaacaacacttaaacactcatgcgggccataatgcttttaccacataaaccgttccccgcattaaaacactctcaaataacatatttttaaacatgttccaataaccaaattcctaaaatactatttaaaaatttccaagtgcccaaacccttattttaaaaaaagggtgcctttcccgggccaaatggaatttttaccttaaaaacagcgnnnntaacaaaaatttcttttagaaaaacatcggttttaaaaaaaattgaa

SEQ ID NO: 13932 - DNA, 212 bp, Zea mays
  Clone ID: MRT4577_112698C.1
cccacgcgtccgggttttaaatggagggtttaagtattaaacctttctggttttccatggtgatatatgtgctctgtctaggggaagtgccatggttttggggccatgcaacatctgaaaattgataaatttctcaaatgtacttatttgtattgatcgtgccaattcatgaatgtgtcttgactgtcaacatatttttcatcttcatattt

SEQ ID NO: 13933 - DNA, 874 bp, Zea mays
  Clone ID: MRT4577_112699C.1
aaagcgggaatttcgccacaggtgagcacaaaatcccccagggaaacctcccttgtcaccagttggcagactctttcgtccaccccttcgtaatggccacagatcaacaccaattggtcatagttcgtcaattcccgaaacaaagcctggtccatgggctgtccctggggagtcattaaaatcacttcccgtttggacagtactggcaacgattccaccgccgcaaaaataggctctggtttgatcaccatacccaccccaccgccgtagggttcatcatccacccggcgatgtttatccgtggtgaaatccctggggttaatcaaattaacgctggcgatcgccaagggagattgtttacactcgtaacgccacggaagcgattaatttggtggcctatagctgggggatgaataatctcaaagcaggggatgaaatcattaccaccgtgatggaacatcacagcaatttagtgccttggcaaatggtggcggccaaaaccggggctgtactaaaatttgtccaattagacgagcaagaaagctttgatttagaacattttaaaactctactttctgaaaagactaagttggtcactgttgttcacatttctaacaccttgggctgcgttaacccggcggaagaaattgcccaattagcccaccaagctggggctaaagtgttagttgacgcctgccaaagtgcgcctcattaccctctggacgtacaactaattgattgtgattggttagtggccagtggtcacaaaatgtgcgctcccacgggcattgggttcctttacggcaaagaagaaatcttagaagccatgcctcccttttttggcggcggcgaaatgattgctgaagtctttttt

SEQ ID NO: 13934 - DNA, 1981 bp, Zea mays
  Clone ID: MRT4577_11269C.1
aggccggccgggccggcattgcaagccttcccggttacttgttcactaacaaggtcgggacggcatggcccttggagctgcgtaccatcactacctgcagctcgccggcgaccatggcaccgccacacacgcactgctcctcggcgtacttatcttcctcgtcatccgcctagtatccgcaaggcgaaccggcacaacctcagccaacaaacgtaagcagcaacagcggcttccgctcccgccttcgcccccgggcaagctgcccatcatcggccacctccacctcatcggcgccgagacccacatctcgatccgggacctggacgccaagcacgggcgcaacggcctgctgctcctccgcatcggcgccgtgcccaccctgttcgtgtcctcgcccagcgccgccgacgccgtcctgcgcacccaggaccacatcttcgcgtcgcggccgccgtccatggccgccgagatcatccgctacgggccctcggacgtcgcgttcgtgccctacggcgagtactggcggcagggcaggaaactcctcaccacgcacatgctcagcaccaagaaggtgcagtccttccgccatggccgacaggaagaggcaaggacgacgacgaacacgcagatccaactctctctctctctctctcacacacacacgcacctgcacgtacatttttcctccgtttatctatgcaatagaacagaatatactgacgttcactgcacgccggcggcccttggagctgcgtaccatcactaggtgcggctcgtcatggacaagatccgggcggctgccacggcggccccgccggcggcggtggacctgagcgatctcctgtccgggtacaccaacgacgtggtgtcccgcgcggtgcttggcgcgtcgcaccggaaccaagggcggaacaggctgttcagcgagctgacagagatcaacgtgtccctcctcgccgggttcaacctcgaggactacttccccccgaatatggccatggcggacgtgctcctccggctggtgtccgtcaaggcccggcggctcaaccagaggtggaacgacgtcttcgacgagctcatccaggaacacgtgcagagcaggccctccggcgagagcgaggagagcgaggcggacttcatacacgttctgctctccatacagcaagagtacggcctcactacagacaatctcaaggccatcttggtggacatgttcgaggcaggtatagagacatcttacctgacgctagagtacggcatggccgagctcatcaacaacaggcacgtcatggagaagctacagacggaggtgaggacgacgatgggctcgccggacggcaagaagctggacatgttagcggaggaggacctcggcagcatgccctacctcaaggccaccatcaaggagacgctgcgcctgcacccgcccgcgccgttcctcctcccgcactactccaccgccgactccgagatcgacggctacttcgtccccgccgggacgcgcgtcctcgtccacgcctgggcgctcgggagggaccgcacgacgtgggagaagccggaggagttcatgccggagcggttcgtgcaggaaccgggcgcggtggacgtccacatgaagggcaaggacctcaggttcatcccgttcggctccggccggaggatctgccccgggatgaacttcggcttcgcgaccatggaggtcatgctggccaatctcatgtaccattttgattgggaggttccgggctctggagcaggggtgtccatggacgagtcctttgggctgactcttcgccggaaggagaagcttctccttgttccaaggattgcttcctgatcatcctccatccgtaaacttgtgtcttgctagctgtaccgggaagaaataaagaatgcaagaaaaaagtgactcgattcttcgtcagtaactataaaaaaaaaaaaaaaaaaaaaaaaaacccacgcggccgcggacgctggg

SEQ ID NO: 13935 - DNA, 271 bp, Zea mays
  Clone ID: MRT4577_1126C.1
aaaaaaaaaaaaaaacaaataaaataaaaaaaaacataaaataaaacacctataaaacaaggcaaggaaaaactcgagcaggcactatcttaaatttttctctgcttccacacccttccatgcatcaccatccttttctctatctgatctggcttatctccagcgccacccaacttaaccccctttcactacatgccccttttgattactgccttcatagcgattactccctatccccttttcgttcttcccagtatcaattactcttatc

SEQ ID NO: 13936 - DNA, 289 bp, Zea mays
  Clone ID: MRT4577_112700C.1
attcggctcgagcgatattacattcttttggtgtcggtgcacaggctatagcctacagggggactgacgacaacagagacatccaccagctgctgcatcatgctgtgtgagatggcactggtgatgttcggaggactgcagccatggctataggttgaggactgtgcagtgagcctgagcagacttgaagaataggctctctgctatctcaatcatacagactacatggatgctatggtgcaaccttagccgttgggatatgatgtgcacgggatggattaagtgatgc

SEQ ID NO: 13937 - DNA, 456 bp, Zea mays
  Clone ID: MRT4577_112701C.1
gtgaaccatgagcttgccatctttgagatgagaccaagggagtagagttagccatgctctctggaagatgctctgatgcatgtactttgcagtttgcacataggagaagatcaaatagctatggtgatcatgaacatcattaatggtctatgtcacccctacagactacagtagtacgaagccactccaccaaaaacgcttttttggggaaatttggaacacagcctttactcaccccctataaataccatttttttcacactgattttgctgtttttgcttaataatcctttgtaaaccattacaggatttagaggtgtatcaatttttgttcttgtattactttgtttgttttgctctgttcaaacttaagagctatatgttttagaatttgtggatattactaacaatttgttcacatgttcaatatgtaatccaagagggacacatttaggc

SEQ ID NO: 13938 - DNA, 609 bp, Zea mays
  Clone ID: MRT4577_112702C.1
ccggccgggataacctttacatgtttgtcacgctgtcgttgccttctgtcttgcttggttttgcctttttcatagcatccacagttacatgctctctattatgtattctaaaccaaactcttcagatgaggcattcacgaatcataatagtttggtataatatatcttgcttcctcatcaagcaacttaactaataatcctaatagtgctgattctctgttatctccatctccacttcattaacctgaatcattgtagcatgtaccactcactgaggttgaatgtagttgcttcccaccttctccttctacctcctatgttttatccgtacctaattcaactgtcagggcaccaaccactgtcagtagccatattcgttagctgctaatcctattctctccatatttcttaaccatgttctgttgcttgcaccattcagcatttatggcagcttttgttatctgtctcctcttctatctagctgagcttggtcactagtagcagggagagtgtttcgatatatagattttgattcgctgaacagtacaaattaatgaagtgctcgatgaagcaaggttggttatcgaaaaaaaaaaaaaaaaagcggcc

SEQ ID NO: 13939 - DNA, 375 bp, Zea mays
  Clone ID: MRT4577_112703C.1
cggacgcgtggggaagcggtggtggtcgtgggatgccacgcgagcggcgtggacatcgcgctggagctccgcgcggtggcgagagacgtgcacgtcagcgtcaagtccgtggacgacggcgtcgccgtgtcccccggcatgaggaaagctgcgtccaggcaccacaacctacaccttcacccgcagatcgagcgcttgtgcgaggatgggcaggtaacgttcgccgacggctcgcgcgtcgtcgccgactccatcgtctactgcactgggtacggctactcgttcccgttcctggacacgggaggcctggtcaccgtcgacgaaggcagccgcgtcggcccgctgtacgagcacacgttcccgccggcgctggcg

SEQ ID NO: 13940 - DNA, 846 bp, Zea mays
  Clone ID: MRT4577_112704C.1
ctccggactagttctagatctcgccaagctccggcgaggcgacgacggcgagcgacaccctgagcctgtgcggagccccgccgtcactcgccggtgagcagaaggcctgcaccacgtcgctggaggacaccgtggagagcgccacgcacatgctcgtcgtcggcagcagcgttcgtcatggggtggtgtatttgtgggcggcctcgtcggcggcggcggtgccgccggcggcacaccaccaccagcagcagtacgttgtccaggcggtcacctcgctcgacggcgatcgccacgtcggctgccacgccatgccgttcccgtacgccgtctactactgtcacatgacggggcggccgtccaaggcgtacgcggtcttgctccgcagcgtcaccggcggcagcagtgcgccggtcaccaaggcggcgatctgccacctcgacacctccaactgggacccggcgcacccggccttcgagatgctgcacacacggccgggcggcgagccggtttgccacttcatgtcctatgccagtttgctctttggtgagaaggcagccaattaacggttaataacaaaatacattgaagaacgctgctcatccaagcttcatcataagtataattagctgtgtggtgtcttttttttattgcgagtaattagctgtggtgtctggtatatataagtatgtccggtctccgttcttgtatagtatatatagcatgtttctgttgcactgttggtgtatgtcgtccttagttcatctcagatacgtatcttgtgtattgctgtggcgtggcgtcctatattgtactgtggttatgtggaaaaatatggttttttagggc

SEQ ID NO: 13941 - DNA, 231 bp, Zea mays
  Clone ID: MRT4577_112705C.1
ggacccggggaatatttatcccccaccggcacttatttctttaatattacaacatagggggggggtcaatgggcagcccatgttggcatgactccattctgggggctatggctacatgttcacaatgggggcccaacccacatcgatttgttctatatttgtggactagatgttgctttaatggagcatgttttttagaaccaaattaagaaatgaatttaaactaggggg

SEQ ID NO: 13942 - DNA, 250 bp, Zea mays
  Clone ID: MRT4577_112706C.1
caaggaaactaaaaacccattcttttttttactgggttggggaactttttctttttccgggagccgtatgcgggcattagggaatgaaccacacgagggggggacggcgctcaaaaaaactttcaatggctaaaggcaaaactgacacgggggggacctggttggtccattcaccagaacccacaccttacaagggtgggcaggtgtctttggcccaaaaacaggcagggggatcggggggtcccccaaa

SEQ ID NO: 13943 - DNA, 407 bp, Zea mays
  Clone ID: MRT4577_112708C.1
aaaaaaaaaaaaaaaaaaaaaaaaaaaaaaaaaaaaaaaaaaacaataaaaaaaaaggaaggggtacactttacaagctcgcaaccttataactgttctattctgaccccatcaactctactatcatgcgccacctattttcaacctactcctctgttaatttacaactccctcgcttcaaaacctttgtcctgcacaaacttcttcgtcctgcagctcatccacctttcagcacatgtcctattatccttctgccctgcaactgacgatctttcctgaattcgaccttccctactgtcgcgcatcatgcacggtgaatggggttattactctccccggcaatgatactctagccctctgcctcttacccactcctcatccttttaacttcccatctttctacattc

SEQ ID NO: 13944 - DNA, 487 bp, Zea mays
  Clone ID: MRT4577_112709C.1
cggaaaaaaccgaaccaaaatccggccccaagggccaaaaaccgggggccaaaaaacccccccaaaaaaagaaagaaaatttctaagcgcaaaggggggaaacaagaggcaaaaggaccaaagggggcaaaaggacgggccccccggaaacctgaaactttttctggggaacccgggaaaaaaaccgggccttaacaaaaaggggccgggacggaaaaaccccctggccgagcacctggaaaaacccaaacggggtaacgtaaaaaaggggggccgggtccgggccggccccctccgggggctggccggggggcaccaaaaaccaaagcccccccacgttaaccgacgggaagggaaactggggggggaccccgggaaagaagcccaagcccaccttgccaaaaaaccccggggggaacttgcaaaaaaggagcggggggggggcatgcccccggggttgccggggccccccgggggcttccggggc

SEQ ID NO: 13945 - DNA, 1416 bp, Zea mays
  Clone ID: MRT4577_11270C.1
cgcacatgctcagcaccaagaaggtgcagtccttccgccatggccgacaggaagaggtgcggctcgtcatggacaagatccgcgcggctgccaccgccgcgccgccggcgtacggggacctgagcgatatcatgtccggctacaccaacgacgtggagagccgcgcgttgctgggcgcatcggaccggaaccaaggtcggaacatgctgttcagcgagctgacagagatcaacgtgtccctcctcggcgggttcaacctggctgacatacttatccacgaatatggccattgcagacttgctcctgcggctgtggtgcgtctaggcccggcggctcaaccagaggtggaacgacgtgttctacgagctcatccaggaacacgtgcagagcaggccctccggcgactgtgcggcgctcgaggcggccttaatacacattgggctctcgaggacggccggggtcgatcatctgatatgtgtcattaacaggacatgttcgaggcaggtatagagacatcttacctgacgctagagtacggcatggccgagctcatcaacaacaggcacgtcatggagaagctacagacggaggtgaggacgacgatgcgctcgccggacggcaagaagctggacatgctagcggaggaggacctcggcagcatgccctacctcaaggcgaccatcaaggagacgctgcgcctgcacccgccggcgccgttcctcctcccgcactactccaccgccgactccgagatcgacggctacttcgtcccagccgggacgcgcgtcctcgtcaacgcctgggcgctcgggagggaccgcacgacgtgggagaagccggaggagttcatgccggagcggttcgtgcaggaaccgggcgccgtggacgtccacatgaagggcaaggacctcaggttcatcccgttcggctccggccggaggatccgccccgggatgaacttcggattcgcgaccatggagatcatgctggccaatctcatgtaccattttgattgggaggttccgggctctgcagcaggggtgtccatggacgagtcctttgggctgacgcttcgccggaaggagaagcttctccttgttccaaggattgcttcctgataatcctacatctgtaaaacttgtgtcttgctagctgtaccgggaacaagatttaatgcaaggaataaagtgactctgttcttcgtcagtaactatatattgtaggagtcctgatgatgaataatgggatgtcgtgatttgttgcaactagtattattggtgatatttctatgtaaaaagtggtgtagcgatgtatgtaaaatattatatttgtcagatctttttataccaataatatttactccatctgtcccaaaaaaaaaaaaaaaaacaaaaaaaaaaaaaaaaaaggccccta

SEQ ID NO: 13946 - DNA, 326 bp, Zea mays
  Clone ID: MRT4577_112710C.1
tttgtttgctacaagctcgcttggacctagaccgtctgagattgataccatgatggacgattacaaggccgccatttctatacagcatggaagaccttgtgcagctgagaagatgttcctcagtcaacaactctttttatgcaccgaacaccgggctcttattccaaccaagcctagctgcattatgcatcccctttataactcagcagtccaagaccatcggcacttgcactcttagaggtactaccgcgatctactcatcactaatggcaacgggaaccaaccatcacatccattctaggcctcaaatttccaaaagtcttttt

SEQ ID NO: 13947 - DNA, 331 bp, Zea mays
  Clone ID: MRT4577_112711C.1
gctgtccctcccagcataaagaaccacgactggcacatccaggcctcgtgcgccatcaccggcgagggcctctacgacggcctcggctggatcgcgcagaaggtcgctggcaaggcgaccgtgagctgacgtgcgtcgcagcattggttgcggttcgtgaatggatttgttgatgaaggtggcaggatgggtttgtttcttcctgccaccacgcccaatgcttatttatgtttttttttttgttaagaaaaacggcttaaaccttgtgtctgtattccaaccaatctgaatatatgaaaattggaaaaagggagcaaatttgcacaccgtc

SEQ ID NO: 13948 - DNA, 462 bp, Zea mays
  unsure (1)..(462): unsure at all n locations
  Clone ID: MRT4577_112712C.1
cgnntccgctcgtnntcgatctnngtgcagcacgatctgagggtcctcgggccgaccccgtgaagacanngcttctaatcgtnncggcgatggcgccctcgtannttgcatagnnntggggcntnnggaaacccaagaaaatgcctntnncaaagcaccttcatnntgctgnncagaataccacgtggcgaatcaagcggttgcacgttgtacccaagggattnnnttgagaatgcggtngggtctccaaaccaagaagcccctgagtntnntcttaagaatgaacncnncccttgggaaagggttcctggttctggagacccctcctgatggccctgtcttttgagagtaaaatgctatcgcaccgctactgttgctcgctttgaagggatgaccaaccctctttttggggtcttccccgtatttgaacaaagccccaacgttgagcaaatggatggattt

SEQ ID NO: 13949 - DNA, 1051 bp, Zea mays
  Clone ID: MRT4577_112713C.1
cacatatgtttctcacttcaacagattcttgtactttgcatacttgtgccttagaaaggaagtctattaaagagccaacctttaaaaaaataaccttctaggactgcaggttcatttatggaaggaacacttgtgtcttaaagcgtttcaatgttcagcatcaactaatttgcccctatactgtggtcactgcttaagtgacgttttttccccatatatacaagactagcatcaactatcaattactcgactcagttgcattttctgttgtggtactttttcacctgtctggtctttggtgcttagtatcaattactcttactccagtccctggttgttggttaatgggacacatagtttctagccttacatttctgtgtctacccagagcagtccacactaagttaacaccatttgaactgatacaatcatgtactgcaggtggattatgcttgcaccccagaagaagtgcaacagcatttccaagcttgtggaactgtcaacagggtcacaatcttgactgacaagtttggacagccaaaaggttttgcttatgttgaatttctggaacaggaaggtgttcaggaagctcttaacttgaatgaatctgaattgcatggtcgccagattaaggtcgcgccaaagaggactaatgttcctgggatgaagcagcgtccaccacgtggatataatccataccatggctacccttatagatcatacggggcaccgtatttccccccatatgggtatggggagggctcccagattccgccgccctatgcgctacagaccctacttctgaagtacggggtagtgaagttcaatgcaaaaccagccatggtcactgctcagtcccgggaataattaaacctgctgctgtatcgtttccactgttcgataattgacatgctgcgggcttgcggctcaatgctcctgtatcagttgccttttctgacctctgtattaactattaagtgccttcataagcgacacatggtattggcttgtaatacaggacgtaagaacgcaatataaccccgtatttccc

SEQ ID NO: 13950 - DNA, 348 bp, Zea mays
  Clone ID: MRT4577_112714C.1
aattaccatggggggtttttatttactgtaggggtgctttctttccgccccaaaaaaccccccaaatgcccccccccccaggggaaaaaaccaaacagggtctgccccaccccgcccgttggcaaaggggaggaacaccctttatacccgggggttcccccccggggggggaaaacaaaaaaggacccccccatttcacttccctgtcacttttagggggcgatcgggcggggcattatccccccatttgggcgggctccgcctccacaaagtgggggggggtccacccccctaggaaaaagggggcccaaatccccccggtgatgcccccggataaaaacccccctg

SEQ ID NO: 13951 - DNA, 402 bp, Zea mays
  Clone ID: MRT4577_112715C.1
atggctgagcctggctcgtatctagtgagcctggctctgactggtgtggctggacatatacaacttcttgtgttcgcattgccaggcgagtatcttcgattatcaacaacacaaaccttcactaatcagctaactgggatgaagcctgcaacggtggcactgctcattttgaacatgatgtgcatagttgcatactttgatcatgggagttttcttgtaacgatggcagaagaaaccacctcgctagcaaattcatatgcaagaaacgaaggaggaaccagcagctttaccaaggacatacatcctggaagaaagctgatggacgtcggtactgaatcacaccgcacgtctcgtatcattgatatccgtaatttaaagagcccgagggctcctcatcgttaa

SEQ ID NO: 13952 - DNA, 403 bp, Zea mays
  Clone ID: MRT4577_112716C.1
ccattcaaccaacggcctacattgaaccgggcggtttattggcagcaccaccttttaccattaagccggttggttacggcctactttaagaaccaccaactttttccatttaaccaattggccgaactgaaccccgttgtttattggcggcagcaattcctactaccatttagccggttggctgcagaaggccgggcttccttttggccacagaaccagtggctgcctttttaccagcagttgggggttaacccggaaacccttttacaactccaacaattgtggcccttggtccaactggcttggccaaacccagaagcctcctaccaacaccacattattgggggggcccttttttagatggctaattagtggtaatccaatattaaagtttttgggagga

SEQ ID NO: 13953 - DNA, 429 bp, Zea mays
  Clone ID: MRT4577_112717C.1
tgccgtagtgctctataaaagcccagcacatacccgccctctctcattccgttttcacacctcacccgcgttccattctcttttttagcattcgcttcctggcgcacggctcattcacgtcctacgcctactcgacctaagccccgcccttgttgatagagcagcaattccactctccactctacactctacactctccactctccactctctcatctcccccttcgccgccctgttcccctgtttagtccttccttacaatgccgctctttgcgcctctaaggatgcccatcaagcgtcgtatgcagacaggagctgtcctgctctggatctcggggatcatatacatgctcggtatctttgtctttctctgcacgttcaaggtcctccggaccctgatcatcatgtacctgctctgggccttcatac

SEQ ID NO: 13954 - DNA, 381 bp, Zea mays
  Clone ID: MRT4577_112718C.1
cggcactggtggatggggtcccggtgccgcttgcttttgatcaggacggagaagaaggcagcaggaaagataaggataatttgggtgatcccaaagggaaggccgatcgaaacaagaatgggccagagaacagttcggaggagaaaaatgagaatggcagcaaggccgatggcggtcaggtccagaaggaggatgttaacggtggggctgatggtggtaaccacaacctggttgtcagccatgagacacacacggccagtgagctacaggcgttcgcacctactgagctcatggatgagcatcaggggatggccgtggatgctgtgctagagccgatggtggataatttcatggtttcaggtacaccggaaatggagacta

SEQ ID NO: 13955 - DNA, 619 bp, Zea mays
  unsure (1)..(619): unsure at all n locations
  Clone ID: MRT4577_112719C.1
ctananaaaatncacaaatgtttttaagattttgcaagtgagtacgttaccaaagtagggcaagaaattcgactaactgacagaataagctctatatatgtattggattgtctagttattcaccgacaaagaaaacgccatcaggtaaatgtttctctaggtttgcgcaagcccatcgtagcattttccaagtggaaaaatttccactagcacttgtcttctggtaatgttcgtttgtccgtttacacgccattttaatgctacacaatgttccgtttaatcgatgtttattctgtttatggtgcctgtttagagctagtttgggaacctaaatcccctttcgggatgagagagggttgagggagaaattagttaatttctcgtgcaatcctctctattcccggagggaatttgagtttgtttccaaactagcccattggccgtttaaccgagcaatgatgtttactgtttattatttgatataacacagtctctagaattgtgaggttgattcacattatccatgaaagaaaattagttaaaattagctatctacgatggagatgccgcggatgaacatcgatgccgtacgttctgaattgtgcctcgctgattcggt

SEQ ID NO: 13956 - DNA, 3211 bp, Zea mays
  Clone ID: MRT4577_11271C.1
cgactgacgacgacatggcggccaccagcagcaagtcgtcgtcgtcctcgagctcggagcagcgggcagcagctgccgccctgctcgtgtcggcggggggaaccctccttccttccccgcctcccggccgccatgagcccctacctaaggtgggctgtagcacaaagaatgtgcgcggtgttcatatagtgtaatggtctgctctgtatacgaatacccctaggtggcgggttcgactcctgtcaattaaaaaaaaaaaaaaaaaaaaaaaaaaaaaaaaaaaaaaataagccggtagctggacttgctggagtgtggaggactagggaggctgccttcatatagcggctagttggagcccaacgctcgccgcattgcaagccttcccggttacttgttcactagcaaggtagggacggcatggcccttggagctgcgtaccatcactacctgcagctcgtcggcgaccatggcaccgccacacacgcactgctcctcggcgtacttatcttcctcgtcatccgcctagtatccgcaaggcgaaccggcacaacctcagccaacaaacgtaagcagcaacagcggcttccgctcccgccttcgcccccgggcaagctgcccatcatcggccacctccacctcatcggcgccgagacccacatctcgatccgggacctggacgccaagcacgggcgcaacggcctgctgctcctccgcatcggcgccgtgcccaccctgttcgtgtcctcgcccagcgccgccgacgccgtcctgcgcacccaggaccacatcttcgcgtcgcggccgccgtccatggccgccgagatcatccgctacgggccctcggacgtcgcgttcgtgccctacggcgagtactggcggcagggcaggaaactcctcaccacgcacatgctcagcaccaagaaggtgcagtccttccgccatggccgacaggaaggacgtattatcatatccttttatatatctatgaaaatagatggggccgctactatacagtcgactctgtctgaagccggtagctggactagctgctggagtgtggaggaagactagggaggctgccttcatatagcggctagttggagcccaacgctcgccattgcaagccttcccggttacttgttcactaacaaggtcgggacggcatggcccttggagctgcgtaccatcactacctgcagctcgccggcgaccatggcaccgccacacacgcactgctcctcggcgtacttatcttcctcgtcatccgcctagtatccgcaaggcgaaccggcacaacctcagccaacaaacgtaagcagcaacagcggcttccgctcccgccttcgcccccgggcaagctgcccatcatcggccacctccacctcatcggcgccgagacccacatctcgatccgggacctggacgccaagcacgggcgcaacggcctgctgctcctccgcatcggcgccgtgcccaccctgttcgtgtcctcgcccagcgccgccgacgccgtcctgcgcacccaggaccacatcttcgcgtcgcggccgccgtccatggccgccgagatcatccgctacgggccctcggacgtcgcgttcgtgccctacggcgagtactggcggcagggcaggaaactcctcaccacgcacatgctcagcaccaagaaggtgcagtccttccgccatggccgacaggaagaggtgcggctcgtcatggacaagatccgcgcggctgccaccgccgcgccgccggcggcggtggacctgagcgatctcctgtccgggtacaccaacgacgtggtgtgccgcgcggtgctgggcgcgtcgcaccggaaccaaggccggaacaggctgttcagcgagctgacagagatcaacgtgtccctcctcggcgggttcaacctcgaggactacttccccccgaatatggccatggcggacgtgctcctccggctggtgtccgtcaaggcccggcggctcaaccagaggtggaacgacgtgttcgacgagctcatccaggaacacgtgcagagcaggccctccggcgagagcgaggagagcgaggcggacttcatacacgttctgctctccatacagcaagagtacggcctcactacggacaatctcaaggccatcttggtggacatgttcgaggcaggtatagagacatcttacctgacgctagagtacggcatggccgagctcatcaacaacaggcacgtcatggagaagctacagacggaggtgaggacgacgatgcgctcgccggacggcaagaagctggacatgctagcggaggaggacctcggcagcatgccctacctcaaggcgaccatcaaggagacgctgcgcctgcacccgccggcgccgttcctcctcccgcactactccaccgccgactccgagatcgacggctacttcgtcccagccgggacgcgcgtcctcgtcaacgcctgggcgctcgggagggaccgcacgacgtgggagaagccggaggagttcatgccggagcggttcgtgcaggaaccgggcgccgtggacgtccacatgaagggcaaggacctcaggttcatcccgttcggctccggccggaggatctgccccgggatgaacttcggattcgcgaccatggagatcatgctggccaatctcatgtaccattttgattgggaggttccgggctctgcagcaggggtgtccatggacgagtcctttgggctgacgcttcgccggaaggagaagcttctccttgttccaaggattgcttcctgataatcctacatctgtaaaacttgtgtcttgctagctgtaccgggaacaagattaaataatgcaaggaataaagtgactctgttcttcgtcagtaactatatattgtaggagtcctgatgatgaataatgggatgtcgtgatttgttgcaactagtattattggtgatatttctatgtaaaaagtggtgtagcgatgtatgtaaaatattatatttgtcagatctttttataccaataatatttactccatctgtcccaaaaaaaaaaaaaaaaaaggcccctagggccctagcggacgagtgggcggacgagtgggaaaaaaaaaaaaaaaaaaaaaaaataaaaataacaggataaaaaaaaaaaaaaaaaaaaagttaaacatcccaaactacaaaaattttttatcttttttttgggggtatattaaattt

SEQ ID NO: 13957 - DNA, 672 bp, Zea mays
  Clone ID: MRT4577_112720C.1
tcgaggggccggccgggaaccaacctcccacatgcgagactgcgccgaatcagtagtacccccaacaaagggaatttcgcacatgcagcgagcaataccgaaccgcaggtatgattacgaggaggtcgatggctggaggtggacaagcactacgctcccgcgtacgatgtcaaagggcacccttttgtgtgcacccatccttgacaagccctgaattttcaacatccgaatgcgccctcacagcttctcctacacctccggaacctaggacctccacatggacagcctctcgctccgcgttcgggcgtgatccgactcacaacacctcccggacagcttcagctccctcggcctcaatgacgacgagaaggtcctcccatccatctgcaacgaggggttcaaggacgtcccctcgcagtgaacgccgaccagtctcgtcaccaagctgtacgacgtttccgcgatcgtgcgagaatggatcaccaagggcgcccgagagttcaacatacgcctcgacgacgtcgcgcatcacacgcctagactactgtgaagacaatcgccgcggacgacaagaagaaatagttgttgcaaaggaggtcgagcgactccagctactgctcgcgcgctatgaaaggagaggagtgctgctatcatgcgcaacgagggggagat

SEQ ID NO: 13958 - DNA, 237 bp, Zea mays
  Clone ID: MRT4577_112721C.1
cgtattatgcgcagcaatcagtttcttcactctcgtggtaccatgtcaggatgaagtgcgcaatgagacgctttgcttcaaaagtacgtcgtgataaccacaaagagcttgattttaatcgtcggtaatgttcaaaggatcgcaaacgctcatcggatggatcaacacgagtgcgcaatcagacatcgattgaaccattgtcattgcagctttcatagcttcctgctgtgcgccatg

SEQ ID NO: 13959 - DNA, 947 bp, Zea mays
  Clone ID: MRT4577_112722C.1
aaataacggcccctccgcgacggcggatccgctcctcggcggcctcctctcgccggacttcgatgaccgctcctgcctcagccgctaccgcgcctcgctctaccgccagccgtcgctccacaacctgtcatcgcacctcgtctcgcgcctccgacgctacgagtccctccaccagctctgcgggcctggcacaccggcctactcgcgcgccgtcgcccgcctgcgcgaggccatggatgggcatgcgtcatcgaacagtaccagcagctccgacaccgagtgcagctacatcatctggacccccgtagaggggctcggcaaccgcatcctctccaccgcctccgctttcctctacgcgctgctcactgaccgtgtcctccttgtccaccaccccgccgatgacctcaacgacatgttctgcgagccgttcccgggctctaacaccacctgggtgctcccggaggaaggctttgccatccagggcatcaaggggctcaacgtccgcacccgggagagcctcggcaacgcggtgggccgtggcagggacccgccggcgccgtggctgtacgtgcacctacagacagattacaagccggacgatcggcgcttcttctgcgacgacggacaggagacgctgcgtggcgtgcgatggctcgtgctccgctccgacaactacttcgtgccgggcctcttcttcctcccgcggtacgaggaagagctggtccggctgttcccgcgccgcgacactgtgttccaccacctcgggcggtacctgttccacccgagcaacacggtgtggggcatggcgacgcggtactacagctcgtacctcgccccggcggaggagcgggtgggcgtccaggtgcgcgagttcaagtatgcgcgcatctccgccgacgacgctacagcagatcatctcgtgcgagagccgcgagagccttctgccc

SEQ ID NO: 13960 - DNA, 239 bp, Zea mays
  Clone ID: MRT4577_112723C.1
cttgtacggtactggcagaaaagtcatttttaaaaagccataggcttttccttgcccttagctgtaataatgcaactgattttgatttcctccagagctgtgtttctgtccatcacctgtgtattggccctgtgtttaccactctggcccactcctcacccccttgctcccctggtcttctggagtttgtgacattgatttgaaatggatggtgttctcttgagagcaagtgagattgt

SEQ ID NO: 13961 - DNA, 1937 bp, Zea mays
  Clone ID: MRT4577_112724C.1
cattggttccctcgaggccggccgggactcgctcgcccactcgatcgcgccgtcgtggtcgcgctccctcccgcacaacacggttcgcggggagatttggcaggagacgccgtgcgggaccggctggttctctcggcttgcgtgaaaaagcgcagggggagctaggcacgtggtttccctcgtcttctgccgcagacgcttcccgtgatcagaatccaagaaatggcgggtccaggtccagcgcgcaccgcgcggagcgttgctctcctgtgtttcctggtttcctgcgctgcgctcgtggacagccgtggcggagccagccggccgagccggcaggacctcgatgtcggcctcggcggcgggggcgtcggcatcggcatcggcatcggcggcggcagcccttcgtcgccttctccgacgccgccgtcgtcgcagccgcagccgtgcgacttcgagaacgagcggctgtacagggcgtacctcgtgatccagcagttccggagcacggtgacgtgcgacccgatgggcgtcacgcagagctggagcggcaccgacgtgtgcagctacaagggcttcttctgcgagcggccgcccaacgtgacggaccgggccatcgcgtccgtcgacttcaacggctacatgctgcaggcggggtccctgcggggcttcgtcgacagcctgccggacctggcgctgttccacgccaactccaacgacttcggcggcgccgtgcccgcgctgggcggcctgcagtacttctacgagctggacctgagcaacaacaagctcgcgcccgccgcgttcccggcggacgtgctgggcctcaccaacgccaccttcgtcgacatccgcttcaacagcttctacggcgagctccccgccggcgtcttctgcaagctcccgcgagtgcaggccatcttcgtcaacaacaaccgcttctccggcgccctccccgacaacatcgggcagtcgccggtgaactacctctctctggccaacaacaggttcacgggggagatacccaggtccatcgcccgcaacgccggcacgctcctcgaggtgctcttcctcaacaacagcctcagcggctgcctcccccacgagctcggcctcctggagaaggccacggtcatcgacgccggcgctaaccgcctcacgggcaccatcccggcgtcgttcgcgtgcctgcgcaaggtggagcagctcaacctggcgggcaacctcttgtacggcgaggtgcccgacgcgctctgccggctcgcgttcagcaacctcaagaacctcacgctctccgacaactacttcacgtcgctcgggtcctgctgctgggacctgatcaaggaagggaggctcaacgtcgaccgcaactgcatccagtgggcgcccaaccagcgctcgcacgaggactgcgccaagttcctccgccagcccaagtcatgcccggtcaacaactacgttccgtgccgcagcaaataccaaagctccagcgagccggccgacgacgcggcggcggagtacaggtaccggacctactcggcgctgcatccttgaggtggagtggagtggagggcacttcactgattgataaagcgcattgtccgtttcgtgtgagcgtgaaacgactggtcactcgcctgggcctggccctggcccgtttgtgctcggtgggttgtgttgatgtgttgtgtcactgtgtagaaatgttgaatgttccccttcgctcgatccggcccagctaggtaattcatatgcatcatgtgcgtgtgtccgcgtcgctagatttcttggtcacatacaggccgcattgcaagctgcctttttcttccgtgtgcttgtacaaaaccgtcgaggttatgtaatttgcatcagccaacctaaccatagcaggtaaaaaaaaaaaaaaaaaagggcgaccgctcgcacccacgcgtccgcgt

SEQ ID NO: 13962 - DNA, 454 bp, Zea mays
  Clone ID: MRT4577_112725C.1
aaaaaaaaagcccgggtttagtttttttttaggataaaatcatttcatgggggcccaattaatttttgggtccaggagatgcaatggggtcaaccaacatggggggggacacacgtccgtacatgagcccaaaggactggccccaaacatgcggggggggatagcaaacggaaaaactttggttttttttttttcacacacaccaaaaaatacctttgtttgggagccagctgggcctcgtttttttttggtcaaccccccccccaggctagatagataataatcatttccatgggcggcgatcgatgggatcaacagttgcaggggtcgcacttgcagttgccacccaaattgcagccggggggggcctcgccggaactcccccggggccttaaaaaactggggggcgggctttttttccggggccaccccgaggaccacgggggcctgcgcg

SEQ ID NO: 13963 - DNA, 584 bp, Zea mays
  unsure (1)..(584): unsure at all n locations
  Clone ID: MRT4577_112726C.1
ccggccggngatctgcttctatccttcgatctggtctgcttggacgcttgatccgccaatgcatcctttgcggcttgactgcgccgaattacgtcaccgtgctaggtgagcaacacggctcagaccgaggctcagtattcgacactcattgcacgtggccgacatgggctcacagatgaacactacctgtctccgtgagcgcaggctagtccgagagggactacagcgcctaaaacgcaacctacagaaacattgaggtggggcgtcatgcgcacgacggcgatcccattcgaggagtagagacggctcgagaatgacgacaagaagaaggcacggtgcactctgcctctgcctggcggaaaagctgaggatgtctcatagaaaacgctcctccagagaccttactgtcgggcctgcatgctaatcgtttggctacggagcctagaaatagttcgtccagagcttcgtagaacgctatgaaactgagcttcgtccactataagagtgttgatgaaacttgccaaatggagacctcttgcagacactcggagctgttccagtctctctagtcctgccatactccg

SEQ ID NO: 13964 - DNA, 331 bp, Zea mays
  unsure (1)..(331): unsure at all n locations
  Clone ID: MRT4577_112727C.1
ggaattnttgggtcgacccacgcgtacgcgtgggcggacacgtgggatcggaccccaccacgagttgtcattttcaagccggtggattgcctacacggggacgcgccccgataacacacccattcatgtgtggtacaaccatgcactaggacccaataatcgctcatagcctactacaaggcacgaattggatggggactcgaggtctactacaactaatggcgcctggaccataacgtgcgcctgagtaaggtgaataacgaatgatgataacatgcattaatctgcgatggtgcagctgccttaattaacacgcgtgaaacactgttac

SEQ ID NO: 13965 - DNA, 196 bp, Zea mays
  unsure (1)..(196): unsure at all n locations
  Clone ID: MRT4577_112728C.1
gccaancgcgtccgcttttagttgatcttttaggtagcacagtctttgggttgatatttatcgaatatnggnctattttnnnctatttnnaaattgacgctatnnatgcttagtcgcgacgaaacgatgttatttattttttgggttatttattatatngnagataacnntgtacaannntgagtttgggggtatg

SEQ ID NO: 13966 - DNA, 335 bp, Zea mays
  unsure (1)..(335): unsure at all n locations
  Clone ID: MRT4577_112729C.1
attctcctgtcgacccactcgtactagcgtctctacaaaatctgttcactaccgttacggttttaccagctgcgccttttccatcggtctgttcaaacttcattgtcgctctactctctcctncattaccttttgcctctcatcttgtccacttgaaactgatccacatcttaataacataactttcttgtccaaatttaatctttcttctttcaacaatacaaggagtcatttacaacaagttttttacttttttattccttcatttttctaccttctcataacaccttctatttttaatttcccaaatttctatcttaatatcttattaccta

SEQ ID NO: 13967 - DNA, 253 bp, Zea mays
  Clone ID: MRT4577_11272C.1
atggaaagcaacggtcatatatcacggggcataaaccgaaccaaggacagtcagggccaaaagacccagcggggcaacggggcccaatttaatacagggaaatctaccaaccaaagccaccaaaaaatcctgggaacggggaagtccgacgcctgtataccaagtaccatccccgatcacaggaccccttatgtttcaaagggggggagagaaaaaaactaggggaccccctcctcttaaaggcttggagggg

SEQ ID NO: 13968 - DNA, 237 bp, Zea mays
  Clone ID: MRT4577_112730C.1
cgatttcccatttgaaattcttagatcgcacagtgccgaacgtcctcacacatctctgtcggatggtgcgcacgaagcaaacggcaaggaaccaaagcgcgtgctaggcaccggcggaagcaggatggacacgaatgtcggcgcgaaagtcatggacccggtacaccgtgggatgcgaagaagcacgaacaggtcttcgactctgcacatgctcgctatgcgagatgcgcatgtacc

SEQ ID NO: 13969 - DNA, 248 bp, Zea mays
  Clone ID: MRT4577_112731C.1
cgcttcgatcgagttgcgcgctgatccgacgtctgtctgcagtgagtgccaaacggcagtctcgtgccacgtatgcgccgaaactttgacgtgattgtccccgggtctaggtgacctgacggcgatgtagatattgtggaatggatatctcaattgagtcttgttccgcacggaatgttcttgctaaccatcgcatgctatccagaacctgagggtacctattagtagcacccacttgacaactatgt

SEQ ID NO: 13970 - DNA, 303 bp, Zea mays
  Clone ID: MRT4577_112732C.1
caacaagatacggaggttatacattaaaaaaaaaaaaaaaaaaaaaaaaaaaaaaaaaagggggaaaaaaaggggggagtgtagaaaaaacaaaaatacatgacaacggcgggcgtctttcttaggtgttcctaggttcaacctcggtccccccgttttgcggcgttttgcctgggacccccttttaattgcctggcttaacccaattaaagccctttcttgttccccccccttccttcccaccgcactggtttgaaaaggtccccctttttaaccctttcgcatactccctaatagttggtg

SEQ ID NO: 13971 - DNA, 103 bp, Zea mays
  Clone ID: MRT4577_112733C.1
tacacactggtgatgcatgggagcagcaggggcgttattttatgcattcatattcgttacaggcagggcaaggcagcatggcatactggatatggcatggcat

SEQ ID NO: 13972 - DNA, 331 bp, Zea mays
  Clone ID: MRT4577_112734C.1
gtttattccaatccacaacacaaagcgatttattcttaagcatcacaacatcgacggggggagtttctataataactctaggtacatttaatactttaaaccataccaatgcatacataacaatcaattaccaccatcatcagaacattctaccgacgctgaacccatttttattcttacaacaccattctcttgcatccaacctacttcctgtagcaaacctagtatccatctatcaacaacaacaattgtcccttattctgccagcggctatataactacccatattctaacctgttgcctatctacaaacgatacatctgcatcaatt

SEQ ID NO: 13973 - DNA, 225 bp, Zea mays
  unsure (1)..(225): unsure at all n locations
  Clone ID: MRT4577_112735C.1
gtgttgttncggnagcgcacacacacacaaccagtatctcccccaaanccacccggggggacctgcggttcaagattcagatctttgggagagccctgactggaaaaactatcaacctccaggcagagttccgggatgtgatcttgtttgaaggactgcgccgatgacatcgcaccagcacaagaagatgatagtgagagcgcgataacaacatggggggggggg

SEQ ID NO: 13974 - DNA, 845 bp, Zea mays
  Clone ID: MRT4577_112736C.1
ctctcccctccaccctcctcccccctcgtcttatttaccgagcgatccccgcagcgagctaaaccctagatcctccgcccaaccgctaaaaccctagcaggccaagctcctgcgtctgggggaaggatggccgagccctccagggtgatccacatccggaacgtcgggcatgagatctccgagaccgacctgctccaggtggtgcagccgtttggagcggtcgccaagctcgtcatgctgcgcaccaagaaccaggcccttgtccagatggaggacctgtctgcttcaattagcgccatccaatactacactacgattcaacctagcgtgaggggaagaaacgtatacttgcagtactcatctcaccaggaactgactactgatcagagctctcatggacggaatcctgatcaggatgaacccaaccgaattctcttagttaccgttcatcatatgctctatcctatgaccgtcgaggtgcttcatcaagtgttttctccttatggatttgtggagaagattgtcacatttcaaaagactgctggttttcaagcccttatacagtttcagtcacgccagagtgcaatacaagcagctggtgctttgcatggacggaacatttatgatggttgctgccagctagatattcagtactcaaatctcagcgagttgcaagttcactacaacaatgatagatctagagatttcacaaatccatctttgcccacagagcaacgtccaagatcctctcagcttggttataatgatcctagcctttttggtttccaacagcctggagctgcatatggacaggctgcagtgattgctgctgcatttggcggaac

SEQ ID NO: 13975 - DNA, 252 bp, Zea mays
  Clone ID: MRT4577_112737C.1
ggaacgtaaaatgttgttttttatgtggggaaataagatacaacccttggggggatattgtgggaacttacaaacaagggaagtggtattggcagatatgtatgtaattgatcattttaatataagagcataagtggggtggggtttgaactaggaatatgtgattgaagagcggtcactaattatgcgaccaaaccttggggtgtttgggtgagactgaaggttttgaataaggagaggtggggacaggag

SEQ ID NO: 13976 - DNA, 665 bp, Zea mays
  Clone ID: MRT4577_112738C.1
ccggccgggataccatgatacgactgcaaccggtacgggcacagtctacagctacggcggcggctacggtcaagggccagcgccctcggccccgccggcaccgcacatgcgcaccggtacatccgccgctcgtcgtccttctgctgatacggggcggacacagagtacccgcccgcctacgcttcgccgtctctcgcatgttggcgggtcggattgtggtcctcgatgtctgagggctacggctgccgaccccgacgcgtaattggcggagacccactcggacgttgagcgcgctgaccggacggctgaccgcgaacgcggcgggggcattgactatcgcgagcttgagaatgatttctcttgccactagcctggcttgagcgtccgagcagataggcttctacactggcttaacagctgggggcctgctgcacgccatgattgggtggcgccacggcagtggtcatctccatcgaagcgctcgtgagcgggaagctgagaggtgagtgcagcggttcccttgatcggacttgatcctgtacaacacgctgctggtcctagggtgcgcgttctgcgactgcggactacctgtggatgaccgagcatgtgtacatgaaaggaagacgcggtgctcaactgcgggctgatactgatggccgggatgg

SEQ ID NO: 13977 - DNA, 483 bp, Zea mays
  Clone ID: MRT4577_112739C.1
acatatgaaccgtgtgctataattgtgagcagtaacattttatttgtttaaattttttatctcatgcgtatcaacaaccaaacattgagggggtcccaacaagcggggctctccatagaaaaacgattgctgagatccccccaaaacaccgaaaagcaaaccccccgaaagccttgagacacccaaagaaacaaacaaattggtctggccgttaatgaacaaaaaaaaaaactcctccccgaccacggtttactgggggaacaaaagctgccccacccttggggaggaagacggggaccccggggattatttgccttgatctagagtaggccctatccacgagttccctcaccgtgggaaacaaaaaatccgccggtgccatagagggggcccccaggctaaacatccgaagacaaaagaaaggaaccccacccggacccccgatcgaaacttggccgatcttcttaccgaaaacaaattttt

SEQ ID NO: 13978 - DNA, 185 bp, Zea mays
  Clone ID: MRT4577_11273C.1
ctgatcccagctcatgtcacctcttttcatcctttgaacggcttgatctctgcgcgaggggttttctctcattaactgcattgctcgaaagacgcctgtcattcattgctgctgataacttttgatgggcttaatatcgaattactacatcttaaaaaaattaaataaaattataaaaaaataat

SEQ ID NO: 13979 - DNA, 368 bp, Zea mays
  Clone ID: MRT4577_112740C.1
gtagactacctgatcaaaatgtctcttttgttgcctgataaattccagcacattttgcgtcttgccaacacaaacattgaaggcaagcgcaaaatcatgtttgctcttacttcaatcaaaggtgtgggcagacgtttttcaaatttaatttgcaaaaaggccgatattgatttggaaaagcgtgctggtgaattaagtgaagaagaaatcgaacgagtgatgactattttgaacaatcctcgccaatacaaaatcccagactggttcttgaatcgtcaaaaggatcctaaagacggaaaatattctcaagtatattctaacttgttggataacaagttccgcgaagatatggaacgtctaaagaaaat

SEQ ID NO: 13980 - DNA, 435 bp, Zea mays
  Clone ID: MRT4577_112741C.1
gttaccgttagctaaggcaatcccctctcctgtcctgtcctgtgcaagaatgaggaatagctacgcggagtatagacacgtgagtagctaacagaactgagtaaccgactgacagacagagtaggatgagggattgatgtctgtctttgattagcaaaagcagaactcttataggaagttgactgagcactctcataaaactggtagggagattttttgtggtgttctaggaaaatgagccatgatcatgaagtgaaaagcacgtggtaacaaaatcgaatgaaaagtacagcctatctcgattaacttgatcgaaacctatcgcatcatgttttcgagtcgccaggggtttattctattggaagcaagccaactctgcccacccaaattctatatatctatctttcttcttaatagttagatcggagccgacac

SEQ ID NO: 13981 - DNA, 613 bp, Zea mays
  Clone ID: MRT4577_112742C.1
cctctaccacttcgactggacgctcccggacggcgacgggaaggtgctcgacatgagcgaggcgttcgggatcaccgtgaagaggaagtccaagctcgtgctgcgcgccacgccgcgtgttccattctcgtattgatgttgacccatccatttgcttttctgtattactattattatattttatggattcgccacagcaacaatggagatgagatgagatggagtagagtacggacagggatagcgacgttgctcacacgacacgacgcggtagtcgcagagcggtcagctgccaacccaatctcaatccaccttttcggcaggatcaggactgcggcagcaccaggcaggcacgtgtggcggtcgccggcggatcaggacagcggcagcacgccagcaccagacaccagtgcgcgctcgtgtcctgagtcttgagtcctgactggcaacgacgatattgttgtgaaaatacacgtttgatcatggataatattgttagagaatgctagtgggcttggcctatattgttagcgaagccgcgataatcttgtagaggctagcggtttagcatgtactccatcttttttttatttatcatattttagtaaaaaat

SEQ ID NO: 13982 - DNA, 1300 bp, Zea mays
  Clone ID: MRT4577_112743C.1
ttagggtaggatacaggatgagctactatccgtccgtatccgcccgttttcacccctaaggagaaccgagtttgggagggagcggatggcaatggctctgcttccgctattgctctcggtcctcatcgtctcctgcgtcgcgcagtcgccggcctcgtcgccgtccgcgtcgaatgctcctccggtcagcgcctcggctccgcggggctctgtcgcgccaccgacaacggcggtctcggcgccgcagggctctgtcgcagcaccgacgacagctgcggcctcggcgccgaaggcctctgtcgcggcaccgacaacggcagcctcggcgccgcaggcctctgcagcgccaccgacgacaacggcggcctcggcgccaacggtctctgtcgctgcgccgcaggcctcaacaaaagcagccttgccgccacaggcctttgctgcggcgccaactacatcagccgcggcgccgcaggcctctgccaccgcacctcctaccggcgccgccgcgccaccgaccgcagctgcttctccgcagctggctgccacgttgcctccggtttcctccccgccactggccgctacgccacctgtctctgctacccctccagccacgctacctcccgtcgcatcgcctaccgtcgccgtcgctgcgccagccccggcgactccggctccagtcgcctccccgcccgtagcaatgccaccggcggcgcttgccccggccacgctccctccagtgatggctccgacaccacttctcgctgcccccgtcatgcctcccatcgcgccacctgtcacggctcccgcaccggctcccgtttctccggctccaagtccaagcgtcgccccgaccccgtctccgacagaagctcccaccccgtcgcccacagaggccccgaccccgtctcccacgcaggcgcctacactcgcgccgttgagctcggtgtcggtgagcccgtcgctggcgccggggcccgcgctcgctcaggaggacgagtcggcggcgccgagctcgcgcactggcgtcgtcgcggccctggtggccgccgggctcgtcgtcggcttgttttaagaagtagagctgcggcgtttattaccgctatacgtccgtaccgttcctcgcacgggtctcttgttctcctgttggtgttctcatggattgatgcacgcacgaaccattcttgctgtacaacacattgataatttattttccatttattatgtatggatgacggactgcctgctgctttcttttgattaaaaaaaaaaaaaaaagaaaaaaaaaaaaaaaaaagcggcc

SEQ ID NO: 13983 - DNA, 375 bp, Zea mays
  Clone ID: MRT4577_112744C.1
ggggaagcaaaaaaaaaaaggcctttttttttccacacaaaaaaacatggggggtttcattttacacagggggcgggcggtcattttcttataccatttggggtccaaaaaccccacgctgttttaaaggagttttttttttttttgtgtgaaaaaaaaagaagggggaagaaaacccaattttcggacacaataccctttttttttcaaacaagccggaagggaaaagaaactcatcccccccccctggtttttttttaggcctcggggttgggaaacaggtaagcctccgccccctttaaaatgggggggacggactccttggccttggggaatttgtcctttacctccacccccgggagaaatttggaaggg

SEQ ID NO: 13984 - DNA, 2159 bp, Zea mays
  unsure (1)..(2159): unsure at all n locations
  Clone ID: MRT4577_112745C.1
atttaattgcaatttcgtggtcgaacaagaatattttatgataaccaattaatgtattatgcgacaagtatccgatatccgatcaaataatatccgtatccgtcacttatccgcccggataaatatccggtccctgtatccgtatccgtcccgtttctaactatccgtatccgatcccgaatccgttttaaatacattagggtaggatacgagatgagctactaccctccccgtatccggccgttttccggggaggtgtaaaaaaaaaaaaaaaaaaaaaaaaaaaaaaaaaaaaaaacctcgtttttttttttttttacccaataatgcattgtcggaaagtttctgtgccgactgccgagcgagaacgagaagacaagaggaagccaaaaggagaaccgagttcgggagggagcggatggcaatggctctgcttccgctattgctctcggtcctcatcgtctcctgcgtcgcgcagtcgccggcctcgtcgccgtccgcgtcaaatgctcctccggtcagcgcctcggatcccaggggctctgtcgcgcttctatatatagagacgtgatagaccttaggtctatattccgtatttgctcatataacccttaattagggtttctcaacaaataacactaggaaggaatacgaaaagggagggggggcggggggagagtagaaatatgagggtcagccatgggtgcgagggcccgccaaggagcccgtggcgacaacggcggcctcggcgccaacggtctctgtcgctgcaccgcaggcctctgcacagccgccagcaccagttttcgcgtcggcgccccaggcctcggccgcggcaccaacgaaagcagcctccgcgcctcaggtctcagccgcggcgccggcaacagcagccttgccgccaactacatcagcctccgcgccccaggcctcggccgcggcaccaacaaaagcagccttgccgccacaggcctttgctgcggcgccaactacatcagccgcggcgccacaggcctctgccgccgcacctcctaccggcgccgccgcgccaccgaccgcagctgcttctccgcagctggctgccacgttgcctccggtttcctccccgccactggccgctacgccacctgtctctgctacccctccagccacgctacctcccgtcgcatcgcctaccgtcgccgtcgctgcgccagccccggcgactccggctccagtcgcctccccgcccgtagcaatgccaccggcggcgcttgccccggccacgctccctccagcgatggctccgacaccacttctcgctgcccccgtcatgcctcccatcgcgccacctgtcacggctcccgcaccggctcccgtttctccggctccaagtccaagcgtcgccccgaccccgtctccgacagaagctcccaccccgtcgcccacagaggccccgaccccgtctcccacgcaggcgcctacactcgcgccgttgagctcggtgtcggtgagcccgtcgctggcgccggggcccgcgctcgctcaggaggacgagtcggcggcgccgagctcgcgcactggcgtcgtcgcggccctggtggccgccgggctcgtcgtcggcttgttttaagaagtagagctgcggcgtttattaccgctatacgtccgtaccgtccctcgcacgggtctcttgttctcctgttggtgttctcatggattgatgcacgcacgaaccattcttgctgtacaacacattgataatttattttccatttattatgtaaaaaaaaaaaaaaaaagcggcccttccctttaggagtaagcggagaccggtggagtcagacttcaagcagggcgccaacatggcgatcattggcgcggccaccatggcctcgggcttcttccagtctctgggcatcgccgacaagatctggaacaacgggcccctcaacacccagatccagtggttccagcagctgatgccgtccatctgcggctcgacgcaggcctgcaagtcgtacctgtccaagtccctgttcgtgctgggcgagttcggcgggaacgactacaacgcgcagatcttcggcggctacaccccggnagcaggcgagcgggcagagcgccaccatcgggggacgccatcggnaagggcgtggagccactcatcagcctgggcg

SEQ ID NO: 13985 - DNA, 780 bp, Zea mays
  Clone ID: MRT4577_112746C.1
ccggccggggacgtaaaaatttcattgctggctcagcttgcgccataccgcgtcgtgcggagttcttctctccttccgctcgaagagaagagaaaaaagaacggtccgtgctcggctgccgtgaatctctctcacctccccgaagcaagcgagcggggcagcgcgccaggaaggatcggaggagacgccatcaatcagcacttgcacgcgcgcggtcggccgcaggtggaggaagaagatgggcctgtgctcgtgctgctgccggtgcctggagctgctgtgctcggtcctcctcccgcccctcggcgtctgcctccgccacggctgctgctccatggagttctggatcagtgtgctgctcaccatcctcggctacctccccggcgtcctctacgccgtgtacgtcatctgctccgtcgacccccaccgccaccgcgacaacgacgactacgtctacgtagcatgacaagatggaccggtccccgtggtgctctggtccgtgtctctgctgctacctccgtcctctgtgctgtgtgcatctttttgtttggtttagtaaactaaatccatcctgtggccttctgtaaactgtaaattcgtatgtcgaatctgacaatctggacggattcattccataaactaagatctggtgttgcgggatctgtggagttagttagggttactttgctacctcgttcagttgtgcttgtgaaatgaaactgcagatggttattaaatcccctgcattttccctaaaaaaaaaaaaaaaaaaggccccta

SEQ ID NO: 13986 - DNA, 1087 bp, Zea mays
  unsure (1)..(1087): unsure at all n locations
  Clone ID: MRT4577_112747C.1
atcagttttacacgcacgatcaggagagcacgctatataaagcggcgcatcgtcactggagctctctcactgcactctactgctcaggtcggaaagtttctgtgccgagcgagaacgagaagacaagaggaagccaaaaggagaaccgagttcgggagggagcggatggcaatggctctgcttccgctattgctctcggccctcatcgtctcctgcgtcgcgcagtcgccggcctcgtcgccgtccgcgtcgaatgctcctccggtcaccgcctcggctccgcggagctctgtcgcgccaccnacaacggcggtccgngcgccgcagggctctgtcgcagcaccgacgacaactgcggcccgngcgccgcaggcttctgtagcgccaccgatgacaacggcggcctgngcgccgaaggcctctgtcgcggcaccgacaacggcaacctcggcgccgcaggcctctgcagcgccaccgacgacaacggcggcctcggcgccaacggtctctgtcgctgcgccgcaggcctctgcacagccgccagcaccagttttcgcgtcggcgccccaggcctcggccgcggcaccaacgaaagcagcctccgcgcctcaggtctcagccgcggcgccggcaacagcagccttgccgccaactacatcagcctccgcgccccaggcctcggccgcggcaccaacaaaagcagccttgccgccacaggcctttgctgcggcgccaactacatcagccgcggcgccacaggcctctgccgccgcacctcctaccggcgccgtcgcgccaccgaccacagttggttgtccggagctgggcgccacgttggctccggatatctcgacgacgctggcagtgacgccgcctgtgtctgggatccctctggtgagcctacttatgagaggaagcctttccggtgctctcttggatgctaggccttattaagactacgactgggaaccgtgtctttggtgccctcaagggagctttggatggtggcctggatattccttacagcgagaagaggttagctggttttaagaggggatacaagtcagtggatgctgatatccatcgc

SEQ ID NO: 13987 - DNA, 686 bp, Zea mays
  unsure (1)..(686): unsure at all n locations
  Clone ID: MRT4577_112748C.1
gcgtccgctgggttctgcatcagatcctcgcatatataggtgacttcacaaatttagccaataagttgtatagccgagtgaagctatgtttgacctatgctacgacgagccaccatcacatttgcaacatgctaaagagcaaaatgacaccaaactaatggaaaatgtaatccatgttctatcaagatatttcttaccgctgcaaccaggcacaactgacatagtcttcagtcgatgccatgcagacggacatggaggttgtgttcgaggtgctgaagagcctagatgacgttgaggagttggaccccgagtagctgcatgatcctcacaagctgcacgcatgcatggagaaggacacctccttgtcggactcgtgcggcgtcggcccattcgggctggtggtgatggcgcccgaaggcatgcagagcaggagtagatcaccgtattcttcagggagtgaccaggatctcagcttctcgatctatgcttctttgtgatttctcttctaatttgtctaccttctttttctgcccgcagattggagcaagagcaaggtggtcagatctagatcgaaagtcagtgagacgaaagctgtttttacctcactggtcaagcaacactattcactctttgatgcaacatgggaagctntatttcctgaagcactagctgngaagtcagtgata

SEQ ID NO: 13988 - DNA, 736 bp, Zea mays
  Clone ID: MRT4577_112749C.1
gccggccgggctgcgaaccgcgtctcgcggagttcttctctccttccgctcgaagagaagagaaaaaagaacggtccgtgctcggctgccgtgaatctctctcacctccccgaagcaagcgagcggggcactggggcagcgcgccaggaaggatcggaggagacgccatcaatcagcacttgcacgcgcgccgtcggccgcaggtggaggaaggagatgggcctgtgctcgtgctgctgccggtgcctggagctgctgtgctcggtcctcctcccgcccctcggcgtctgcctccgccacggctgctgctccatggagttctggatcagtgtgctgctcaccatcctcggctacctccccggcgtcctctacgccgtctacgtcatctgctccgtcgacccccaccgccaccgcgacgacgacgactacgtctacgtcgcatgacagatggaccggtccccgtggtgctctggtccgtgtctctgctgctacctccgtccgctgtgctgtgtgcatctttttgtttggtttagcaaactaaatccatcctgtggccttctgtaaactgtaaattcgtatgtcgaatctgacaatctggacggattcattccataaactaagatctggtgttgcgggatctgtggagttaattagggttactttgctacctcgttcagttgtgcttgtgaaatgaaactgcagatggttattaaatcccctgcattttccctcaaaa

SEQ ID NO: 13989 - DNA, 486 bp, Zea mays
  Clone ID: MRT4577_11274C.1
gaacgggagaatatgaaaacgacccaacaatgcttgcaaatttttcagatgtttctgtacagacgggaacgggggggaaaaagaaataaagttttcgcccgcccaccctggtaaaaaataacgacccagcccataatagtgctggttggtgccagaccaaattatgcccaatcactatgcctggagggtgtgggctccaatagcgggggggagggccaaaacccttaattatccttgtgtccgacaatcttctatggagcggccgccaccccttgatcaaacacacacatccttcaaaagtactggttgcgggtaacaggaaagccagaggaaggaactcctcatgtccacagggaccctcccaaccttaacccgaggccttgacaaacttggggggcttccccacctcccaggaaaagtcggcgttttcacggccaaaggggccgaaggcgggggttttaaaaaacctgtggccgccctttttca

SEQ ID NO: 13990 - DNA, 527 bp, Zea mays
  unsure (1)..(527): unsure at all n locations
  Clone ID: MRT4577_112750C.1
taccctcgggcctgccggctcagggtactgtacgagggtatactgcactctactgtttaggtcggaaagtttctgtgccgagcgagaacgagaagacaagaggaagccaaaaggagaaccgagtttgggagggagcggatggcaatggctctgcttccgctattgctctcggtcctcatcgtctcctgcgtcgcgcagtcgccggcctcgtcgccgtccgcgtcgaatgctcctgcggtcagcgcctcggtttctgcggggctctgtcgcgccaccgacaacggcggtctcggcgccgcagggctctgtcgcagcaccgacgacagctgcggcctcggcgccgaaggcctctgtcgcggcaccgacaacggcagcctcggcgccgcaggcctctgcagcgccaccgacgacaacggcggcctcggcgccaacggtctctgtcgctgcgccgcangcctctgcacagccgccagcaccagttttcgcgtcggcgccccaggcgtccggcgcggcaccaacgaaagcag

SEQ ID NO: 13991 - DNA, 186 bp, Zea mays
  Clone ID: MRT4577_112751C.1
acacggcaaatctgaccacgggggaaaggaggaaacgacttgccatggttgcatgagaagaccaagggagaaaggacccctgctatccctggccaaatttcaactgtcccaactggagtattggaagtcaaattcatagcgccaccaatggtacttgcgattgggtcacaatacttagaccttgca

SEQ ID NO: 13992 - DNA, 258 bp, Zea mays
  Clone ID: MRT4577_112752C.1
ctttttccttgtttttttttttaacaaaggaaatttatggccctagcttcccattgggctaaccttttgcacaataaatcccggaattttttggcccacccttttatacaccccattcacagttgttgtggccaccaacggaaacgacttaggctatgatcagcggcccgtgtatacacccttgtaaaacattattttataccaaagacggtattcttaaaaatggggaagttttttttaaaaaaaatatggtagaaa

SEQ ID NO: 13993 - DNA, 214 bp, Zea mays
  Clone ID: MRT4577_112753C.1
ccgatggtacctcgagccggtcggggactagtttcaaacaaaaagtgcccatcgcaccattttccccgccgaaaccgctgtttatccgacgacgccgccgccagcgcagttgcaatcttatccgaacgccgccgccgacgtggttagttccaattttctctgggtgggcgacgagacttatacaataagacaggtcatgatccaaccccaacca

SEQ ID NO: 13994 - DNA, 1830 bp, Zea mays
  unsure (1)..(1830): unsure at all n locations
  Clone ID: MRT4577_112754C.1
ctacaccttcaacgcagggtcttctcctacagcatttgtacacccttcattcaataagcattctgtgagatgctaccagnagatggagtttcttggagatgctgttttggaatatttgatgacctcatacctctcccacgcgtccgctgatctcaagcctggtcaactaacagatctgaaatcattagctgtcaataacaattcatttgcttatgtcgccgttaagaaatctatccataggtatctcataaaggattctaactatcttacgacagcggtaaataaattcgcgaattatgttaacctttccagttcagagaaagacttgttagaagaaccaacatgtccaaaggttcttggtgatattgttgaatcttgtgttggtgctgtgcttttagattctggcttcaacctgaaccatgtttggaagctaatgctaatgcttcttaaaccaatattgagcttttgtggcatgcacatcgatcctatgagagaactccgagaaacttgtcaatataatggttttgacttgggacttcccgaacctacgaagtacaatggagagttccatgtcaaagtagaagttaacataaacggcaagatgataagctgtactgcagcaaaccggaattcaaaagatgctagaaaagtagctgcacaagaaacactttcgaaactgaagaattatgggtacaagcataaaagaaagtcgctggaggaaattttgcgttctaccacgaaaaaagaatcggaactgataggctatgatgaagaaccaatcaatgttgaggatgacattgacatgcaaatgaataatctactgataaatggagaaagaacctccattcagagtacagcgggagataacaaggttgacaagaatgatgctaatagtggaaggaataataagtccaatgtggtcatgcagaatggttgcctacctagaggggcaactgataaaataaaccaaaaagaatatcatggtgatatggtccgcaaaacagcaaggtcattcctttatgaattatgtgctgcaaactattggaaacctcctgaatttgagttatgcaacgatgaaggaccaagtcaccttcgaaagttcacatgtaaggtccttattgagatcacgggaacttcggtgagccttttggagtgctatagtgatcctaagctacaaaagagagccgcgcaggagcatgcggcagagggagctctgtggtacctcaagcaccttggatacctaccaagagatgaaaatcgtttctagcgacattttaggttttgtagccttcagtcacataaataaacctcggatgggaagagttctgttattgtaagcatgcagtctattcagaggtatatagcatcctggaatctcaatccaacagtcaacagtgcaaaaaaatcataaaagatgcaaaaatgatgacgtgcttctcatcaggctgacatcggaggacatctgcattgtacaacatccaaattgtatgggaagattttcgtcggtatgggtacatatttgggagaaaatcttctcattagctatggtgggtatgtgtatgggaatgcagaattcgaacctgattatatgggtaaaatccatctagtaaaattagttgtgtaacccaatagataataaacccaataactaacccacttgtcctaacccttttaagcatccatctacccaacttagacgatcaaccacccgttgtcccatccactagttcacgtgtcatttatttttgttgttttatatagttaaacaatttttttcttgttaaatatcagatatatttgtgttatgttgctgacagcaaacctcacgat

SEQ ID NO: 13995 - DNA, 504 bp, Zea mays
  Clone ID: MRT4577_112755C.1
gtatacgggcgtccttccttttattatttgaggtcttattgtttttctgtgatccccattcgttgtccgtgtttttcggtgcgttagaacagcagcggctcgtccacttcgaacacccacacaggcctcgcgctcggcgagccaacccactcggcggcgcccatggtcttcggaggcgatagctagggccccggcctcggcgactgtggactcggacgcgtatcaaggtccctccatgtagccccgggcgaaagccccaaacgcgagggcaccgggctccatgggcccgccttgggcgactccaccgacagcctccatgtgttacaaaaaaacgcgtccgcggaatctgccgggccagagagcccggaagggggtcgttccgtaccgtgcgcctgacaaaggacacggtggtccctgatgctatcagcgatagggcaacgcgaaggcgctgtggcatgtcgccgactgtggtgccctgtcacctcccgtgcattcagtgtgatt

SEQ ID NO: 13996 - DNA, 259 bp, Zea mays
  Clone ID: MRT4577_112756C.1
gggacggacgggtcaacacagaaaaaatgggaccggaacgggggggataacccggttaatctagaccgaggcccttaagggccacccgtaatcatgaaaagagctcgctcaatgaggggaaaagtaacccgccaaaaagtccacacaaaaaaaaatccggaggcataaagcgtaaaccctgaggcgccacgggagagagcaaactgacatgcagggggggcgcctaaaggcactttttccacatgggaaacctggcccc

SEQ ID NO: 13997 - DNA, 256 bp, Zea mays
  Clone ID: MRT4577_112757C.1
ggccgggccgggagcaacaaacttcccggagtgtcacaccatagctagctcccggaattagaaggcattagaaccctatcctttcagagaatatgtcgacattttatttatgagattacggactgtcctcctctatctcaggatgaacgatggcctctgacccgagatcaagacgagtacacgtgtgctgataggttcaagcggcagagatgctgagacttagacaacctctgcgaaatcaatgatgggatggaaa

SEQ ID NO: 13998 - DNA, 288 bp, Zea mays
  Clone ID: MRT4577_112758C.1
gcacggtctaggagcgcgcgatggtcggccgagtagaggcgatggaggggcagtgcggcgtggggtggagtagtgtgcagcgggcaagcagcgcggtggacggggcgagcaggggcacgttttgggcggggtgatgagtgggctagggttattaccctacaccactcgattggtgtccactacagggattagggcgtcatgaaggatgccatggacgcctcgcgaacgctatactcgtagaacctatggagtcgcctacgtcgtctattctctagcgccttagtgctt

SEQ ID NO: 13999 - DNA, 2249 bp, Zea mays
  Clone ID: MRT4577_112759C.1
ggaccctcgaggccggccgggccgggctaccgactctcggcaacggatatctcggctctcgcatcgatgaagaacgtagcaaaatgcgatacctggtgtgaattgcagaatcccgcgaaccatcgagtttttgaacgcaagttgcgcccgaagccttctggcggagggcacgtctgcctgggcgtcacgcagtgtgagagctcgattcgttgccgtccacttgtctcacggcctgtcgccatctccttcctggttttttcatccgaccatccccggctcctccgcgccgtcggcgacgactccatcgagtcactcggccgcagcaaccggcgaccatgtaccgagtcgcctccgggctcggcgccctcaagaggcatggggcaaatgctcaaatgatgaatgctgcaattaggtgtgccagcacaagtgttgcacagaggtcttccggtggcttctggacctggttgactggtgcgcgttcaaatgaaatacctcctccagatttcacacttccgggagtgactattcctcctccgctgcctgaccatgtggaggctggcaaaacaagagtcacaacacttcccaatggtgttaaaatagcctctgagacatctgcgggatcatcttgttctgttggagtttatgttgattgtggttctgtatatgaagcacctgaaacaacaggcgccagtcaactgttgaagacaatggccttcacaaccactgccaacaggagtgagttgcgggttgtgcgtgaaattgaggcaataggtggcagtgccaaagcatctgctagccgtgagatgatgagctacacttacggagccctgaagacttacatgcctgaaatggttgaggtgcttattgattgtgtacgcaaccctgcttttcttgattgggaggtaaaggaacagattttgaggctacaggcagagcttgcaaaatcatcaagttatcctgaaaattttcttttggaggctcttcattctactggctattctggtgctttagcaaacccactaattgtgccagaatattcagttagcagattgaatgcagatgtcctggagcaatttataactgagaactacactgcttccagaattgttctagctgcatcaggtgttgatcatgatgaattggtatctattgccgaaccccttctgtctgacattcccagtgtatctggaacaacaaggccaaaatcaacctacattggtggagaatacagaagaagtgcagattcatcgaacacagacgttgcattggcattcgaggtcccaagtggttggctcaaagaaaaagattgcgtcactgtatcagttcttcaggcacttctgggtggtggtggcaagttttcttggggaaggcaaggaaaggggttacattcacgtctaaaacgcctcgtaaatgaatttgatcagatcaagtcaatctctgctttcaaggatgttcacagtaatactggcatctttggaatccatacatctactgatgcatcatttgttcctaaagctattgacctagcagccagagagctcacttcccttgcaactcctggacaagttgaccaaagccaactggaccgtgctaaagcctcagctaaatctgcgatactggcaaatttggaatcacaggcatcactaacagaggacatggggcgccaagttttggcatttggtgaaaggaaacctgctgagcaccttctcaaggctatagatggtgttactatgaaagatataacgtctgttgctgaaaagatcatttcatccccattgacaatggcatctcatggaaacgttctgaatatgcctacttatgagtcggtcagtggcaagttccgctcaaaatgaggagtacatgacccttcccttcattttatcaccttgtttgctggacaagttttaccagtcccttgtcattcacgtctaggccatggttcttggtcagtttcagaagaaataaggaacctcatgcagttttgttcgtgaaacctgtgatcacttcacaattattcccttttctcattcttttgcggaacattcgtgtggttaatgctggtgatagaccagtaacgtgcttgtaaatttaactgaaccctggcccctcattcggtaccaaggccccccagagaatgtacaaaattgtcgtaaaactcttgacaaaaatgttgtcgcacatgaataatgattctacagaaaaaaaaaaaaaaaaaaaacactcgagggaggggcgccggtacccccaag

SEQ ID NO: 14000 - DNA, 174 bp, Zea mays
  Clone ID: MRT4577_11275C.1
cctcctgcaggttaccggatccggcaattgcccggggtcgaccgcacgccgtccgagttctagatcagctgagcgagccagctctagagagatcccagagcttatcgtacagcgtagcatagcgatcagtcatatgctttcttctataggtgtcatcctaatattcatattcat

SEQ ID NO: 14001 - DNA, 219 bp, Zea mays
  Clone ID: MRT4577_112760C.1
accaaacaccttaatacctgttctatttcaactatttcttgcccaaccacaacaataaacacttctactacatatcaaattcacacaactacccttttcctctaatcaaaactcccatcacacacttaacaaaacgcacattatccttctataccatctttttgactacacaatttcctttccaaattcccacttccttctttaaaaactccccaaaca

SEQ ID NO: 14002 - DNA, 236 bp, Zea mays
  Clone ID: MRT4577_112761C.1
attaaaatgaccccccccacagggggcaggccatccgctggagaccatgcacaccacaagcaaccactttttggacactacaaatacccccaggaaaggaaaaggcaacaacgaaaagaagagcccgagcttccttgcgtgggatatcaccacaaacttttgtggtttgccccccaatccgtgaacaaaatgggttctgcactaagagctttccaaaccatttacttaaggggcct

SEQ ID NO: 14003 - DNA, 821 bp, Zea mays
  Clone ID: MRT4577_112762C.1
agaattcaaccctaaccagcccaattctcgcgctctcgccgccaccgcacctccacgaatccacatctgcgttgtccgcgcggttcatcgtccgacgtcccacatccacgcctgttggctgccacagatctagccctgcctacagtgttcgtgcagcgacgtgtcccgttccgttcgctactgcctcaccgacttgtcgccgccggcagctcctcgcgggacgcggccacgcctgacgcttccacctccacggttgagctgacaactccagtccatgcggacacggtccacgacggtggcgcagtggctcgtcggctccaacctccgacctccagtgccccaccgaccgaccgccagtgctcctccacgggacacggccgatggctgcacacactagtacgcatccctcctggctttgttctctgcgctctagctcgtggtctccgggacgagctcgtcatcagcgtcatcagacacgacgagatcaaggccaacaagggacccccagtcctgctgctctgcgagaggtcctgtgtccatggacttttttttcgtttcaatatcttctatcttctactgtcattttaatctatgatctctgctggtgtgagcgaaacgtaattaggggattgccgtttttgttccgtagctacctgaccatggccacagttcagcagaattcagtcaagcgctgtttgggaattccacgttcctcctaagcagtcctgtaaatggatcttttgaaagctgcttaagggctatgcagatcctacatgcttacacagacctgttttgacaagagccgagcagcgatgcttcca

SEQ ID NO: 14004 - DNA, 321 bp, Zea mays
  Clone ID: MRT4577_112763C.1
cccacgcgtacgtccacgcgtccgtttaattacaggtcatagctaagcatgtctcgcaggatgtcgtggcagacatacttcgatcagcacattcttatcgagatcgagcgccagttatagaccaggcctcatatactcagacattacgaaaccgatcctgaaaacacttcgctatatctcaaccattatggatagtaaagaggctgaaatgcgaattgcgttcacgaccgatgtttaacacgtggcacacatattttgtgatatttctgtctctacctacaacactatcaccaacatcgacatcaatattggcggagcacc

SEQ ID NO: 14005 - DNA, 287 bp, Zea mays
  unsure (1)..(287): unsure at all n locations
  Clone ID: MRT4577_112764C.1
gggggggggggggggggacncagaacgganacggcgcacaaaccaacgcaggagcacaaggccacaacaacaaaccaggggccgggccgccgaggancgaacacgaacagggcgcgcgagaacaggggagcacagaggcaacggcagaggacgacggggggggggacggcccaggcgacggcgggcaaggcgaggccgccagccacaggggagacggcgccgaagccgggcgcgcacgccacggggcccacgggcaagggggcacaagaggcgaggcccgcgcgcgc

SEQ ID NO: 14006 - DNA, 335 bp, Zea mays
  Clone ID: MRT4577_112765C.1
acttaaccattaccggtcccattatgggctcgcaatataaagttagagattggatttttggtggggaggcaaacccccaccctaaagggctttttatggtctgccaatggaaaaaaatagggggggttttactagcacaagcaaggagttacgcgtacgggctcatataggggggcccctgccccacatataacaaaattttccaacaacagtggcccaagttccagatctggggcaatgcaaggagaaaaaaacggggttttgaaaaggtctcctccatttttggccccccccccaaaactggggcccctgggtcgaaaccttttagggggggg

SEQ ID NO: 14007 - DNA, 382 bp, Zea mays
  Clone ID: MRT4577_112766C.1
gttgtgatagttttcacagcgactggctaaataaaaaccatttcttacaaaacagcaccgctacagtaacttaccaaacacactacaccatcgacctggccgtcggtgtcggagcggggatcctcttcgatacgctctccggatggtacttccacgccaagaacgcaccggaagaagcactgccgcagctgccagtgccacaaggctctcctttcacgctagctcataggtgtggtgtgtttggtaagttactgtagcggtgctgttttgtaagaaatggttttgattgccagccggtgtgatagttttcatcgcgggttcgtgatggaagaagaggaaatacggggaccggcacgcgggggcgcacgagctttccatagag

SEQ ID NO: 14008 - DNA, 589 bp, Zea mays
  Clone ID: MRT4577_112767C.1
cccaaaaaggcaatacatttttggctggaaacaggatccccgttggaacagacttttaattccacaaagataacccccctccccaaagaacaaagttttgaaaaaccccgggaagccttgctttgggggctttccaaaaaataggcggaaaaacaaacttttggactttaatctcccctaaaacaaactcccccgaataagaagaaggatttcctgggatggttaaaagggttgggcctataggggaatccaagcatcacccgtttttgggatggctaaaaaaggccattttaaaaggggacctcaccaggggggacggccccaacaccaaaaggatcctttttaacatttccagccataaggggattggcagggccttttttttggttccaaaaaccctggctttccttccaaccaattttaaataaaagttggggcccaatattgcccgcctgaattttacccttttaaggggtttttttggaagcctttggggcggagaataattacaccgggccataaacttttaaagttttttttgaggaaggaaatcacccagtgtggggccccttcttaggaggaccttgaa

SEQ ID NO: 14009 - DNA, 1627 bp, Zea mays
  Clone ID: MRT4577_112768C.1
atgaagcgtgcgcccacgcacgcggccgtgcaaatccatttcttgccttgccggcacagctctgcatagctcctcccaagctttaggattaggatttggatttggatttggatttggatcgggtgtgtttcctgcgtaaccatgagcgagatcatgaagctaaagcgtgggatcagcaccaaaccaggagaccacctcgtccaaaatggccaacaacatccatgtcacgaatgggaggagcaacagcgctactggccctcgccgcgggcgccgccggcgagcccgacggagtcgcccaggaccccaggcgggagccagaagaaggcggttctgggcaaggtgaagagcaaggccaagaaatggatgcacatgctgcatcacaagaagaaacccgcgccaccggaggagatgatgtggacccccagggccgggcctggacccagcgcggcacaagacagcatgcccagcagggaggagcgacacgccgccgagcaccgtggcactggcactggcacccccaggaaaccgcagcaacacgcgccttcctgttcctcgagcgatccagagcgggcgtccgaggtgttcctggaagcgtcaccgaggcagaactcgccggtcccgagccccaccgcgcacaggcagcagcagcagccgcagccgtacttcaaggtcagcagcaggttcgagtcggagatgaaggaggccaacgagatgctgatggagtccaagaagctccgcgtcaacacgaccaagcccaagaccaagaccgtgacgttcgcgccgccggccgtggagcgcgagcagccgggcccgggcggcgagaggagcggctggaagaaagactgcaggagggagctgcccggagcagcggcgtcccaggcgctccgcgacgcgttcgctgcggtccgccagacggtgctcgagatggtcgccaggatccaggaggcggtggcgctcgttgacggacggcggcacgtggtagagaggctcgtgtcgctcggcaggtacctggtgatgaagctggagcctgggcaggacgacacgttgctctcggaagcgatcactgacgccgtcctcgacctgttcgacgcgtggagcgagagcgtcgagaggcctttggtgcgacgggcgaaggagatctcttcttggttcctgcaggaaggaagagaagacacacctcctcctgttccgccgtctacgcgtccttgtgcggccgaagatgcagatgtgttttattccttagagaattgacagagcagcttgaagcaagagatcgagacattatgaaactacgtcggtagagttcatttacctaacgatgtcaggaagctgaaggcaaaggtctccacggctttgtacctgagatttgagtgagagaaagcaataggcaatcttgatgaagtttctcttcagtaaagaccatgtattcacgatgcatgtaactaggagccaaacacaatgtgtatatcgtaaaagaatagacctagtgctgaaggctgtggggtggataaaccgaggcaaaagcattttctcccgtaaatatggagaggcggctctcaccactacgtcagacccgttcaatgtgtatatcatagacatgttgaaatagaaatccccaatggcagag

SEQ ID NO: 14010 - DNA, 351 bp, Zea mays
  Clone ID: MRT4577_112769C.1
ggattctctatatattttagggagcctcgccaaacttttagggtctcctgcaaatagtgggtgccgaatggaagcctttggtgcatggcgggtggctctaatctttaggacctgctcattaggtcggtcagcctagatctttaggctctgtcgataggctaccgcccccttgttatattttgcaccagttgcagacacctgttgtttttgtttctagccggtgtgtttctgggtgggtcagttgcccactcctgtacccgtctcttaatgaaatgacacatagctctcatgtgccattcaagttaaaagataaaaaaatatctgaaatctttctgaattagcccaaaattt

SEQ ID NO: 14011 - DNA, 227 bp, Zea mays
  Clone ID: MRT4577_11276C.1
ctgcaagctggtgagatggatcggttgcagcagcggaacattacgaagggggagacggagatggaggaggcgcgcaaggatgaggagcggaagaaggaggcgtgggacagcattacccaggagccgcagcaaggtcaaggcctcagcctctcattcgccaacggcatcgacacggcgaggctgcaatgttgccgttgtggaacccttcagctgatcccacacagctt

SEQ ID NO: 14012 - DNA, 327 bp, Zea mays
  unsure (1)..(327): unsure at all n locations
  Clone ID: MRT4577_112770C.1
tctgnccgggtatctatgtttgttgatatatccatttgtggtcttcaaagttctctgattgctttgtccaccacttcaccccatgctgcattgtctttattcaaatcatatttctccatcttcatttttctgtgtgtattgctatagctttacagcatttcttagttatgcttgaacaaattttattggaatttaagatgtcaaaagaagcaaaatgaggaggctgtattatctgaagtatctcttgttgatacagtattcatggtcttcaaagttctttgtttcctttgaaatattattctattaaagcatagcagtttatacttt

SEQ ID NO: 14013 - DNA, 424 bp, Zea mays
  Clone ID: MRT4577_112771C.1
ggcaccggcccgtacttattggttttcttacccacccgttcttatcgacgagccttctaacagggagaggcggcatgttcttgtggaaaggggcgacaaggatccatcatttattggaacgtgagagtggatccaagacgaggaggacctcatcatccatctccatcccatgatgggcaacaagtgggctcacattgctaggcatgtgccggggcggacggacaacgaggtgaaagaacttctggaactgtgcaaccaaaagaacttctgtgatgattggtagtggactttcacccaacacccttttgcgagtggactataacggaatccagaggcgaccgggcatgtttaatcactgcgagctaattcatgtggtactgagcagctgaaaagactgggcggtacatgccggcgccgacagagg

SEQ ID NO: 14014 - DNA, 345 bp, Zea mays
  Clone ID: MRT4577_112772C.1
caaaaacaaaggggtggccccccctttattagttagggaacccccttttttgggctggtttccaaatcatgcaggggacaggaggggggcacaacgcaggcccccccacaaaaagggcaaaacacacccgagggccgttaagggtaacaactaacaggggtatcccacccgggttatgtcctatgcacatggcatggacctacggctttatagggaaacaaccaaccggttggtcccaaggcattaatagcccttaagaatcgacggccaccaccagtcgacaaaagccctttagtggttttttaaccctttttccaagcgccattggttttctgcatctccaag

SEQ ID NO: 14015 - DNA, 1297 bp, Zea mays
  Clone ID: MRT4577_112773C.1
cattgggaccctcgaggccggccggggaaagatagattgaaaagggaaaataaaattaaaatccaagtcttacgcgagtccccttcccgatccgccggccgatccacccaccgccgccatgccggcgttcaaggccccggcgccgggcttcgccgtgcgcttcagccccttccacgagaaccgcctcctcgccgccacgtcccagcacttcggtctcgtgggtaacggtcacctcatcgtcctcgacctagccggcggcgggcctggggccgccccggcgccggtcttctccttcccgacctccgatgcgctcttcgactgcgcgtggtccgagtcccacgactccctctgcgccgccgcctccggggacggctccgtgcgccttttcgacgccgctctcccgccggcgcagaaccccgtgcggctcctccgggagcacgcacgggaggtgcacggcctcgactggaaccccgtccgccgggacgccttcatctccgcctcctgggacgacacgctcaagctctggtcccccgaccgcccagcctccgtccgcaccttccggggccacgagtactgcgtctacgccgccgcctggtccgcgcgccacccggacgtcttcgcgtcggcctccggggaccgaaccgcgcgcgtctgggacgtccgggatcccgcgcccacgctcatcctgcccgcgcacgaccacgaggtgctctcgctcgactgggacaagtacgacccctccatcctcgccaccgcctccgtcgacaagtccatccgcgtctgggacgtgcgcgcgccgcgggcgcccatcgcgcagctcgccggacacggctacgccgttaagcgggtccgtttctcgccgcaccgccagggcatgctcatgtcatgctcctacgacatgactgtctgcatgtgggactaccgcgccgaggatgctctgctcgccaggtacaaccaccacacggagttcgttgccggcatcgacatgagcgtcctcgtcgatggcttgctcgctagcaccggatgggacgagatggtctacatctggccatttgggacggatccaagagccatgtagcacgcagatgcaatagaccaggtgatttgtactattggttctcagctatgcattgggcggtggtaatactaatacatgctcctacatgttcagttactatctcttcaaatgagttgaagaagttggaataatgtcaaaaatttgttcagttactatctcattgagctctctgccagcgcctcgccaatcaggctcagactagtcgcggatggatatggc

SEQ ID NO: 14016 - DNA, 253 bp, Zea mays
  Clone ID: MRT4577_112774C.1
cgctaactaagctgacaggtggagcccctagaggtgcctcatggtgggctaatgacgtaacggtgtgacatgtagcttccgccggccttagagccttcgtgctatggtacacttcgctgcgcttggacggaaggcggtcgccaccgttggagccttcgcgctatggtacccttcgctgcacttggacagatgagtggcgatggagactctagggcgacatagcggcgagggcctcgattgctggcgatcgctc

SEQ ID NO: 14017 - DNA, 433 bp, Zea mays
  Clone ID: MRT4577_112775C.1
ggcgcctgggaccctctgactacttcggggagattgcactgctgctgaaccggccccgggcggccactgtcgtggcccgggggcccctcaagtgtgtgaagctggaccggccccgcttcgagcgtgtgctggggccctgctctgagatcctcaagaggaacattcagcgttacaacagcttaatctccctcgccgccggagcacagctcccgccctgcagccccagctccccagtgtggtggccgtgccctgctcgtctgtgtcgggggcccgggagccgctgtgtgaggtgtgggccgggtggggctgggtcccggcagcgtgaggactgccccttccccggactcactttttggaataaatgatcaccttgtgcatttccaaatcaaaggacaagcggacaaaatgcatcccaagatcaaggaagggacag

SEQ ID NO: 14018 - DNA, 400 bp, Zea mays
  Clone ID: MRT4577_112776C.1
atcagaccagattttcccccgtgaggcatgatttcagtgttccaagctcccagcggaacaaacaaggaccaatccgtccagggatcggtggagcccgatccgttcgattcgtcgaccaagggagcggagaagccgcagtcttcatcgtcgtcgctgatctttcttggtacggggtgctccggctcgttgcccgacacacggtgcctcctcaagccgtcgacgccgccctgcggcgtctgttcgatgggcgtctcactccctacggagcggaaccccaactacaggctgaacacctgcctattgatagattattgtcatgacgaaacccacacgtgcatcctaattgacattggcaagaccttcagagaacaagttcttcggtgggttgtccacgacaaag

SEQ ID NO: 14019 - DNA, 306 bp, Zea mays
  Clone ID: MRT4577_112777C.1
ggggttggttttttttttttttgggttttttttttttttttttaaaagggatggacatattattcaaaggttgtcgattaaaaagggttttccggtggggataacgttgctacatccaaatagggtgttgcatgcctagcaagccaaacatttttcctttcaggaaggattccattggcgttttacacatttttggtggctttgatacataaacaggacaaatgggtttcttgccggggttggtgtttttcaatttttggaatcacgatttttaccgttgtccaaagtttttttcttttaggggtg

SEQ ID NO: 14020 - DNA, 293 bp, Zea mays
  Clone ID: MRT4577_112778C.1
ggcggtttgatccggatgtcactgtcaaatgcaatgttatctagcgccagaggggtgtgtctttgaaaaagataaatctatgtttgaaatttaccataaagcagctccaccagtgaattcaggatctactagtgaactatttagatacacaatagctttaaatccataaaatataatatgttttggttggaaagaaaaaaaaaaaaaaaaaaaaaaaaaaaaaaaaaaaaaaaaaaaaaaaaaaaaaaaaaaaaaaaaaaaaaaaaaaaaaaaaaaaaaaaaaaaattaaaaa

SEQ ID NO: 14021 - DNA, 312 bp, Zea mays
  Clone ID: MRT4577_112779C.1
gggcaggaagaatcccacaggagcaacacgcgcattgaaggggtccatatccgaaatcaaaaaaaaacatttgagccccgtgtctttgtacatgtagacaccttttctttgggctaacccctacgagttgggttccatgcataggtttacaggcaccaattcaccattcagggacctgatcgttcccggggaaaaaaagattccattaaagcaacttgttccacgagtccctcacacaccgggaggcaccagggcgatgcaatcggagtaacttctgggggaggggcgctcctcggccagggggtccaccca

SEQ ID NO: 14022 - DNA, 626 bp, Zea mays
  unsure (1)..(626): unsure at all n locations
  Clone ID: MRT4577_11277C.1
gatacaaggatgataattatcacttattaatcagagaagaatcaacctctaatggcaactcaaacagcaaggcttattcaggagaatgaacaacagtggactgtgcagatcatctataagaattatgccttcaaatatatcagcattagacatgaacaaagagaggcaaacaacataaacaccagtgcaggtgtatgtcacagaagaactaaaaccaaagagaggaataatggtaaacagaattctgcgtgaatcattataatgaagtcatgaacacattagtcctgagaaaagtcatgatcacattagtatttctttcactcggaaaacattagtattgcttctgcacctgctgctttcacagatcaaggtatcaccaatagccaccacaggaacaagagccattcttgaaatgatggaagcgactggaatctcgtacaatgatctcatggtcaacaatcttggagatgtaggtgaatgcactatgacaatcaccgcaaacacgaaggttctttgtgatccgtatgggacaaccaggggaagtcgtgaggagcccatatgcgagagcaagcttctcgctgtgttcactgagaagatatttttctnctcgtcatcaacatcatgca

SEQ ID NO: 14023 - DNA, 513 bp, Zea mays
  Clone ID: MRT4577_112780C.1
ccggccgggccctcctccctcccttacaaaccacatttccctttcccccctctacagagacattggcaccaaactcgattatttcaagaatcattagcgccaggatggcgacgagcggaggaaggtgctgcgatcgtttacctcaaggccctgcctgccgagcttcaccctgagcatttcgtccccttccatttacggattcgcggacggagagagtggctgagcggcgacttggggatagtttaattgtggaggacatatcctatgcaatcactcatttggtgcaagcgtgtaatcaaaccatccacaacatccaatctagatccaacggtttcatatggaaggggtaaaagtaaaataagtactatgtttcaggtggaagggattaaatgtaaaataacagtcatcattagatctagattagatgcaccaaatcgtttgattgcacgcttgcatcaatataagtgattgcataagatattttccctcaaaaaaaaaaaaaaaaaagcggcc

SEQ ID NO: 14024 - DNA, 367 bp, Zea mays
  Clone ID: MRT4577_112781C.1
ggagagggttaagcacttaagcatattgggaggggggttctggactacaatccgaagcatccaacgacacggggaaacagggagaacttttcagtaaaaaaactggcgacgatctaccgatatctgtacagtaaaaaaccaaacaaacccctccctatctgcatgctctcacgctagctttacacttggactgggaagccaaaattctggaacaccctgatctcgcctccccgtccaggggtgacaatcaccaagccccacgcagaccggggttggacatccatagctccaatgcaaagatcggaggaacagtgaccagggctgctcttggctgacggcaacttttcgtcaggccaggacgtggacc

SEQ ID NO: 14025 - DNA, 710 bp, Zea mays
  unsure (1)..(710): unsure at all n locations
  Clone ID: MRT4577_112782C.1
actacgacaccggcacctaccatcgctctactccgcttcgagtccacagcacctcgcgcgcgctctacccaccataagccttcgggccttccgggagcccaagccatggcgcggaagaagatccgggagtacgattccaagcgcctcctcaaggagcacctcaagcgcccggccggcatcgacctgcatatcctctccgcccaggtcacacaatcgacggactttgcggagcttgtgaaccagcatccatggctgtcgaccaccaaactggttgtgaagcctgacatgctgttcgggaagcgtgggaagagtggccttgtggcactcaacctggatgtagcccaagtcaaggagtttgtgaaggagcggttgggagtcgaggtcgagatgggtggctgcaaagctccaattaccaccttcatagttgagccgtttgtcccccacgatcaagagtactacctttcagttgtgtccgaaaggttgggtagcaccattagcttctcggaatgtggaggcattgaaatcgaggagaactgggacaaggttaagacagtctctcttccgactgagaagccaatgacacctgatgcttgtgctcccttgattgcaacccttccactggaggcacgcggaaagattggtgatttcattanaggagtgtttgctgtcttccaagacttagatttctcatttattgagatgaacccatt

SEQ ID NO: 14026 - DNA, 2273 bp, Zea mays
  Clone ID: MRT4577_112783C.1
accgttaggcacgaggcactgctcacgctcgcacatcgcacgttcatggcacggggagtaactggcgacgccgcgggaagtagcgccgccgacgagcgggggaggggggaggccgcgccgccgcagtctgcaacgtggcagcgggtgcggagggccgggcagggggtggcggcgcacgcgctgttgctctgcttcaccgcgctcctcgcgctcaagctcgacggcgtcctctcactctcctggtgggcgcttttcatccctgtatggttgttccatgctgttgcggctcgatgtctattctcattaccggctccatcacctgaaagttgtcaacgggttccattccattccattgtcgcaacaccgttactagttgcctttgagctgcttctctgtgtttatctagaaggcctcaaccacaatggtcatgtggagcctttcatcatagatttaaagcttgtgttccttccactcttggctttggaaatcattacactggttgacaacttcaggatgtgtggtgctttaatgcctggacatggagaaactataaccgaagaagcaatttgggagaggcttccttacttctgggttgcaatttccatggtatttctactagcggctacttcactcatgcttctcaagttatgtggtgatgcagttactctggggtggtgggatttatttattaattttgggatttcccagtgctttgcttttctagtatgcataagatggtcaaatccaatggtcattggaggtcctgtattgataattcctatagtagtttttcaagttctactttgtatgcgcttagagggtactccatctaatgcacgttttatcccaattcgagctatttttctacccataattttgttgcaagtggctgctgtatcttttgctgtttggagattgttcagcaggcttcttactaaacttaaagatggaactattagtcaagcacatatttctgtgtcttccaaagtcgatgagctatttatgatgatacagtgtggttcaaggctccttcactggtggtctattgatgaagatagcaaagaggaacaggctcacttatgctatgcaaataatattggctatagtaccttttgcagttatccaccagaggtggtaaaagagatgccaatgcaagttcttgccaaagaggtacagagacttcaactggccttggaagagcaaactgaaatggcaaatcatagccaacagcagtgtgataggctaagaaatgaacggatcttgtgtcgaatttgctttgaaagagacatatgcattgttatgcttccctgccgccatcatgttctctgcgagccatgctctaacaagtgtcagtcatgcccaatttgccgattgaccgttgagggcaggctatttgtttatgatgcagtgatgtcatccaatccatcatgttacgcagtttaaaagtgcacatgttgacagtatttgtagggtacctacttctggtgttgacaaagatggcccacacctgtttcctggcagtgaatgacaggttgtgaaattcttggtatgaaattaggaagaaagctaagaaagtcttctcttatcagattgcagcacaaacaaaacaaaagccacgatgcacatccgtctccaatgatatgacacagaggaagacgaagtatatggactcttgctcatatatatgcaagcgtgaataaccacttaaataactgagtttgttctctagccatatatgacatctggccagtttcgattagtttgcaaacgagttctggttaacagttggatggataaccttgcaaacatgtggagcttcaggttgtttagaagttatttggagttcagcaaattggcaatatcccactgttcaactttgatgattccatgaattcacacaactgaggtaccaccttttccagtgatgttcacctgtaacggcttataaatacatctgtacagatgcgataataatgtctatcaattttatctccaaggcataagagcaaaaaaaaaaaaaaaaaaaaaaaaaaaaaaaaaaaaaaaaaaaaaaaaaaaaaaaaaaaaaaaaaaaaaaaaaaaaaaaaaaaaaaaaaaaaaaaaaaagggggggggcgtttttagggggtcaaattttactaccgggggctgggaaggaaatattttttttttgacggacccaaattgaattcccggggccgggttttaaaaccgtgggaatgggaaaaacctggggttacccaaattaaatggcttggaaaaaaatccccttt

SEQ ID NO: 14027 - DNA, 2001 bp, Zea mays
  Clone ID: MRT4577_112784C.1
tcgcgatctagaactagtggagaaggagagggaggcgcggcgccttagctctgccaccgatgacagcctagatggctccggctcgcgcaatgtcgggagggtccgggtgcggcaatacgggaagacgtgcaaagagctcaccgggctgttcatgacgcaggaattggctgcccactcgggctccgtgtggtgcatcaacttcagcctggatggacgataccttgccactgctggagaggatcgtgtgatccatgtttgggaggtgtctgagggagacagaaagggtgagttgctcggggaatgttcgctggcaaaggtagaatggtggtggctgcagcccgtttctcacggttcttgggaacgattcaccggagatcgctgcattgtcattcacctgcgctgacatggataagaagagaaggctgaggaagcagagcaatcggaagtctgtagggtctgatcatctggtcgttcctgagtgtgtgtttggtttcagagacaagccagtttgctcgcttctggggcatgccgctgatgttcttgatctgtcatggtccaaatctcagtacttgatctcatcctccatggacaaaactgttaagctctgggacatcactaccagtacctgtttgaaaacattctcacatacggactatgtgacttgcatccagttcaatcctgtggatgacaacttcttcattagtggatcactggatgagaaagttcgcatttggaatgtccgagatcgtaagattgaggattggaatgatcttcatgagatggttactgctgcttgctattcccctgatggacaggttgcgatggtgggctctcacaagggaagctgtcatatatttgatacatctgagaagcttcagtacaaaagtcagatagatttaagaattaggaaaaagaagtcaggccagaagaagataactggcttccagtttgctcctggaagctcctcggaagttctgattacttctgcggattcgagaatacgagttgttaacggcgatgaatttgttcacaagtttaaagggtttcggaacacgagtagccaaatctcagcttctgtagctcagaacgggaaatacgtgatctgtgccagcgaggattctcacgtctatgtgtggagacatgacaacagttcccaccctagtaggaacaggatcacagttgatgtaaccaactcatatgagcatttccactgccatggcgtgaccgtggctgtcacatggcctggtgctgaagcccggggctcgtttggatctcgaagcagcaggcacagcgattcagatggagcagtgaactctggccgagacatcccagctgagaacagccagcacaattctgacgcaggcaccagtagacatccaggcgatagagcatccacatcctggcctgacgaaaagttaccgtcagccaagagcagccctggtcactgctcgtccgatctttgcattggagctatggatgtccagcgccggtctgcgtgggggttggtgattgtcacagctgggcggggaggcgagatcagggtgttccagaattttggcttcccggttcaagtgtaaagctagcgtgagtgagatcatgcagatagggtttgtttggttctttactgtatataggatcggtagatgtagatagccgacagttttacgaaaacttccctgtgtttccctgtctccttgggtgcttcaagattgtacccccagaaccacactatcatatagttagcaatatgctttgttgatacaatgcagatagggaggggtttgtttggttctttttactgtacatatatcggtagatcgtcgacagtttttttactgaaaagttctccctgtttccctgtgtcgttggatgcatcggattgtagtccagaaccacactaccaatatgcttaacactctcacttcttgttgatacagtgcaaagcatagtgtaattgtatgcttagcacacatttccttaatatcttcgtacgtttttttt

SEQ ID NO: 14028 - DNA, 396 bp, Zea mays
  Clone ID: MRT4577_112785C.1
aaaaaaaacgaataagggccccccagcccaagggggggggtttaccaacccaacaaggaccctcaaccctgccctttttccttggaaaagggggccgccccttcccggggaaggccccaatcccaaaaaaagggggattcaacaagagacaatccctgccaattgaaccgcccaggttttggctggaaggggtctagggtttggaaaacccaaggggccccatgccaccgggacaggggagatatatcagcagaccccaggcgggccttcgggccctgccgggggcgggccaatggaaacccctaccggaaccgctaccagcgggggaccccccgaagctgcttaccccccccaggagcccctgggcccccccttgccccaaaaattgaccagggc

SEQ ID NO: 14029 - DNA, 281 bp, Zea mays
  Clone ID: MRT4577_112786C.1
tatcactacttacctaaactattacacacaaaatcacacaacaacctacctatgccatacattctacctgaaaaccacacctacctcacatccccatacaaactgcggaaccaacccatcatggctccctcagtctacatcctgctccagcgcgacacagagtccaacaccacagtcacctctgtattcctcgatcttcaagacgccaacgctgctctactccacacagcacaagaagctggcgttgaccctgcgagcgccaagcccgcagacggagacgt

SEQ ID NO: 14030 - DNA, 772 bp, Zea mays
  unsure (1)..(772): unsure at all n locations
  Clone ID: MRT4577_112787C.1
ccggccgagaacgccgccgccagtcctcactcctcaccatttcccaaaccctacccatacccccgccgccgccgccgccatgccgcccaagctactcccgtcgcaggtggtggaggtcttcgtccgggtgacgggcggcgaggtcggcgcggcgtcgtccctggcgcccaagatcggcccgctcggtctctccccgaagaagatcggcgaggacattgccaaggagacggccaaggactggaagggcctgcgcgtcaccgtcaagctcactgtccagaaccgccaggccaaggtctccgtcgtcccctccgccgccgcgctcgtcatcaaggcgctcaaggagcccgagagggacaggaagaaggtcaagactcatcaagcacagcggcaacatcggcctcgacgacgtcgtcgagatcgccaggaccttgaggaacaggtccatggccaaggagttggccggcaccgtcaaggagatcctcggcacctgcgtcagcgtcgggtgcaccgtcgacggcaaggaccccaaggacctgcagcaggagattgatgacggcgaggtcgagatcccgtccgcttgcagcttctgtagtgtgtcaatcattgctacaaagtatgccatggatcgctgtgctacaactgtactgtgattgagaggcctcgtagtacatcaatctggttcgatatcatgttgattgctggncttgtactgtttgttccaattgtttgcttcattgcgatccagatttccaatgacttaattggttatggc

SEQ ID NO: 14031 - DNA, 828 bp, Zea mays
  Clone ID: MRT4577_112788C.1
acctcgagccggcgggagccgtgccgccgtcctcctcctcaccatttcccaaaccctacccgtacccccgccgccgccgccaccgccatgccgcccaagctcgacccgtcgcaggtggtggaggtcttcgtccgggtgacgggcggcgaggtcggcgcggcgtcgtccctggcgcccaagatcggcccgctcgggctctccccgaagaagatcggcgaggacatcgccaaggagacggccaaggactggaagggcctgcgcgtcaccgtcaagctcaccgtccagaaccgccaggccaaggtctccgtcgtcccctccgccgccgcgctcgtcatcaaggcgctcaaggagcccgagagggaccggaagaaggtcaagaacatcaagcacagcggcaacatcggcctcgacgacgtcgtcgagatcgccaggaccatgaggaacaggtccatggccaaggagttggccggcaccgtcaaggagatcctcggcacctgcgtcagcgtcgggtgcaccgtcgacggcaaggaccccaaggacctgcagcaggagattgatgacggagaggtcgagatcccgtccgcttgaaggtgagatgaattcatcctctcgttattgctcccacggtttgctaggccgatgctactgttattgttttgtttggtgcgcgtcatgcggagctaaatgttagtatgtgtgttcagcttctgtagtgtgtcagtcattgctacaaagtttgccatggatcgctgtgctacaactgtactgtgagtctgtgattgagaggctcctaattactgccatctggttcgatatcatggtgatcga

SEQ ID NO: 14032 - DNA, 1012 bp, Zea mays
  Clone ID: MRT4577_112789C.1
cctatgggcgattgggttcctcgaggccggccggataacgacgggcaacgcggcctgccgaaaccctagaacgccgccgccagtcctcactcctcaccatttcccaaaccctacccatacccccgccgccgccgccgctatgccgcccaagctcgacccgtcgcaggtggtggaggtcttcgtccgggtgacgggcggcgaggtcggcgcggcgtcgtccctggcgcccaagatcggcccgctcgggctctccccgaagaagatcggcgaggacatcgccaaggagacggccaaggactggaagggcctgcgcgtcaccgtcaagctcaccgtccagaaccgccaggccaaggtctccgtcgtcccctccgccgccgcgctcgtcatcaaggcgctcaaggagcccgagagggaccggaagaaggtcaagaacatcaagcacagcggcaacatcagcctcgacgacgtcgtcgagatcgccaggaccatgaggaacaggtccatggccaaggagttggccggcaccgtcaaggagatcctcggcacctgcgtcagcgtcgggtgcaccgtcgacggcaaggaccccaaggacctgcagcaggagattgatgacggagaggtcgagatcccgtccgcttgaaggtgagatgaattcatcctctcgttattgctcccacggtttgctaggccgatgctactgttattgatttgtttggtgcgcgtcatgaggagctaaatgttagtatgtgtgttcagcttctgtagtgtgtcaatcattgctacaaagtatgccatggatcgctgtgctacaactgtactgtgattgagaggctcgtagttacatcaatctggttcgatatcatgttgattgatggcctagtactgtttgttccaattgtttgcttcattgcgatccagatatccaatgacataattgttatggtttattcggtcagtcagtagtgcaaataaatggttttgtgcttcgatttgcatgcggatggatcaaaaa

SEQ ID NO: 14033 - DNA, 254 bp, Zea mays
  Clone ID: MRT4577_11278C.1
tcgcggttatatatacatccatatataacacaaacatatacataagcatgcatgtgcatattgcatatgcgtcaatccatgccatctatacagataaatggcgctgcggaggcagagcatgatcgagcagaaaggacccgccctaatatggttataaccgacactgaaagctggggggcacgtgctggccgcactctgtgacgagcactgagatggcgacggggagcacgaggctgacactgagcgccttgacc

SEQ ID NO: 14034 - DNA, 895 bp, Zea mays
  Clone ID: MRT4577_112790C.1
cattgggtacctcgaggccggccgggctagaacgccgccgccagtcctcactcctcaccatttcccaaaccctacccatacccccgccgccgccgccatgccgcccaagctcgacccgtcgcaggtggtggaggtcttcgtccgggtgacgggcggcgaggtcggcgcggcgtcgtccctggcgcccaagatcggcccgctcggtctctccccgaagaagatcggcgaggacattgccaaggagacggccaaggactggaagggcctgcgcgtcaccgtcaagctcactgtccagaaccgccaggccaaggtctccgtcgtcccctccgccgccgcgctcgtcatcaaggcgctcaaggagcccgagagggacaggaagaaggtcaagaacatcaagcacagcggcaacatcggcctcgacgacgtcgtcgagatcgccaggaccatgaggaacaggtccatggccaaggagttggccggcaccgtcaaggagatcctcggcacctgcgtcagcgtcgggtgcaccgtcgacggcaaggaccccaaggacctgcagcaggagattgatgacggcgaggtcgagatcccgtccgcttgaagactagacatccaaggggacttccattggtgctgctgaagtgttgttgttctgcatgccgtcgatgtacctttttcaagcaacgtgttccatctatttttttgtctagctatgttagtgatatcttgtgagagacctcaatgttaccaccgtatctttgtctttgttggatggagagttttaagcggttcaccacatctttgttctttgttggatggagtgttttaagcatctgctgtctcaagttgaaaaccctaaaaaaaaaaaaaaaaagggcgaccgcagactagtgagctc

SEQ ID NO: 14035 - DNA, 277 bp, Zea mays
  Clone ID: MRT4577_112791C.1
gagaaatacttctgaaaacgacgaccaatatcaacgccaacaggcgtaacctaggggcggcttaccactaagtgtttgcatccatggcaaggatcttcaaaatactattctagacgctaaatgcctgcaatcattcattgctagacctgcttgcactatttcttgctcctatacgatcatctgcatctcacaagtatactaagttcctaactctaattctaattattaacaacacactccagaatgctactgaactactctacaagaaatacctata

SEQ ID NO: 14036 - DNA, 819 bp, Zea mays
  Clone ID: MRT4577_112792C.1
gccggccgggtccgggaaactagaacgccgccgccagtcctcactccgcaccatttcccaaaccctacccgtacccccgccgccgccgccgccatgccgcccaagctcgacccgtcgcaggtggtggaggtcttcgtccgcgtgacgggcggcgaggtcggcgcggcgtcgtccctggctcccaagatcggcccgctcggcctctccccgaagaagatcggcgaggacatcgccaaggagacggccaaggactggaagggcctgcgcgtcaccgtcaagctcaccgtccagaaccgccaggccaaggtctccgtcgtcccctccgccgccgcgctcgtcatcaaggcgctcaaggagcccgagagggacaggaagaaggtcaagaacatcaagcacagcggcaacatcggcctcgacgacgtcgtcgagatcgccaggaccatgaggaacaggtccatggccaaggagttggccggcaccgtcaaggagatcctcggcacctgcgtcagcgtcgggtgcaccgtcgacggcaaggaccccaaggacctgcagcaggagattgatgacggcgaggtcgagatcccgtccgcttgaagactagacatccaaggggacttccattggtgctgctgaagtgttgttgttctgcatgccgtcgatgtacctttttcaagcaacgtgttccatctatttttttgtctagctatgttagtgatatcttgtgagagacctcaatgttaccaccgtatctttgtctttgttggatggagagttttaagcggttcaccacaccaaaaaaaaaaaaaaaaaaggccccta

SEQ ID NO: 14037 - DNA, 821 bp, Zea mays
  unsure (1)..(821): unsure at all n locations
  Clone ID: MRT4577_112793C.1
ccggccgggctagaacgccgccgccagtcctcactcctcaccatttcccaaaccctacccatacccccgccgccgccgccgccatgccgcccaagctcgacccgtcgcaggtggtggaggtcttcgtccgggtgacgggcggcgaggtcggcgcggcgtcgtccctggcgcccaagatcggcccgctcggtctctccccgaagaagatcggcgaggacattgccaaggagacggccaaggactggaagggcctgcgcgtcaccgtcaagctcactgtccagaaccgccaggccaaggtctccgtcgtcccctccgccgccgcgctcgtcatcaaggcgctcaaggagcccgagagggacaggaagaaggtcaagaacatcaagcacagcggcaacatcggcctcgacgacgtcgtcgagatcgccaggaccatgaggaacaggtccatggccaaggagttggccggcaccgtcaaggagatcctcggcacctgcgtcagcgtcgggtgcaccgtcgacggcaaggaccccaaggacctgcagcaggagattgatgacggcgaggtcgagatcccgtccgcttgaaagtgagatgaattcatcctctcgttattgctcccacggtttgctaggccgatgctactgttattgatttgtttggtgcgcgtcatgaggagctaaatgttagtatgtgtgttcagcttctgtagtgtgtcaatcattgctacaaagtatgccatggatcgctgtgctacaactgtactgtgattgagaggctcgtagntacatcaatctgggtcgatatcctgttgattgaggcac

SEQ ID NO: 14038 - DNA, 817 bp, Zea mays
  Clone ID: MRT4577_112794C.1
cattgggtacctcgaggccggccgggctagaacgccgccgccagtcctcactcctcaccatttcccaaaccctacccatacccccgccgccgccgccatgccgcccaagctcgacccgtcgcaggtggtggaggtcttcgtccgcgtgacgggcggcgaggtcggcgcggcgtcgtccctggcgcccaagatcggcccgctcggtctctccccgaagaagatcggcgaggacatcgccaaggagacggccaaggactggaagggcctgcgcgtcaccgtcaagctcaccgtccagaaccgccaggccaaggtctccgttgtcccctccgccgccgcgctcgtcatcaaggcgctcaaggagcccgagagggaccggaagaaggtcaagaacatcaagcacagcggcaacatcagcctcgacgacgtcgtcgagatcgccaggaccatgaggaacaggtccatggccaaggagttggccggcaccgtcaaggagatcctcggcacctgcgtcagcgtcgggtgcaccgtcgacggcaaggaccccaaggacctgcagcaggagattgatgacggcgaggtcgagatcccgtccgcttgaagactagacatccaaggggacttccattggtgctgctgaagcgttgttgttctgcatgccgtcgatgtacctttttcaagcaacgtgttccatctatttttttgtctagctatgttagtgatatcttgtgagagacctcaatgttaccaccgtatctttgtctttgttggatggagagttttaagcggttcccacaaaaaaaaaaaaaaaaaaaaaaaa

SEQ ID NO: 14039 - DNA, 423 bp, Zea mays
  unsure (1)..(423): unsure at all n locations
  Clone ID: MRT4577_112795C.1
atttttattttttttgagagaggnaacaaggcgccacgaaaaacacaggaaaaacacggaggcgaaagaagaaacgcagccaggcgagacgcgcggagaggacaagaaaacgcngtgaggcgcggaggcaacgagagacaacacacaaacgaaaatctgcttaacagcacaagcaatgcggccagtcaccggctgcctaatcacgccgggggcacacagataggggagggggaacgaatgcgggacgcagcgacaaactgggtgaacggcagacaggaagcgagcgcggctgatgaccaacgtgggacgacaaaaaaaaggcgaaaaggccgacaaaaaaactgagccaaaaatcacaaggcgcaggaggcacatggagcagatacagccgggtgaagaaaaaaaaaaaaaggggcagggcgc

SEQ ID NO: 14040 - DNA, 2420 bp, Zea mays
  Clone ID: MRT4577_112796C.1
tgattttcttcaaattttttccaatcctgtttaatccatatataacgggattaaccgacaagaccttaattggaagtgtcagctaaatcagacaaatgttctgttaaaacatcagtgtctctcaggctggtattagcatagcaacaaaagtggcttaagatgttcacaattgagcgatactacagtcaaagatgcacaacacatgacactagcttgtacacagtaaaattcttctctggtacacatcaggagaagaaacaaaactcctgcgctctcttatttaaccaagatcagggactatgaggtagtcctcgtcgtcggtgacctcgatccgggccttcttgctctggcgaaccccagcgccgccgccgccggcggctttggccggcctgtagtacgccgcgtcgttcgccgcctggtatccgaaaagctctggcacctccgccaacgtcctgctggctttgggcgcctgctcgtggaagaggtcgatgtcggcgaaccactccagctccttgaacccgagcgtcggctccttgtgcagcttgtcgctggactcgtagtcggagaactgcaggagctcgtcgacggcccagccctgcggcaggaactgcggcggcgagggcacctgctgcaccgcggcggagacggcggcgtgcggcggctcgatggtggccttgggcggggcgtggtggtcggagtcgtgggcgtcgcaggcgtcgctgcaggcggaagcggaggcgaggccgacgcggatgccggtggccaggtagcgctgatggttcccggagagcgtgcccgggacgtggatgggctcgtcgcagtcccggcagaagagcgcccggtcctccacgcagaagatgaacgccgctttctcctggcagacgtcgcagcgcgggagcttggcggagagcgcctcgagcgggaggcgctggtgcttgctggcgagcttgttggcggcgtccccctcgacgtcgcagcgcgcgcacagcgcggcctctaggcgcagcagtttttccctactgatgaccgccccccgatagtaattcaacctagtacgagaggaaccgtttattcccccaattggtcatcgcgcttggtttaaaaaccagtggggcgaagctaccgtgtgccggattatgactgaacgcctttaagtcagaatccaagctagcaaccggggcctttgcttgccgcccgccccgacccacgttagggggtttgcgccccaaggggccgtgccattgggtcagcccgcccggccgacgcgccccggcgggccccctcgaagctccctttccaacggggagtggtggtgaatcctttgcagacgacttaaaacgcgacggggcattgtaagtggcagagtggccttgctgccacgatccactgagatccagccccgcgtcgcacggattcgtctgcgaaggattcagcacgccgcccgtggggaggggagcttcagaccttgcccgggcgcccgctcgcgacggggcattgtaggtggcagagtggccttgctgccacgatccactgagatccagccccgcgtcgcacggattcgtagaacgccgccgccagtcctcactcctcaccatttcccaaaccctacccatacccccgccgccgccgccaccgccatgccgcccaagctcgacccgtcgcaggtggtggaggtcttcgtccgggtgacgggcggcgaggtcggcgcggcgtcgtccctggcgcccaagatcggcccgctcgggctctccccgaagaagatcggcgaggacatcgccaaggagacggccaaggactggaagggcctgcgcgtcaccgtcaagctcaccgtccagaaccgccaggccaaggtctccgtcgtcccctccgccgccgcgctcgtcatcaaggcgctcaaggagcccgagagggaccggaagaaggtcaagaacatcaagcacagcggcaacatcggcctcgacgacgtcgtcgagatcgccaggaccatgaggaacaggtccatggccaaggagttggccggcaccgtcaaggagatcctcggcacctgcgtcagcgtcgggtgcaccgtcgacggcaaggaccccaaggacctgcagcaggagattgatgacggagaggtcgagatcccgtccgcttgaagactagacatcgaaggggacttccattggtgctgctgaagtgttgttgttctgcatgctgtcgatgtacctttttcaagcaacgcgagccatctatttcttttgtctagctatgttagtgatatcttgtgagagacctcaatgttaccaccgtatctttgtctttgttggatggagagatttaagcaccttaccacacctttgttctttgttggatggagagttttaagcatcacctgtttgaagttgaaaaccctaactcaaaaatcaaaaaccacccct

SEQ ID NO: 14041 - DNA, 665 bp, Zea mays
  Clone ID: MRT4577_112797C.1
gttgaatattacttctcagctcacaattggtgactaattattgatgaacaacacaaaactcacaacataactcaaggaaactaattaaagtgccaatgtaaaaatatataataaacgagaaaggcaaaacaaaaacaaagcataaagtggatttgggatagatgaggaatagaagcttaggtcatggaatcaacggtgaggatggtgctaagattcatgggatgcatgtattcaggagagccattgaggatttgttgagctatgattctacttgctttttctgatgggtgaaaaggatcccaaaaggcaaagagatctctgtttgggcaaagatttgataatggagtgcatagccctatcccattgtacggcccttgtccacaacaagccaccttcgacgtgacgaatccatatgcttgtgggtcgctaatgaagtccatgtgcatttgttgagtattagcggcaatgaaggccgaagatccaacttcgttgttgaggtctgttatcatttgaattagttgtgggttgaatagtgacgcggctcgttggagttcggtagcacactcgccgttgcggctacgttgcgccagctcggccgggacgcaacccattggtcctgttccagtcacaaggacacgtcgagcacccaaatcgtacattttccg

SEQ ID NO: 14042 - DNA, 752 bp, Zea mays
  unsure (1)..(752): unsure at all n locations
  Clone ID: MRT4577_112798C.1
tccacgcgtccgccctccccccttttttttttttttttgttttttttttttttacgaacaaactggatagagaagagcacctttacacagcattccagtatttcgacaaggacaacagcgggtaagttgaacgttaaaatgatacagctggtacctgaattctggacgacacatatcataacaggacacatatataattcgtttatctcacaggtacattactaaagaagagcttgagcacgccttgaaggagcaagggttgtatgacgccgataaaatcaaagacatcatctccgatgccgactttcgttaaaatgatacaactatttagtgagttcttgacgacacatatcataacaggacacatatataattcgttgatctcacaggtacattactaaagaagagcttgagcacgccttgaaggagcaagggttgtatgacgcccataaaatcaaagacatcatctccgatgccgactttaggactagagatcctttcgcccgcagagcttcaagttcccttcggcggcgttctctccttcgttcccagtaggggtggaagcagacgaagtcgtagacggggctgatggtgttgaaaagcgcgaggttgacgcccatgaacaccagcagccccgtcatcgggcgcgctcggtgcggcatctcgctgtctccctcctcggcgtttgtcgggccgacaccaacagacagacggntcgccaaggaaaggcgccgtgacctgcgtcacccctt

SEQ ID NO: 14043 - DNA, 618 bp, Zea mays
  Clone ID: MRT4577_112799C.1
gtgaaagagcatttcatttattgtgttgcaatccacgtgtcaagaaaataccagatgaagagtggtattgtttggcatgtaaaagaaagaaacctaagagacaacgtggaaagtttgcaaatcccaaagttgaatcatccaagggcattcaaagaccccgccgaggtcttggtcctattcgagatatgttactggattctgaatcatatgaaagtggggttcggattggtactaagtttcaagcagaagttccaaaatggtctggtcctatttctagtagagaagatgagtttgctgagcccactgaacttgatcgtagtaaaacgacaatgctgagtttcgaggataagaaaaccagtatcggtaactggatccagtgccgggaagttctagacacaggagttgtttgtggcaaatggcggagggcaccattgtttgttgttcaatcaagtgactgggactgttcgtgctcagttgtttgggatcctatccatgctgattgtgctgttccacaggaattggagaccgttaaagttcacgagcaactgaagtacataaataagctgaagaatcgtctaggtgacagcaatcagaaacgctgaaaaaacgtactcttgc

SEQ ID NO: 14044 - DNA, 517 bp, Zea mays
  unsure (1)..(517): unsure at all n locations
  Clone ID: MRT4577_11279C.1
catggagcagagcggaggcgtcggtgggcataggctgtacaacccgaggactgacgccagcgacccgctcggtgctgccggcgtgcacagcagcgtctacgcctctctccggctcacctcgcccagggacatcatgggcttctccgacttccccttcttcccccgcagcaacgacgacggcgactcccggcgctacccagggcacgccgagttcctgaggtacatcagggactactgcgacacgttcggcctcatggacgccgtcaggctcaacaccaaggtcctgcacgtgggacgaccactgttggacgacgacggtgttgtgacgcggtggacggtgaggtactgctcgtccggacatggtgtctctgagcacgaggcggtcgcggaggaggagttcgacgccgttgtcgtggnctctggccactactcccagccacggcttccagccatcaacggcatggacaagtggacgaggaggcagctgcactcccactcgtaccgnngtccccgactc

SEQ ID NO: 14045 - DNA, 122 bp, Zea mays
  Clone ID: MRT4577_1127C.1
cgactacttgaaaatgactggcggatacgcaccccagcaccggaactggtatcaaggctgggcgtggtacattggcccgccctgagaaggggagtgccaccctaaccctttccccgaaccgg

SEQ ID NO: 14046 - DNA, 232 bp, Zea mays
  Clone ID: MRT4577_112800C.1
tagaaaaacccgcagcgatactccctctatgagagacgaacttggcgcgccgaccccgaaatgaaatctggctctagcgcaaccgacgtgcttgacacatgatctaaagcgctaagagcttgatacatataaaaatgcactcttgaattataggctaataagcccgacccttcctgaggaagctgcgaccatgatattgtcactcccaaaacatcgcgattttatgaaacaa

SEQ ID NO: 14047 - DNA, 536 bp, Zea mays
  Clone ID: MRT4577_112801C.1
gcgagtacaagcttttatttttttttttttttttatttttttattttttttttttttttttttttatcatctgttgttatataaaatagaaacgagccataaacgaatgatgatgccaggaaggaagccaccaatgacaaagatgccggagggcgagagacagaagcacatgcgaagaaagggccgactaaagaatgaccaataacgatagccagtatgaggccaccgaggaagatgccaaacatggtagaaccaatgaagacgccgaggatgaagcctgagacgacgacgcagaggatgatgccaccgataaagaggccaagtaagataccaccagagatgaggccgagcatggaggcatcaacgataatgccaaacatgatgacagagccacaatgcgactctgattccacctagcacattatacaacaacaacaaggacaattcatgaacaaccccacagacatggcgaatctcacccacgtgttcacagcaaaccttcgtaagtgctgcagtccagatataaacattagtga

SEQ ID NO: 14048 - DNA, 966 bp, Zea mays
  Clone ID: MRT4577_112802C.1
aacgtcaacctcaccccaccacccacctcgtcacatcgcgctcgatccgggccgggccgggacttcgacgacttcgccggcgccgagcacaatccacgaccgcccccaggccccagccagccatgtccaagtacggtaccatcccgacaacctcgtctactccggcgcccgagggctcctcccagctcgacttcatctcccgcgccaaggcccgcggcgcgtccgcgctcgccacgcgccgtccctggcgcgagctcgcggacccgcgcgcgctctccgtcccgcgcggcttctcagacgcctaccgccgggcgcgcgccaacctcgcgcacttcgccgccaactacgcgctcgtcgtcctgctcgtcgtcttcgtctccctgctctggcggccggtctccatgctcgtcttcctcgcctgcttcgccgcctggctcgtgctctacttcctccgcgaccgcgacgtggacgggacgctcgtgatttgcgggcggggcgtcggggacggcgtggtcgtcgcggtcctctccgcggtcacgctcgccctgctgctgctcaccggcgccacgggcttcatcctcacctcgctgctcgtcgggcttctgctcgtcctgctccacgcactgctgcaccgccccgccgacagcatcgacgacgaggccgggagatggtacacgccagtgccgccgtccaactactagctagtctgagcctctgaggtgctgctcctcccccttttgcttcttggttactggattgcagaccgatgttcttcagttcttgatccgttcgtgctcttgtccatagaaaatgtgcttaaatttgtgttcttcgttatctcggaagatttattactgaaattatgcttttgaagtgatcaatctcttattactgaacttatgcttttgaagtgatcaatctcaagtcaataaaatctgttctcacaccaaatggaaatctgaaatc

SEQ ID NO: 14049 - DNA, 477 bp, Zea mays
  Clone ID: MRT4577_112803C.1
catccaaaaacttcatttttgaactttaactcataagcaatttaaaagggggcccccccaatgatgggttgttggtagaacactgttgggtttgtcaaagcaagttggttgaatggcaccaattgttgcagttgtaagagggtgccagcgtttggctttgcgtgcgggtggaacggcaacaactgttgttgtgtcaaaaaggcagcagggctcacatcacctagctggctgaatggtagtagttgttgctgctgtaaataagccgcagagtccaatgctcctagttggttgaatggaaaaaattgctgggggtgggccgcaactacctggctgattggttattggtgttgccaataagccgccgtttttattgcacccagttggttgaatggaaaaaaccgatgttgctgaaagttttctccaagggttttttccccaatttgtttgtttttgttgtgccctttttttttgtgcccc

SEQ ID NO: 14050 - DNA, 371 bp, Zea mays
  Clone ID: MRT4577_112804C.1
cgccggcttcgggcgcggcgcgctgtccctgccgtcgcagctcaaagtggacaacttctcctactgtttcaccgacataacgcggccggagcccagctccatcctgctcggccttccggccaacctttacggcgacgccggcggcgtagtgcagtccactcctctggttcagaacttctcgtctctggaactatactacctgtcactaaagggcataaccgtcggctcgacgaggctgccgattccggagtcaacgttcgcgttgaagcaggacgggacgggcggcacgatcatcgactctggcaccggcatgacaatgctgccccaggacgtgtacaagctcgtgcacgacgcgttcactgctcaagtca

SEQ ID NO: 14051 - DNA, 462 bp, Zea mays
  Clone ID: MRT4577_112805C.1
tgcagcgcgccgcgggactgaattatcggggggacgaagctgactaccggcggccgcccgtcttttttttttttggggacagcgcgcagatacatgcggatatatccaccaatagggccaaagcaattaggtcggactgaaatgtttaaaaggctaacaaaaacctaacatggagtctgaaagcaattaaacgagactgaatattactaaaatataatatagaatatagaatgagaataaaaaagcattgaccttttcaaaataggagatttacgggtcgctgccacctaaatataatatagaatttagaatatagaacagcctgtaaatgtgtgtgagctgccacctaaatatttgcacgcttcagactcaaggagggattagtcactttcagttcattggaggtctcaaatatttttacaagactgaaaatcgagctgggtgaagcggactttaacgggt

SEQ ID NO: 14052 - DNA, 996 bp, Zea mays
  Clone ID: MRT4577_112806C.1
ggcagagggtccccccgtgctctgaggctcgcaggtccctggccctgcgcgtcatatccggaggtggccgcgccccctcagcgcaccccctgcctgccacgctcgaggacgctcgccccgccgctcgcccccccgcacgcacgacttgtcagccctacccacattgtacccaatgcagccacccacggtctgccgcttggctctcgcgagcctttcgctttaggcaaggcaccgctatatttgcccaagcacagtactatcggcagtctacatttttttttttttttttttttttttttttttttttttttttttttttttttttttccagcaaggtatggaaactgtatgtgcatcggcacgatagttttcgtagctatcctgtttttgtaaaagggggcatagattgccaccgtattctgaatctctgagttggaaaacactgcatgtcaaagccagatgtggccaagccttcacatcaaacgacctgcatagcacgctcgaggatactcatgctgcagctggggccactgcacgaagaactggtcagcgatccgtagcttgtacaacagtaaaccactcaatgacagtttcttcactctcgcgatgctttcaatgtagaaaatggatgaccatcccaagccaagcaccttcagaacgaaagccgagatgcatagaggaaagcacgtccctggaccgttgcagaatatctggagtatcataaaacatcagtatctgaactcaggctgcaaatagccaccatacctgaactaggcacacaccacttgtggtctgattcttatcactagccacatagcatgcagcgtggctagcaatgttgttgcgatggatgtaacataagactggcccacttcacgactacgatatatctgcatgaaatgagcgctctcgccagccttcgttccgttgctctgaataagtgattgttcatagacctgtgccttctgaagactcatgttgtctgtaagtgctggt

SEQ ID NO: 14053 - DNA, 611 bp, Zea mays
  Clone ID: MRT4577_112807C.1
gccggccgggccgctatccctatccaggaccagctatccccgacgcaaggtcgcaagccctctcggtctctccgtctctggcggcgacgccacattctcctctccccgacgcaagtctcgcgcggccgcgccctaggtccagcactccagcttggcgacgcgacgcccagacgcctgcggccctgctcctctgcgattcggccattcggttcggcaaggagcgcacagacaaggagcgcacaggcgactagacccaagctagctagctagctaataaccgaagcgcacaggcaaggagagacatacgagcaattacctccatggctttgtgatgacacaaattataatttcatatctgtgtttgtatttgtgtattattctgtgaaccaactgttattataaatttatgtatttatatactgatctactgttggttcgggccagtgacggcccggcacgtttaggcccaccgggcgaacgggccggtccggcacgatttattcctgtgcgtgccgggtttgggcatgtctctaggcacgtgggccatcacgacccggcccgaagcattaacgggccgtgcctgatctaaaaaaaaaaaaaaaaggccccta

SEQ ID NO: 14054 - DNA, 616 bp, Zea mays
  Clone ID: MRT4577_112808C.1
ggccgctttttttttttttttttctttttttttttttttttttaaattcggttgataaaataaaacccactttaagaaaaagggaaggatcccagtacagaacaaagttcctaccctccgggaatgaaaactttcctcatgaaaaggccagggttaaccgaaaagggaagaccccctttaactcaaacaaaattgatttcctaacagaggacgggaactaaaccccaacccccgggaggggcccctccttaccttaaatggatggatcccccccaattttattttaacaacacgggaacagttgctgaccacagggggctttgccttcaaaggtccaaaacatggggaagaccaaggcccccacaaaacagccaatttaccaggggacgattttccagggctgggtggtgccctcgcacccattccaaaacacaaagttggggccgcccgcccccccgcccggggccttggcgccggggaaggggtcaaagttaagggaaattttttttaccatcccgacccaagggaagcccgggcccaaggcccggttttccggccacagaaccgacttgtcctggaaactggggttgtagggccccaactggaccgggtggcc

SEQ ID NO: 14055 - DNA, 290 bp, Zea mays
  Clone ID: MRT4577_112809C.1
gcaagacattctcgtacatcaatacttccacagaatctctgacacatattagggacgtttcaaaattgaggtggacatgagatagatctatgctgatctgctacgagatcctgattaaaccatatcatattgaccgcaaacagatcattgctcgcagcgaacaatgaaattaactaagcttctcaatcatacatacctatctaaatgcctgacgactttctacactagcttctatgagctaggacattttgtaaaaatgaagaagaatagagctggtggcacttttaact

SEQ ID NO: 14056 - DNA, 925 bp, Zea mays
  Clone ID: MRT4577_11280C.1
ttgggaccctcgaggccggccgggggggtgtgcccgctggtgcgttcgaaaccccagagctttaaagcttttccgattccgcaatgctcaccgttcggttccttctcgtaccgagccgcgggtagccagccaaccgccgacgcagtccacaagcgatgaagcgcttcttccagccagtgcccaaggacggctccccgtccaagaagcggctagcgggtgctgctgaaccgggcgacggccccacatcagccggtgccgccaccggcgctggcggggatgtagaggggaggcccaccgaggagccgttcaagttcctgacgtggaacgccaacagcctgctcctccggatgaagagcgactggcctgctttctcgcagctcgtcgcccgccatagaccccgacgtcatttgtgtccaggaagtgcggatgccggcagctggttccaaaggggcacctaaaaaccccagtgaactaaaagatgacacaagctcgtcacgggatgaaaagcaggtagttctacgtgctttgtcagcttcacctttcaaagactaccgtgtctggtggtctctttcagattcaaaatatgctgggacagctatgtttataaagaaaaagtttgagcctaagaaggtgtctttcaacttggatagaacatcttctaagcatgaaggccgatgggcgtgttataattgcggaatttgaatcattccttttactgaacacttattctccaaacaatggatggtattattatgatcccagcaggttaacagttcctgtggtcagggctggtatagcttagggatcattgccatttaagcagtgcaatttggacatctcattctgcttgaaatgttgtttgtctaagagcagccatggactatatctaataaaaaaaaaaaaaaaaaatggatacaccccaccc

SEQ ID NO: 14057 - DNA, 395 bp, Zea mays
  Clone ID: MRT4577_112810C.1
tacgggtgcgcactagagacagaggccgcttctatctccaagttgtccatcgcttcttcgagagagaggagctgcgatcatgcactgacgacaacgttcacgaagaacaagcagaacagagtacacgtgagagccttacacgctcgtgtctgcaaggacctgctgcatccacctggtcactttaatgcatttgtcttgcaccagcaccgcatgctcttcaacaagtaccatctcgggttattcggataggtgggtatgcactacttccacatactccgtaacagattctactggcccatgctcagtattgatgagctatggtccatcctaccacactaggtcaaggacaaggacaccggctgcaaagtgccattgctcgatgtcacccaggtcgg

SEQ ID NO: 14058 - DNA, 340 bp, Zea mays
  Clone ID: MRT4577_112811C.1
atctcccggggtgcgacaccacggcgctccgcaattaaaaaaaaaaaaaaaacaaaaaaaacaaagaaaaaaaaaaaaaaaaaaaaaaaaaaaaaaaaaaaaaaaaaaaaaaaaaaaacacgaccatcaaagaaagaataaaaaataacaggcacaagcattaaaaaacataggcgccttctcgtgggggcgccttatgtttacatattcttgtttgccataagcgggaggtttgcttcagctgcccctagtatccattcttgtgcccctcctttcccattccttttgcgtgaactccgggggctctatcctagttcaggccgggtgcccctgcccccct

SEQ ID NO: 14059 - DNA, 467 bp, Zea mays
  Clone ID: MRT4577_112812C.1
ggttccagaaccgcaggtgccgggagaagcagcggaaggagtcgtcccggctgcaggcggtaaaccggaagctgacggccatgaacaagctgctcatggaggagaacgaccgcctgcagaagcaggtctcgcagctcgtctacgagaacggctactaccgccagcagacgcagagcgcggggctggcgaccacggacacgagctgcgagtcggtcgtcaccagcggcccccagaacgtggccgcggtgctgccacaagcccagccgcgcgacgcgggccctgccgggctcatgtccatagcggaggagacactgacggagtttctgtccaaggccaccggcaccgccgtcgagtgggtccagatgcccgggatgaagcctggtccggattctattggaatcattgccatctcgcatggctgccccggtgtcgccgcgcgagcttgcggcctcgtgggcatggagcct

SEQ ID NO: 14060 - DNA, 250 bp, Zea mays
  Clone ID: MRT4577_112813C.1
cccgccggcacgggcccggccggaacggctggaccgacccacgtttttatccacccgcccacgccggcggccacgggggggccattgcgaacatccactcgtactgaacccaacaaacacaacaggaagcaaagccaacgaaagagaggcgaaccggaggagcgccacaaggaaaggacaggaccgaaccaagaacacacaggaagccacacaaccagagcaacaggacgcaccgcgggaagagagaaca

SEQ ID NO: 14061 - DNA, 599 bp, Zea mays
  unsure (1)..(599): unsure at all n locations
  Clone ID: MRT4577_112814C.1
gtcaaatctatcacgcgggnaaanacctctaacctaccacaaacttaccttccaattaatcccttcgatcctaggctgacagatatctcggtttttgatgatgaaccggagatcgaccgacgaaccggaagtgtggtgacgaagcttttgccgagccagtcacgacgatgttctgggttgtctcggaaaatgaatggacggtgagaaattttttgcctgagttgtcgctagagttggggaggcagtcgaacttcgatgagatgatcatgacgacttatggctgcgaccttagctgacggcgggctattgtggcttggatggaggcgacactgctgcgaggctatagatgagatgagtctatggttgatggcttgaggtgttaagatgacacatatttatatacgcaaggagctctcttcgtagctttggtggttattgcttcagcctcgatggcagcaacttcagcttcggcttcattgtgtttaacctcaattattacatgtgaagtagaaacttcgcagtaaaagttagaaaagaattatccccatatgcacaaaatggtttagaaaaagcaaaaaaaaaaaggcccctttggcttc

SEQ ID NO: 14062 - DNA, 306 bp, Zea mays
  Clone ID: MRT4577_112815C.1
gggccccaattcaaaaaattttaaagcccaactttggttaaaaaaaccaaattcccttccccaaaaaccaaatggggaattttgatgcccccccccctttgaactacatacaatttattacaatcccccttattttcctgagggggcccccgttttcccttttgtttaaactcccagggccaaaacaggctttgtgcccagcgcttccacatttccttggttaaaaacaaggaaaaacaaacttttgggtttttggctcccgggcaattccattcaagaagttcctttaggtggcttcggtttccc

SEQ ID NO: 14063 - DNA, 711 bp, Zea mays
  unsure (1)..(711): unsure at all n locations
  Clone ID: MRT4577_112816C.1
atatgaatgttcctttctatatttctgaaaggancaacgctggaaagcaaggcattagctaggcatcatctgaacttcatcaaaattcaagatttccagtgtactgggctaaaaagttaccagcaatataatgtatatatacctggaacttgtatcgcggtacgtttcaaatgtaaataagttccagtctgaggcacaccgtacccttatttaaccccaaagctgtctcggatttaagagagaagatccatgtcagtatccacgcacagaccagagctacaattatggccacaggtccacaactccagtgtcatggtctgataataggtacggtatgtatgaagtgtttgaacaccgtatatttctatagtatcccatttggatgtagatattgggcacaaaattaggaattggaatcagcttttctagaattctgttgtttggttgcacgtagaattaagatttggaattagagactcaattccatgaaattggactataactagaaccttcatctcccaatacagagcatcactcctctgtattgtgtgaaattggaccacacaatttcaaactctaattcagtaacattcaaatgacagaattggaattatatattatttcaataccatggctgatttgttattgaacccaatttaattccacgtccttcaatatcaacatccaaagggagtatagatgttttttcgt

SEQ ID NO: 14064 - DNA, 467 bp, Zea mays
  Clone ID: MRT4577_112817C.1
tagatagatagaccgccgactcagaatgcaaccttcctacacccagataccgaaacttgaggggcggtgacatggtgggtatgatggatcatctatatagggaggagcttgtggagatcccgaccagctacagtgcccacctgaacgcctgcctgcgatgacgcctcggcaagacctaccacccgatgcacctagaactgctgacaaagactgcccgtcctctcacagcatggacagagagcgccacaacggctgctactgcacctcccccaacttcactgaaagtatctctctgacggacaccagaacgacctcgctttatgaccagagattgtataatggcttacatcattccatgcgtgctatacacttgctgtgtcgtaggagcttacagaagagtatcaaggcaatttggctagacaacaacgcgaccatatgttgctcccccaacaagtgtgataagacct

SEQ ID NO: 14065 - DNA, 256 bp, Zea mays
  Clone ID: MRT4577_112818C.1
aaataaacaataactcgggggtggggggtttagccaaaaacgaagcccccacccccaaacattgaaaccaacaaacggaggatgacgaacgacacctcgcacgagcggaaagctgctacctgccaaacaagggagtactgaccaaagagcaaggaaatcaagcctgccaaagccggacgtaaatcggccagccatgatctgacacgaacaaagcattgtcacaaggcaaaacaaaggaggaggggcaaggttcaaa

SEQ ID NO: 14066 - DNA, 731 bp, Zea mays
  Clone ID: MRT4577_112819C.1
tccgggaaaaaatttgtttcccctgcctaggccgccgccggggaagcggggaaaaagatcccgtcccaatggctctcctcccccaaatcctccactctcctcaccccgcgctcgccgccgccgcctccccctctcgcgcattctgccgagcaccacgccacctccatgtctccgcgtcccggggccggggccgcggccgcctcgccacggcggcgggggcgtccgggcccggaccatcgtcgccggagccatctccccctgagtccgacgacgggctggtggagctcccgctgttccctctcccgctcgtgctcttcccggacgccacgcacgcgctgcacatcttcgagtatcgctaccgcatcatgatgcacacggtgctgcagaccgacctccgcttcgggatcgtcttcgccggcaactcggggtccgccgcggaggtgggctgcgtcggggaggtcgtgaagcacgagcgcctcgccgacgaccggttcttcctcatctgcaagggccagcagcggttccgcgtcgcccgcatcgtgcgcaccaagccctacctcgtcgccgccgtgcagtggctccaggaccgcccgcccgccgagcccccggcacccggggaggacgccgaggcgctcgctgccgacgtcgaggccctcatgcgggacgtcatacgcatcgccaaccgtctcaacggcaagcctgagaaggaggtcggggacctgcccaggggc

SEQ ID NO: 14067 - DNA, 293 bp, Zea mays
  unsure (1)..(293): unsure at all n locations
  Clone ID: MRT4577_11281C.1
gcgtccggngagactggtcacagcagataacataaattcagcttatgcaattgctcgacaatgacgtgtactggacaaagatcgcgtagggaatagaaggaccaaacttcatagagaaaagcctagcgtgaactctattgaactgcttccaaaactacagggaatggccccatcataagcacttgacgagcatgcacttagtaagcatttgcgcacaacattcaatgatgttgctgctgatactggtgacggaacaaatgatgcttccgcattgtataaaacatatattgaac

SEQ ID NO: 14068 - DNA, 1901 bp, Zea mays
  unsure (1)..(1901): unsure at all n locations
  Clone ID: MRT4577_112820C.1
attttttctttttttttttttttttttttttttttttttaaataagtaccattcaatatatcataaataaacattgtcaaacaatgcatacataagtgtactctaaatctaaactaaaatacaactgtttgcactaatgttaagcctaactttatatgaattaaagtctccacacttttgcgaccaccaaatttgaattctattctatgttttcctgtacaacaaataggagaaaactagacatagcaaaaagctccaagcagcacatggatggtctcaaagctgcccttgtgcttctccctgttcttgatgactcctacacgcccggtgttcctcccaccagtcaccatgaccacgttgccgacgtcaaacttgatgaagtccatgatcttgttggtctccagattgatcttgaccaacgcctccattgcttcgtatagttgcagatacactttcttttcttccatctttttagctctttcctgccttctcgtatcagcttcgacaagagactcgagcagctcctgttcctgaagtgccagatttagcaatcgttccaaggttcttaataagatcttccttggtcataccaatacccctatcccgaatggagaggattttcttctctttgtccaacttaatctgaatctcaagctttgcagtgtccccttcacccagaacttccttatcagtaagggaaaggaacctaatcttatccagcatcagaggcattagatatgagctccctcaggaagatatccttgttgctgtagagtgagttaatgatgatgtccatgagtctggaaacctcagcttggaactcaaacttctcggctgagctcctgagagtcttcctagagatagactcggcttccctctgggcaacctcagagtcggtggacaggccatgagggacggcaccaagcttctcctctaccttcggtgggttagccaagtcatcgctgctctcctcggcattcacttgtagcttcttagattggatcgaagagaccaggagccgctcacctcccccatctagcggcaattctagacgcgagatttggctgcagaaccgctgagcttagcaacatcctcttctattttagagaggacttccttccgcttgtcatcagcagcattgagaaactccttcacaagaggattcaagcttggcacaagcccagcctacacaacaacaaatgaacagaatcagacagacagttcaggagcagcggttcctcgatgatggcttttggagctttgaacaggtccccttctcctcncaggtcatattctgataccatggatggttgtaccaagttccccggggtgaacaacgttcgtgaccgaggctgcgcaagcgcgacgtgctgctcgacaaccaccaaggtgnctgctgcagggagggaaagaacatttgcctgcaccgtggggaacagatcaccaacatccagggggaacgccatggggagggagcaagggagccgagagggaggaaacaccatgggggttggacgagctgnatacgcgcagaggtggaaaagagggggcgcgagcaggaagatgggcttggccaccaagaagggctgcaggtcgtcgtgtccatggctgaggggaggggcgagctcagcgacggcgtggagaaagggctagagcagaggatgggcgagctcgactggggcgctcggggaagcggtgccaaggccgacgctaggaagggcgatgcagcggcgctggccaccggcgaggacgcggccgggtggaggtccgagcaggggatggatgccgtggcaagagctggaggcgagggcttggggatccgagttgagaggatggtgtgctctgctgctgggcggagagggcggctggaagatgagcccaggtgagcctcgtgccgaatt

SEQ ID NO: 14069 - DNA, 692 bp, Zea mays
  unsure (1)..(692): unsure at all n locations
  Clone ID: MRT4577_112821C.1
gtgtccgcacaactctcctttgtgttcagaaaaaagtccacttctagattttagggccttcttgctaccctaaagtcatctttcacaacaatctggtttatagagacactgatgttcaggaacctaaaatataaaagcaagcccctgtatgaaaattatggttctgttgcatgctgctcatggcatggagatttggctaaagttgctggaccaatcatgtagaagacagaagtacatgtgtttgtgttttccagttttgagtatgcggaccaatcatgtagaggaattgtggtgttgccagctatttatgcagctgacagcatttcatatatatatatacatatattatatatatacatatattattttgcaggtatctcttcttagaaccttaagatctttgaagcatcgattggctgcaggtgaatgctagattttatttaaaaaaattatattagtgtgtttatcctactattttccattgaatcaaagaaacaaagtatacatgctttgcagtaccgacacaggacaaatggacatggtgtgagaaacaataatatggagggtcaatggattatttgtgcttctgacattntgtttagattgtaaactatataaatacagaatattggccatttgctgataggcgagctgnacaaatattctggacattntntctgagtatactactg

SEQ ID NO: 14070 - DNA, 501 bp, Zea mays
  Clone ID: MRT4577_112822C.1
gtactccacccaccctgagccaatctcgcctctcctcccctcccctcgcctccccctcccctggcggtgccgacgtactccaccaggaaggaaagaggatctttgaggcgtggcattgatgggagatgaacgaccggtggtctttgaacatcctggtgtggaattgccagaaattcacggacatgctgcggcgcttcgacctatcccacaaccagctcttctacccaacaccacaacaagcaggtaacatgccaaggtgctgcctccattgacaggatatgcccgacaagtgaccctatcaagctaactcctccgagggagtgctgcacaacaagaaaagcaactcgatgcatattctgccgccggaacctatgtagtgcatgataccatcgagatggggctagactcatcacgatctatgccactagatggattgattccctctcactgaaacatggctcttcttcaccgacagctccgcgtgcatcttctgcttcgatg

SEQ ID NO: 14071 - DNA, 1984 bp, Zea mays
  Clone ID: MRT4577_112823C.1
attgaacaacattataattaatataatataaataagtaccatttaatatatcataaataaacattgtcaaacaatgcatacataagtgtactctaaatctaaactaaaatacaactgtttgcactaatgttaagcctaactttatatgaattaaagtctccacacttttgcgaccaccaaatttgaattctattctatgttttcctgtacaacaaataggagaaaactagacatagcaaaaagctccaagcagcacgtggatggtctcaaagctgcccttgtgcttctccctgttcttgatgactcctacacgcccggtgttcctcccgccagtcaccatgaccacgttgccgacgtcaaacttgatgaagtccatgatcttgttcgtctccagattgatcttgaccaacgcctccattgcttcgtatagttgcagatacactttcttttcttccatctttttagctctttcctgccttctcgtatcagcttcgacaagagactcgagcagctcctgttcctgaagtgccagatttagcaatcgttccaaggttcttaataagatcttccttggtcataccaatacccctatcccgaatggagaggattttcttctctttgtccaacttaatctgaatctcaagctttgcagtgtccccttcacccagaacttccttatcagtaagggaaaggaacctaatcttatccagcatcagaggcattagatatgagctccctcaggaagatatccttgttgctgtagagtgagttgatgatgatgtccatgagtctggaaacctcagcttggaactcaaacttctcggctgagctcctgagagtcttcctagagatagactcggcttccctctgggcaacctcagagtcggtggacaggccatgagggacagcaccaagcttctcctctaccttcggtgggttagccaagtcatcgctgctctcctcggcattcacttgtagcttcttagttggctgcagaaccgctgagcttagcaacatcctcttctattttagagaggacttccttccgcttgtcatcagcagcattgagaaactccttcacaagaggattcaagcttggcacaagcccagcctacacaacaacaaatgaacagaatcagacagacagttcaggagcagcggttcctcgatgatggcttctggagctttgaacaggtccccttctcctcccaggtcatattctgataccatggatggctgtaccaagttccccatgactaaaattgactgtggatacgacgacgacagactacatgtttaggcatttcggcgaacacatgacacgtgaggtatgacaccaatggttagcggggtgaacaacgtcgtgaccgaggctgcgcaagcgcgacgtgctgctcgacaaccaccaaggtgctgctgcagggagggaaagaacatttgcctgcaccgtggggaacagatcaccaacatccagggggaacgccatggggagggagcaagggagccgagagggaggaaacaccatgggggttggacgagctgatacgcgcagaggtggaaaaagagggggcgcgagcaggaagatgggcttggccaccaagaagggttgcaggtcgtcgtgtccatggctgaggggaggggcgagctcagcgacggcgttgagaaagggctagagcagaggatgggcgagctcgactagggcgctcggggaagcggtgccaaggccgacgctaggaagggcgatgcagcggcgctggccaccggcgaggacgcggccgggtggaggtccgagcaggggacagatgccgtggcaagagctggaggcgagggcttggggatccgagtggagaggatggtgtgctctgctgctgggcggagagggcgactggaagatgagcccaggtgagcggcatcgcagggataaggagacggctggcttgaagatgaatacgtgaatgatttggctgggagcaagtacgaaggg

SEQ ID NO: 14072 - DNA, 161 bp, Zea mays
  Clone ID: MRT4577_112824C.1
aaccccggggttgacccacgcgagatgtagcccaccccagcgcctgaatcaacgggcggggagacaacgaacaggcccggaaaaacaggcagacagccaaagagccgaccagcgaaggaaaaaaggacaaggcacaacgagacaaggaagccacaacaacg

SEQ ID NO: 14073 - DNA, 323 bp, Zea mays
  unsure (1)..(323): unsure at all n locations
  Clone ID: MRT4577_112825C.1
ctaggggttttttttttttttttttttgtaataatgatttatatattattntgtttatgaaatgtttaatgtaagtaagttaggagaatagtaaaagaaaaggaaataccaaagaaaacatctggaggagggtcataaataaggggtgaattagaaagaaagaagaaaaatcaaaaatatgtatggcaactgaagtataggacgaaataaccactaatatatatattaggagcacaggaagcccttgagggacgctcttcccgcagtatttgaggaaaaaggtgagcttgacggggacgttaaggttgaagccgagtaagtat

SEQ ID NO: 14074 - DNA, 669 bp, Zea mays
  unsure (1)..(669): unsure at all n locations
  Clone ID: MRT4577_112826C.1
ccccgcgtccgattccatcccctcttgccatgatggtggttcacacaaaccacacaacnnttccaacttcccacgtgttcagaaaatcaaaggaatggtccaccatgatgcgcttacaattaatgcctggctctgtcttgaatggaactccatcggaagctatcatggacagacacctctaactcctccccctcctacgaggttcatagcaatggcggcaccggaatctctttccctcagtacaacgatagctacatggtgcaaacattaggtgagctaaggcaggagctattcaaccaagtggtgtttctgtcttcataacatcttcagtacaacgatggctacatggtgcaaacattagggagggagcgaggacaaaagcgagtgataggatgacaggtaacacagcaaaatggtgtagccatgtttgaatatttaacgttgaaaagttatggtttcttttttcttcttgtttttaaaatttgcaagagacaataatgttgagatctatggaggtggaagctgccaccagatgagtttgtgatgttggacgcaatccattcccttgtgtggtggctgtaatggggaccagatgagtttgtgattttgagtaaggtattgggtgttctatgaaatttgcagggagatagatggaattatgggcataat

SEQ ID NO: 14075 - DNA, 163 bp, Zea mays
  Clone ID: MRT4577_112827C.1
gggttccggttaaggaaacacccagcacagtccagagagaaaagaaacaacaagtcctaccaagaagactcagccgagccatgatgacggccccggaaatgcaacaggtctatcattagaccaaccagcaggagacgcagatacaacgggtacactacttact

SEQ ID NO: 14076 - DNA, 126 bp, Zea mays
  Clone ID: MRT4577_112828C.1
acatgtcctgcaataacttccaacatgtacccgcgtgggcagaatctgcaggggccgtattttcattgcccctccgcctggcgagccagttggccctaagttacaaagaaggcatggaatccataa

SEQ ID NO: 14077 - DNA, 700 bp, Zea mays
  unsure (1)..(700): unsure at all n locations
  Clone ID: MRT4577_112829C.1
ggaccacagaacattgttgaatgataacctttcggaaaatccaccagggcaaacaaagactagaccatacagatgggcaaaaacgaaatactcgccgcagcacaggccgggggctaccccattggcggtttgcccctaacctgggnccaccaanaaaccttangcgggccctttggcccctncctcccttntccctcggccgccccccccccnnggcccnnncccgggcccccgggcgggccggccnnnncnncccccccccgcccccccccccccccccccnnccccccccccccccccccccccncccccccccccccccccccccccnccccccccccccgcccccccccccccccncccccccncccccccccccccccccccccccccccccccccccccccccccccccccccccccccccccccccccccccccgcccnccccgcccccccccccccnccccccccccccccncccccccccccccccccctcgncccccttcccccccccccccccccccccccccccccccncccccggcncnccccccccccccgcccccgccccccccccctccccccccgccccccccccccccccccccccngccccccnccgccncccccccccccccgcgcccccgcccgcccgccccccgctccccccccctcccccccgcgccctcccgcccc

SEQ ID NO: 14078 - DNA, 401 bp, Zea mays
  Clone ID: MRT4577_11282C.1
cttgaatgtcagtcatgaagaaatcgacgtcagccatcctgatttctttagcagcgctaagctgaatggatacaccccacccaataaagaggactgtggacagccaggattcaccccagcagagagacggcgttttggcaacatattattccagattttatggaagtgaccactgccctgtttcgcttgagctttccgaagctgtagcagaagaagcaccaggacagcccaagccagccatctaaatataccaccatggtgatggtcattgttgagacatttccggtccttcattaaacctgactgtcccatgcattgcctactctaggtagctgaggtttgattgtaggtattattatgatcccagcaggttagcagttctgtggtcagggctggtatag

SEQ ID NO: 14079 - DNA, 759 bp, Zea mays
  Clone ID: MRT4577_112830C.1
cctcgaggccggccgggctgcttctctctcttccctcccttctctattctgttcccctttcccccctccttctccctcctcgccaacccggtagtaaccccacccaccgcccgcctccagcctcgcgggtccccgccccgccttgccggaaccctagctccggcgcgtgccccggcctccccagccacctatcggttccgggggccccgcgcccctcggctcgatcgcgcgagatccggagccgccgccggccgggcgcagaagccatatgtcgggggtcggcagcggcaggccgccggcagcccagaagatcctgcagtccctgcgaccgccgctgtccttctccacgccgtcgcggccacccttcgccgcgcccgacgactaccaccgctttccaacgccggctgcggccacgtcccccgccgccacctcaggcggcgttggcgcgggggctgctcctcctgatactgtcgaggaggggctggtcatacggactccgctaaaaaggaaagccacatctgaagaaaatgctgctgctgactcaagcagttgtatcattaccagtccaatgctcactccggtctctgctaaaactgttaaagcttctaaggcaaaggctaagaacagtaaaactgggcctcagacacctacatcaaatgttggttcaccactcaatccaccaacgcctgttggcacatgccgctatgacaattcactaggacttctgacaaaaaagttcattaacttgcttaagcaagc

SEQ ID NO: 14080 - DNA, 428 bp, Zea mays
  unsure (1)..(428): unsure at all n locations
  Clone ID: MRT4577_112831C.1
cggcgaggggtagggcancggcacatcgtctcggcagctcacatagaaaccaccgcccttggcggcacatcgggctcgaccatcctgactccatcanccgttngcctgtctgttngttctagggaccaagaanngagcagagatgatcccatggatgcgagccagagggcggggatgaatgaggatgtagcatccacatacggcgtctgtctgctgaaaccccatacgcgcctgcttcttcaatcccggtcggcgtacccggcatggtggaagggtacttctcgcccgagtgggtgggaggctcgtcaaccaccaccgcctgtgttccgggaccaactgcttctcggcaagcgccaggcttccacgagggccgtcctgcgacgacccgtcgccgcgcttccttccccgacgaacctnctcgacaccaa

SEQ ID NO: 14081 - DNA, 455 bp, Zea mays
  Clone ID: MRT4577_112832C.1
cttcatccagtatcaaggggaagttctgttgttgtgtgttcggtgatggatacatccaaaagcaagcaaggaccagaacatctccttgttcttgtccatggtatcatggctagccccaaagactggacatatggggaagcagtgctgaagaggcggttgggtgatgattttcttatctttgtgccggctcatggggggggggggggctttgttgcgtgctcgcgacccttgggtgctctggtcggcctccggatccttacccctctgctcaatttccagaacgagtactgcgtggggggttctcccaagacgctggctgtcgtttagggtggccctctcatctcttacgccggaagagctcagcttttggagattgtccccgtgcccgctgtgcgtgttggtgaactttcgtcagtcgcgaagttgttgatgttctccactaacgtctcgtgggt

SEQ ID NO: 14082 - DNA, 547 bp, Zea mays
  Clone ID: MRT4577_112833C.1
aacactgccaagttaaagcgttcttgtttggcaggaatgaaatatagaagcgtcatttttcttctcgaatcatgtcattgtcagtaaagtacctaaagcacgatttgggtcagaccagcacggtaggccacgagcaagatctaaacacgttctgtcagtataatcgtgccaggcagacccaagacatttaaattacaaaaataaactaaaatgatcgcagatatgggtttagctccaaacatacattgacacccacctaactacactccattccacggaaaccttgctcatggctagatcccacacaggatcagaaaccttgcatcgtcggcagcagcagatgctctaccaaaacaagagcagcaacacgagatttgctgctggcagacatcacatccattgtacggttagtagctctggaggatggcggtgggttattgcgaggcctccttttgtcattcaacttccattctccactttcatcaggaggttggaggggggatgctttgctgcatagaccaatccagtacccccgtccatttgatgc

SEQ ID NO: 14083 - DNA, 1098 bp, Zea mays
  Clone ID: MRT4577_112834C.1
gtcctaaatgacttctgtagccatatgatcatcccctattgagcagggagtgtatatgcatgtagcaataataaatgtttcttgattgcttgcctcacacagtggtcccggatagtcatcagattcagatcatagttagatgaattcaaaatcttctgcatacattatttattctttgctacacaaattttctttccttggatatttcttggaaatgagaccttttctttttggacaactgcagtataataatatattggtacagaacatgtttcagtttcatgtaatgtgttatctattctgaactatgaaacatccagaactgtgtatagatccatggtccttgtggattagttgtaggatgcttgataacctgatccatactcttgtaggttggtaatgtcactggcagttgaggtgctagatctcatgcttacaccagaaaacctgtcacactcaaggtttagtataagtcagctttgtgggtttaatgagattgaatcccattcccttaaatattagctcaaatattgtcatttcactcagtaatcttttcactggtagctgcaaaaccaaatttctcgtgtataagcatagtggagtcatgaacccacgatggaatgtgttcttgtcttcctgaattaaacttatctgcactgcttgttgatatggtgtttgtatcaaacacattatagttatagtacaagactacgatacctaacataggagtgaagtatcgttgtaattcatattacttggtgtaggccaaatccagatagagatgcatcatgcatgtgcatcgttataaaatcaaacacagtttgtggcacagtttatcatggttgggccatttctgaatatgcaaactttataaactgggtgataggttcttttccttgtgcaaacattaacatttgggatgttttcattatgaggttgacaggttgttcacctttatcatgtgcttagtgagttttgcactattttatctcttggtgcaaatctatatcttaaacaaatggcagttgaaagcatttgaatacatttcattatttgtacctgtccaggttgctcaaaagaacagcttggacattgatg

SEQ ID NO: 14084 - DNA, 309 bp, Zea mays
  Clone ID: MRT4577_112835C.1
gccaggccctcttggggcccaccgtgatcatttttttttagtccaccgccgccgctcctctccaggggctcaatgtcaccgccagcctgcccatcgcccgacgttcctccagaagccttggcaacttcagaatcggcggaaggatcctgtgcatgcacgagtggccggctctccgtaacaagaagttggagacgctgttttacctccctccgttgtctatagacggtctggtgcatcaggtcgactaccctgctgttaacggttggatactctacctacagttgagcatggtccgttttgtgctccgag

SEQ ID NO: 14085 - DNA, 215 bp, Zea mays
  Clone ID: MRT4577_112836C.1
acattacaaaactacatactccatacacacgcactactaatcatattacaaaccattttactacctatcaatattcatatatacccccgacacttaccatccctacacttacatactacactttgaccttcagaccaccctacatacatcacatctagacaacatactctatgaccccctcaatactttctactaaatacacaattaaattcccc

SEQ ID NO: 14086 - DNA, 406 bp, Zea mays
  Clone ID: MRT4577_112837C.1
tttttttttttttttttttttttttttttttttggtggtttttggggccatatggggataggaaatactttgcatactgaaggaagaccataatcttttttttgggtaaggatttgccacgactggcaaattagttcccttcactgaaaaaaaaatcaacattgtttgtcttcaggcaaagttgcggagtttttcatgggggacacggtactttgtccaaaccggtttgacaaaaaaccaagggcccttgaaaaaattcgaagaggctacatccaagaacaaatacaaaccaggttgtcagatcttccacctaagttcgccaaggggatgcccatccatagcatcttgaattcttgtcacaccccctgcccttctccggttggcttgctcattgttcgcgtggagg

SEQ ID NO: 14087 - DNA, 2718 bp, Zea mays
  Clone ID: MRT4577_112838C.1
atggcggtcctgcaagggattcctgcattggagcttcctataaactgtagcggcaatgctcagcttcaaccatcctctttgcgcccgccccacccccagcagcatggtggaggccagcatcagcgacctccggcagcggcaacctaccaggaatttctgagcacgcagccacccttattcaccaaggcagaggatccattggacgctgacgtgtggcttcgcatcgttgagtccaagtttccccttctcacgggagactgccctgatgatgccaaggctcgcttcgccgcacaacagcttcgtggccctgctcggacatggtgggaccacttctgtgttatgctacccgctgatcgcgaagtgtcttgggaggaattcaagactgctttcagagggcaccatatcccagctagaattcttgatctcaagttgaatgaatttctggcactcaatcaaggaacccgcacggtcttgcagtacgctcaggccttcaatgacctatgccagtatgcaggttaccatgctgattctaatgagaagaagagagaccgctttcacaggggtctcaacaccaagctgcgggaacgtctcaacactgtccgtgttgatagcttcaatgagttggtcaacgtggccatctcccaggaggactgtattaagcagatgccagcaccaaatcaagacaaggggaggaagcagaaggtgcaagtcagacaagggaagctcaacttcactactctagaggagttacccgagggagcccccatcatgactggtaccttttcagtttttaatcaacctgctttaattctgtttgattctggtgcatctcatagtttcattagccagaagttcagtgctaaatgccaattgcccttctgtcatgcaaaagggtcatatatgataaccacacctgggggtaaaactgtaaccaaccaattaatccgaagtgtgcctattcaattgggaagccacattatcaaaaccacccttcttgttttgggtttggaaagtgtggatattattctgggcacaaattggatgaccctgcaccaagtagtgcttgatgtagccagccgcatcgtggaagtcaattccttgatatgtaggagtttcaccctgtttttgcccagtcaaggttctactcagtcatgtgctttctctatgatggagttacctctgaagaagattacagtggtctgtgagtatgcagatgtatttcctgatgaattgtcaggaatgccaccagaccgggatattgaattcgccgagttgcaaccgggaacgacaccaatttccaagaggccttaccggatgccacccgctgagttagcagaattgaagaagcaattgcaagagttgatgtacaagggatttattcgcccaagtacttcgccttggggatgtccagccttgtttgtgaagaagaagaatgaaagcttgaggctgtgtatagattaccgccctctcaatgcggtaactatcaagaacaagtatcctttgcctcgtattgatgttctttttgatcagttggtcggagccaaagtgttttccaagatagaccttcgctccagctatcatcagatcaagatacgggcaagtgatattccgaagacgactttctcaaccagatatgggctatatgaattcttggtgatgtctttcgggctgacgaatgcaccaacatatttcatgtatctaatgaattatgttttcatgccggaattggacaaattcgtagtggttttcatcgatgatatcttggtgtactcaaagaacgaagaagaacatgccggacatttgcatgtagtgcttcaatgtctacgagagcaccacctttatgccaagttgtcaaaatgtgatttttggctaaaggagatcaaattcttgggtcacactatctctcaagcaggtatagctgttgatcctgataaagtacaggaggagatgaactggaagccacccacgactgtccgtcagattcgaagttttctgggattagctggttattaccgaagattcattccggatttctctcaaattgcgaagcccataactgagctgttgaggaaagaagacaagtttgtttggggtcagaagtgtgaagatgccttccatgcattgaggcaacatctgaccacaacaccagtgttagtgcaacctaacagcagcaagccatttgatgtgtactgtgatgcctctggcactggactaggttgtggcttgatgcaagacaaccgagtcattgcttatgcatcaagagcactctggccctatgagcaaaattatcctactcatgacctggagttagcagcggtggttcatgcattaaaaatgtggagacactatttgatgggaacccactacaacatcttcactgatcataagagccttaagtatatctttactcaggctgatctcaacatgaggcagagaagatggctagagctgatcaaggattatgacctggaggtacattatcacccagggaaggccaatgtggtagcagatgccttgagtcagaagttgcaatgtaactgtgttttgatggattctcgtgttgacaccttgtgtgatgagttgagcaagatgaagattgaagtaattccttctggtgctttgtctcacatttctgttgagccggctttgcaagaccagatcttaatggcccagctcagtgacaagggagtgcagattatcaaggagaatctccattag

SEQ ID NO: 14088 - DNA, 430 bp, Zea mays
  Clone ID: MRT4577_112839C.1
agccaccatataaaccctggggagaaggccctgcctttttttctaacaaaatagatactaaggactgcctaaagtcaatttccagatattatcgagcacaattcaaaccaatttgggcaaaacgcaccacagggagggagtggaacgcagcacgcctgcataaggtggtacaccaatcaacatatcacaagtgcccgctacatcatatccagcatagccatccgttacttctttctggcaacactcgggacggacagattacatctatcgatcttcaggatcatatttaccacctgggatggcaagtcaagtatctgtctgtgctaaacaatcaggggctcacaagacgcacatgatatttcatgccggaggagccaacgtaaatgcagtctatgccacagagggggctgatttacttgacttgctgagc

SEQ ID NO: 14089 - DNA, 287 bp, Zea mays
  unsure (1)..(287): unsure at all n locations
  Clone ID: MRT4577_11283C.1
aaactcanncacttttaacttcnattttacctannaatnttcataaaatttnacanaaattnnctcanacttaaancatnacnaantttctaancaaaactccnctttnataacttncatanttccacntccacnnccacccccacctcaaataaatatnnanaaaatctanncananaatnncttnancancaaanataacacantcctttacaccaatccttcttaagcnnacnnnatctccacctcnccntcnncaatctccttcttcannnccttnnnntcct

SEQ ID NO: 14090 - DNA, 266 bp, Zea mays
  Clone ID: MRT4577_112840C.1
tttttgacgcgtaagtcctttctgccagcgggctattcttaaccctggcaccctcttacaacttgaacaattgctgacattcaacacaactggctttgacaaacccagcagcatttctaccaacatccgatcattgctggtgccctcttttagatttcttattagttatagttcaataataaagtttcttgtcttatgtttgtggttactcagaaataagaaattacatttctctaaaaaaaaaaataaaaggtctgtccttctat

SEQ ID NO: 14091 - DNA, 487 bp, Zea mays
  Clone ID: MRT4577_112841C.1
tgacaaattcgtagtggttttcatcgatgatatctttgtgtaccctataaacgaagaagaacatgccgggcatttgcatgttgtgcttcaacgtctgcgagagcaccatctttatgccaaattgtcaaaatgtgatttttggctaaaggagatcaaattcttgggtcacactatctctcaggcaggtatagctgttgatcctgataaggtgcaagagatgatgagctggaagccgccaacgaatgtccatcagattcggagttttctgggattagctggttattaccgaagattcattccggatttctctcaaattgtgaagcccataactaagctgttgaagaaagaagacaagtttgtttggggtcagaagtgcgaagatgcatttcatgcattgaggcaacatctgaccacagcgccagtgttagcgcaactcgacagcagcaagccatttgatgtgtattgtgatgcctctggcactggacta

SEQ ID NO: 14092 - DNA, 1023 bp, Zea mays
  Clone ID: MRT4577_112842C.1
cgggtcgacggacgcgtccgggagaaagctgtattatctatccagaagaacttcaggtgctggaaaaaacgtaaagaattcctgaagatgcgaaataatgttgtcaggatacaggcccgggtgcgagctcatcaagaaagaaacaagtacaaggaattgatttcaagtgtcggaatccttgagaaggtgatgatacggtggtaccataaaggtgttggtctgcgtggattcaattctggggcaatgacaatcgatgaagaggtggacgaagacgttgccaaggtcttccggaagctcagagtggaaacagccatcgatgaagctgtttcaagggtatcatgtatcattggtagccctaaagcaatgcatcagtaccgaaggatgctcaataggtaccaacaaacaaaggatgatcaggagaagtaatgcttgtgttaaaccaacagtgatggagcaaacagcaaagcacaagccacccactatttatttatctcccttactgaagcacaagccttggtgactgaatggacagtggatcccgagtaaaactgaaaatttcttgggtgaactagaaccagctccaattcatgctggacgctgtttgagtgtacacagcaacgtcatgtgcaatagctgacttctggctgaaagttggtaaaggcgatgacttagtggtatatgcagaagcttccaaaagcctgatgagcaaggtagatgaggtctgagaaacactgcattcgatatatatatgccttatgtactaccttcatgcagtaggtttgtagtaaatttgtgcgtaactcttcttctgcgtattccagaaaaaaagtttgtagtaaatttgtactatatggtagtaaataggggtcaactattgtaatttgtagcacaatgaatcttgtaagaaatctcagtttagaaaccctccatcttttacacatgggccgatgacgaccgatgatcaattttgccagataatacaaaaaaaaaaaaagggcggccccgactagtagctcgcgaccg

SEQ ID NO: 14093 - DNA, 231 bp, Zea mays
  Clone ID: MRT4577_112843C.1
tataggggaattgggtctctcagcggcgggggacccaacatctactgctgaatcatctccatcaacccaaacactcaataactaggatccagaaaataatgaagaggcgaaggatggcgtcatcgtcctccctgttgctcgtgcgggggcgcttaatggcgggccgcccctagacggagggaccgcatccaaaaagaaagcgtggtccagagaatagacagacccggcaag

SEQ ID NO: 14094 - DNA, 1288 bp, Zea mays
  Clone ID: MRT4577_112844C.1
cgggcatcattcaaaaagcactgacgggagaagcttgagctagctacgccaatggctatagggcacaagaacaccaccaaagtggcgctcctagttctgctgctgtcattgatgctctctttgacagcgtcagtggcgcgcaatctccaatggcgactgtccgtcgctacggctgtggaggtgtgcgtgaaggctgctgtcggggctcctgacaagcttggcgactgtcccttctcacaaagggtgctgctcactctggaggagaagaaggtcccttaccggatgaggctcattgacctcagtaacaagcctggatggtttctgaagatcagcccagagggcaaggtgcccgtgtacaacagcggcgatggcaaatggattgctaattctgatgtgatcacccaagtcatcgaggagaagtacccagccccgtctctggcgacgcctccagaatacgcatcagtgggatcgaagattttcccatccttcgtcaagttcttgatgagcaaggatgccagcgacgacggttcggaagaggcacttgtgcgtgagctgcaggcgctggaggagcatctcaaagcccacgggcgtccctacatcagcggggagagagtaacagccgccgacctcagcctggcgccgaagctcttccacctggtggtggcgctggagcatttcaagggctggaaggtgccagaaagcatgtccagcgtccacgcctacacccaggctatgttcagccgcgaatctttcatcaagactaagcccaccaaggagcacttgatcgcgggatgggcggcgaaggtgcccaagccgcccaacctcgtcgtgccttgctggctcatctgatcagtcgcagtcggtggtgcgttgctggttcattatgattgggttgggatacaacaataatgcagcgtgccatgttccgatcacttcccagttgtggtggccatgtttctatatcacctaacgctgccggttaggttcgggaccgtgggcatctgcatcgatctttttcttttcttttcttttaagattacacaccataacatggccttgtgcatctgcactcgtgatgggcatatttgtgacgtggaaatatcttctttcttaagcgcgcgctagtgagaatgttgggcgcaaagtaggcgcgcattacatggtgtggtcgtttgtgcgcacgatgtgttccgattccgatctctcgtggtggtaatgcgatgcagatattattctgtctgtcagtttatataattgctgtttttctctaataaaagaaagtttaatt

SEQ ID NO: 14095 - DNA, 152 bp, Zea mays
  Clone ID: MRT4577_112845C.1
attaaagcggcagcacgtagagcacgtcgcggccaagacgagcagctaagtaaaccgtatttgtcccgcatgatggtcttccttccgtaaagtcgcctcacctagatccgggcacgtcgtacgttccccttttccgccgcagtgatggtgta

SEQ ID NO: 14096 - DNA, 816 bp, Zea mays
  unsure (1)..(816): unsure at all n locations
  Clone ID: MRT4577_112846C.1
atctctctgccgctccaggccggccgggatccccagctggccaagcttccccagctccctctcccatggcggtagtgctccctctgcctggtcgctcgctcttcctcaagcttagctcactgcgcgttgctctagctcgcggagcttcctagatcgcccctccgcgcaccacttcaagctcgccggcgttcggaccgcggcttcctcctccagctccggcgcccggcgtttctcccaggcgcgccccctgaattccctccaccacgccctgccgagattcccccagccgcgcactccttctctacgctcctctctctctctcccagcgctccctccctgctcgctcctccctcagctcgtctctctctctccgctggtcgcgcccttgccctgcttccatggctgcgcgtccctctactagccgagcttcctgtacgcccagagcgtgcccagctgtgaatctcccatggcgcgcacatctccctgctcagtaatccagcgcgcgtgccttgctcctgtgcatgctcgccggccggagctccctagcgcggtcgcccatgccgtgcgcagccaagctcgccctgtgcgccccatctcccttcggatcccctgaaagctccttgcgcgggccacgttcctctactcggccatggccgcgcgctggcgctcttctctgcgcgcgccctgtcttttcccacgcgcagctcatcccaacgtcgagctcggccctgccctctgctccagctcgcccctctctacttgtcctcgctggtgngncagtctacagctcgcagtccctgcgttgccgagtccctg

SEQ ID NO: 14097 - DNA, 324 bp, Zea mays
  Clone ID: MRT4577_112847C.1
gccacgcgtccgcccacgcgtgcgtggacgcgtgggtcggatcccatacgatgtccttggttgccaactgctccaaagccactccaaacccattctagcagaaccgcctagaaactctacagctcctactgtacacgattcgatggccaaggaaccaatgcacgcgctcactactggcgccgcatggtaaattgagatatgcttattgagaccatcattggtaggcagagttatgcgtagcgcacaaccaccctgacattctgcacaggcttgactgcccaccagcaggtgatgcccctaatggccataagatggaatcggatg

SEQ ID NO: 14098 - DNA, 117 bp, Zea mays
  Clone ID: MRT4577_112848C.1
gcgccggcgcctgaaggcggagcacatggcctggagggaggatggcgcgctggtggcgtcatgcgatcccagctggccagagcaagcctgtctgttacggggcccggaacctggggg

SEQ ID NO: 14099 - DNA, 403 bp, Zea mays
  Clone ID: MRT4577_112849C.1
cggggggaccggaaagggaaaacaaaattccggggggccaaatgggaaacttttttgggaaagaggcccaacccccccccctaaccggaaacaccccccctttttgttacaaaatgggggcccaaaaagggcacccaaaaaaaaactttttaagtcacaagggggtaagccccccggggactcaaaaaaaaattcacctttggccaagggaggggccccccgctcctaataaaaacccaaaaaacccgggccagggccccctttcctttaaaaagggtccaaagtttggggttttaagggtaccagggggaaatataccagttccggaaccaatcgcccccaaaaatatacccaggacgggaaaggccccaagggatcccccaccaagaggccgggggggggg

SEQ ID NO: 14100 - DNA, 549 bp, Zea mays
  Clone ID: MRT4577_11284C.1
gctcttagacaaacaacatttcaagcagaatgagatgtccaaattgcactgcttaaatggcaatgatccctaaactataccagccctgaccacaggaactggtaacctactgggatcataataatacctacaatcaaacctcagctacctagagtaggcaatgcatggaacagtcaggtttaatgaaggaccggaaatgtctcaacaatgaccaccatggtggtaatgccacggccatgcatttcacatgaaactattctgtcctttaactgttccgaaacaaggaagtagtcgatcctcattctctttcctcggtacttgccaattggatgaccggaccaagagaagccaccgtctatgtccttttctttgtgcaggtgcctgtaagcatctaccagctttccttggaataatatgttgccaaaacgccgtctctctgctggggtgaatcctggctgtccacagtcctctttattgggtggggtgtatccattcagcttagcgctgctaaagaaatcaggatggctgacgtcgatttcttcatgactg

SEQ ID NO: 14101 - DNA, 458 bp, Zea mays
  Clone ID: MRT4577_112850C.1
cttgccaacgattttttttttgatttttttacttaaaataattaaaaaaggcataggactccggcccccacgaaaaaacagcaaagagtttttttcggggaaaaaagtggaccaaaagggcccattcaggtttatttaacaaatggtcggcagacctttaaaactggaaaggaggggcaataatgggttatttaaaccaaaaccaaggttccgtaccaaagttccacctttctcccaggaccttaagaacaaggctgggacccaattttcctcccgggggagcgtatagagggggggacaaagtctccccaggggggaccatcaatcggggaaaaaaacggttaaccagccttgtaaggcacttgtcccaaccgggggggcatcccattggggttcggggcttaaaccagaaaaaaaggccctgcatcccaaaaagaaggctttggtgaagcccccac

SEQ ID NO: 14102 - DNA, 488 bp, Zea mays
  Clone ID: MRT4577_112851C.1
gacttcaaacagctaaaaacaagagctggaggagccatcttgaacttgcacaactccccaataaaccgtatattttttatttttgtttcaatgttgatctgatccttcttatttattaaaaagttgaactcctcttcaagcatagacagaagcatacttggaacatctttcatacaagttgatagtgtcgcaaccaaacgagaatagtaaggcaacagttccagtgaagtcctattaacattgaataaggcacgcgcaagtttctttcgatttgctttagaatttaggtagcaaaactcaaccgtcaactgatcaatgagatcacgactgacacatcccggtagcctctgcaagatgttatccagacttgcaccgtccatggctcttcctttctccttctctctgtcatttttcttatccagatccttctccttagatttttccttttctccatcctttcccttctctttatctttgtcatcactctc

SEQ ID NO: 14103 - DNA, 600 bp, Zea mays
  unsure (1)..(600): unsure at all n locations
  Clone ID: MRT4577_112852C.1
ctgccgggngcctttcctgnctggtttgggttcagctngagagcagagatgaggttgtctgttcgtgtgatcgaggcccgcaacctgcgggccatggactccaacggcttcagcgacccgtacgtgaagctgcagctcgggaagcagcgattcaagaccaaggtgatcaagatgaacctcaacccgacttgggatcaggagttcagcttccttgtcggtgatatcaaagatgtgctcaagcttgatgtctatgacgaggacatcctccagatggatgacttcctgggccatttgagggtgccattagaggatgtgctgtctgccgatgacttgtcgcttggtacccggtggtaccagcttcttcccaaaggcaaaaccaacaagaccgtcgactgtggggagatttgtgtctcaatatcgttagaatcatctggagcatcacgatcatggtctgaggaccttggagatgaaattactgatatacagagagactattcactgtcaagccaaaacacggctccatctatttcatttgcttatcgagaaactgaaatttgtgaagaagacgatgagtattctgttacatctgaaattcatgca

SEQ ID NO: 14104 - DNA, 292 bp, Zea mays
  Clone ID: MRT4577_112853C.1
ggggcccccttgggggggaacaaacctttcttgtttgatcacccaacgggccattgttggtcacaaaaaaaataaaacttcctgcaatgcagttttggactccacctttatgttggccccttttttgggcccaaagaaaccaacccttgggccttcacctgatgtgccggacccggggttcggtttttcgaggggcggttcgggtttgggcattggccctttcacgagttgggaaacaacccgccattatggccaaaaaagccctcttcaaaacttggattttcccccggga

SEQ ID NO: 14105 - DNA, 2156 bp, Zea mays
  Clone ID: MRT4577_112854C.1
cccatttcgtctcccgttcgcccccgcgtgctctcttgtcgccactgccgcggccgtcgctctaccgcctctacgccaggtgcctagtcctgtcctcgccggtcccttcgccgagttttcatcgggtccttcgccaggtctccatcggtccggtcgcctgcgacgagcatccaccagctactgggtgaacatgggcacaccaatgtcgccgtggaaggggcggctgcgctctcaccacgcgaccgttcaaagtttgtccaagaggaggctcccttctcggaccaagaacccggaggagaaagagaagctccgaacatcgacgaagaaggctgccccgaagaagacggcgagaggtcgccccgctggagctgctcaacagcagccgatggctcgcttaggactgtcgtcgcggcatgctggaagagactctgagcatccagttgtgatagacgatgatgtaaacggggaatgtaacggcagggctgatcaatcagcaactacgcctctccgcaggtccccacgactacacgtggaagataagagtttgggcaagtcaccattgccaccaaatcgccgggagacctctgctaacagaaagactaaaaatgctcatagaaaagacaaaaatcaagagagcctgaaagggaataggggaagtgctggatttcctcctaggaaagatatttcagatgtatctaacaaaaagagtgacaagcaagagttaaagcccatccattgtaaagtgcaaacaggaaagaggaagagaggaacagaaaggaggttgttatcgaagaagcaaagttgccaggaccctgaaccattgcctgcgtatcgccaagagattgcaccttgcaatgaacccagaaaatctacacacagaaggattgaaaaggacccctctattgaggaatttgaggtgaagcttaaagttgctaatgagagattgacaaacattgatgaaaacatcaacaagctaagtgggaccgagagagaagaaatgggaaatttctgtggttctgattggacaaaagagcaggacatggcattgcgcaaagcttacttcagtgcccgaccatccccacatttctggaagagagtttcaaaaatggtgccagggagatctgctgaagactgcttcaacagaatttataatgacctctcaacaccgactccaattgcaccacgtcccagaacaagtaaaacaacattttctcctataggaaatttcacattgtctgatccaaagcttccaaatatcttggaacctacagtcggaaggcaaaagaccgctaaccaaaagagtctagtagcacagaagacagttaggcatttgttgcagaagcattgccgcattgaccaagctcaagaggccgaccacttctcaatttttgaaagctcaccaagtgccttacaattgaacttatcttttgaagattctcctggtactcctgacagttatatgaattcagattctctaggcaagcacagtggaagttcttcagcacggaagaaaccattttcaaggttaagaactaagccatctgaaccgagcccagcagttctaaagcctataaagaatgctatcttacatgagaagtacattgatcaattggcacgtagagaaggcacaaaaaggcctcgcagaaggactccagcaggctctaaaactgctgattctgggaagtctctttctgagcagcaagctggtagtctgaaggctgctaaaaatgctctcatctcagaagcaacggacttcataagcagttttaaggcgctgcaagccaattcccttgcacatgttgtggagaatagcgaagacgagattgaatgtgatgccagtgattgtagctatgctgataaagaatgaggaggtgcttacagtcttgatgcccagcggcacttagcaatcatttcctttatgtcaactgactttagtcatcacttatcagtgcctgttgctgcaataaggctaggcagttgtcagggctgtctattctgcctgatgctgtatttagttttgaacctcttagtgccctcagagatgttagttagttgtgaaagtgctaccttcatcgtgccttatgaagactgaaatcactggagattacaatggtcgaacctgtttctcttgtttgcataaagtagaaagcttcatc

SEQ ID NO: 14106 - DNA, 1594 bp, Zea mays
  Clone ID: MRT4577_112855C.1
aaagactaaaaatgctcatagaaaagacaaaaatcaagagagcctgaaagggaataggggaagtgctggatttcctcctaggaaagatatttcagatgtatctaacaaaaagagtgacaagcaagagttgaagcccatccattgtaaagtgcaaacaggaaagaggaagagaggaacagaaaggaggttgttatcgaagaagcaaagttgccaggaccctggaccattgcctgcgtatcgccaagaaattgcatcttgcaatgaatccagaaaatccacccacagaaggattgaaaatgacccttctaccgaggtgaagcttaaagttggtgatgtgagattggcaaacattgatgaaaacatcaacaagcccagtgggactcagagagaaggaatagaaattttttgtggtcctgatgattggacaaaagagcaggacatggcattgcgcaaagcttacttcagtgcccgaccatccccacatttctggaagagggtttcaaaaatggtgccagggagatctgctgaagattgcttcaacagaatttatactgacctctcaacaccgactccaattgccccacgtcccagagcaagtaaaacaacattttctcctataggaaattttacattgtctgatccaaaacctccaaatatcttggaacctacagttggaatgcgaaagtccgctaaacagaagagtctagtagcacagaagacagtgaggcatttgttgcagaaacattgccgcattgaccaagctcaagaggctgaccacttctcagtttttgaaagctcaccaagtgccttacaattgaacttatcttttgacaattctcctgggactcctgacagttatatgaattcagattctctaggcaagcacagtggaaggtcttcagcacgaaagaaaccattttcaaggttaagaactaaaccatctgaacccagcccaggagttctaaagcctataaagaatgttatcctacatgagaggtacattgataaattggcacgtagagaaggcgcaaaaaggcctcgcagaagggctccagctggctctaaagctgctgattctgggaagtctctttctgagcagcaagctggtagtctgaaggctgctaaaaatgctctcatctcagaagcaaccgacttcataagcagttttaagacgcttcaagccaattcgcttgcgcatgctgtggagaatagtgaagacgagattgaatgtgatgccagtgattgtagccatgatgataaagaataagaatgtccttatagtcttgattcccagcggcccttagcaatcatctcctttttgtcaactaacgttagtcatcacttatcagttgtcagctgatgttagtcagcacttatcagctgcaataaggctaggcagttgtcagggcagtgtattctgcctaatatgatgtatctagttttgttcctcttagtgcatcagagatgttagttagttgtgaaatgttgccttcgtcatgccttatgaagattgaaatcactggagattacaatggtcgaacctgattctcttgtgtaattaagtttgcataaatcagaaaggttcattaatcat

SEQ ID NO: 14107 - DNA, 298 bp, Zea mays
  Clone ID: MRT4577_112856C.1
cccaaactggtccacctgcctgaagagttgttaaggcttccggcaggtggaccagtttggggcacttgcaaagcgtcagcaccctgagacatatcatggatccacactggtccacctgcctgaagagttgttaaggcttccgaaactacgcagtctggctcttatcgcaatgcctctgggttgctaccagaaaggtgaggttcctcagggggtgaagatttcagagtcagatgatgagaaagttttccagcatcttcctatttggcggtggctccacctgtctgccccgccgcatttg

SEQ ID NO: 14108 - DNA, 469 bp, Zea mays
  Clone ID: MRT4577_112857C.1
tttcttttttttctttttttttttttttttttttttttgggtttttttttttttttttttttttttttcttaaagcccaaataaaacatttggttttatcaaaaaaactcctggggggaaaatattgggagacattaaagggttcctttgtaaatgggggggcccgactaaagtgtcttcccccccctatgccaaactgggaaaaaattaagggtcggcttcttttttgatcccagtatccccccctgaacttaaggcctcattacccacctttattaattggcccccctgcccggacagttcattatttttgctgggccagcttttttctttccgggctctttggggtttttttttctcttccccccttgctgggatcctggggggggggcaaccttttccttttaatgggcctgtgtccctgttttttcccttccaacaacgggtttttaccagggttccctcctct

SEQ ID NO: 14109 - DNA, 321 bp, Zea mays
  Clone ID: MRT4577_112858C.1
taataatttttttttttttttttttttttttttttttttttgaaggacatctgatatataggaggagcacaagagagcaggccttgaagcgcttgtttccatcagacagagatgttaaaacctatctttgcgaccacttgcccaatcataatacgcttttttcacaccaattgccagcaatcaagggaaggggtaaagggcttcatgtgggcctagttcaacaccaagttcaatggattttgagtttgggcttattttgacatacctgacatcagaaggacattgcccacatctgtggtagtaaagcttaattcaccaaac

SEQ ID NO: 14110 - DNA, 488 bp, Zea mays
  unsure (1)..(488): unsure at all n locations
  Clone ID: MRT4577_112859C.1
gtacaagctttttttttttttttttttttttttttttttgcttttttttttttttttttttttttttttttttttttttccaaacatcctttttccctattatttattcctttccatttcaaccaaaaaatcatttcatgggggaaagggccccccaccttaaaaggggacactccgttcctcatcccccctaaaccactaaacaaggtaaaaaaacccattcaccaccccccttaaattattaaaaaaatacctgggcccctcccacccttaccccaaatttcaaaaaaaaggccccccccccgggggggcccaaacccnatcccaacctctttttggccctggccttaggggtcccctgtgggaaactgttttgcggtttcctttccccacaactttctaccgcgggaactttttgttcgaatccaggggcgcccaatgagggaccccgcccccaaaaattgggggccgctgcctcccccttttcc

SEQ ID NO: 14111 - DNA, 1573 bp, Zea mays
  Clone ID: MRT4577_11285C.1
cattgggaccctcgaggccggccgggagcagaccgctgccgagagcccgagacagtgcccgctgccagccaaccgccgacgcagtccacaagcgatgaagcgcttcttccagccagtgcccaaggacggctccccgtccaagaagcggctagcgggtgctgctgaaccgggcgacggccccacatcagccggtgccgccaccggcgctggcggggatgtagaggggaggcccaccgaggagccgttcaagttcctgacgtggaacgccaacagcctgctcctccggatgaagagcgactggcctgctttctcgcagctcgtcgcccgccttgaccccgacgtcatttgtgtccaggaagtgcggatgccggcagctggttccaaaggggcacctaaaaaccccagtgaactaaaagatgacacaagcttgtcacgggatgaaaagcaggtagttctacgtgctttgtcagcttcacctttcaaagactaccgtgtctggtggtctctttcagattcaaaatatgctgggacagctatgtttataaagaaaaagtttgagcctaagaaggtgtctttcaacttggatagaacatcttctaggcgtgaagccggtgggcgtgttataattgcggaatttgaatcattccttttactgaacacttattctccaaacaatggatggaaggaggaggaaaatgcatttcaaagaagacgtaagtgggacaagaggatgctagaatttgttcaacacgtggataaacccttaatctggtgtggggacttgaatgtcagtcatgaagaaatcgacgtcagccatcctgatttctttagcagcgctaagctgaatggatacaccccacccaataaagaggactgtggacagccaggattcaccccagcagagagacggcgttttggcaacatattattccaaggaaagctggtagatgcttacaggcacctgcacaaagaaaaggacatagacggtggcttctcttggtccggtcatccaattggcaagtaccgaggaaagagaatgaggatcgactacttccttgtttcggaacagttaaaggacagaatagtttcatgtgaaatgcatggccgtggcattgaattggatggattttatggaagtgaccactgccctgtttcgcttgagctttccgaagctgtagcagaagaagcaccaggacagcccaagccatccatctaaatataccaccatggtggtcattgttgagacatttccggtccttcattaaacctgactgttccatgcattgcctactctaggtagctgaggtttgattgtaggtattattatgatcccagtaggttaccagttcctgtggtcagggctggtatagtttagggatcattgccatttaagcagtgcaatttggacatctcattctgcttgaaatgttgtttgtctaagagcagccatggactacctaatacctcatggggatcgaagagattaatcccttcgtatccaattttaactagcaagggatttaatccacccctaacaagcacaataaaatcttgttcgttttttctaccagaa

SEQ ID NO: 14112 - DNA, 302 bp, Zea mays
  Clone ID: MRT4577_112860C.1
ccgacgcgtcctacgacacccggaagttgatttatgagcttggctttatgcataagcgtgggattaccaaatcatgtggtacctctggtttctacatgttgcagactgtaaactgattcccttaagacgtgacactgcacatattgcctagcgtgcgaccagtgataccgggctatccgtatcactgatctacactgcttgctcaacatataggacacggattgctttcctatgacactgctctaggagcgaaatgtcatggataagcaggccatacaatactgagacttacagtcaatgct

SEQ ID NO: 14113 - DNA, 342 bp, Zea mays
  Clone ID: MRT4577_112861C.1
attataaactttaaggatttctattaatatatgaactaactttttgtgaagaaccatttgaatcgtgatacattacacccctgctaataaccaacaaaccagatcgacggcaagattgggatatgatcttgaccgcgcaagtgaaggaaatgacaaagaacacaagaaagcgtggaggaaatttcaatcagtgtagtacaagataaactacggcagagaggtctgcagcgggaagggatggtgatcaactgatcatctgatgaaagcgtggcccctcgcctcttgctcaaccacctgaagctgtggccactttggtcttgtcacccgcttcgtcgattttgg

SEQ ID NO: 14114 - DNA, 173 bp, Zea mays
  Clone ID: MRT4577_112862C.1
accacagtaatgcatatccgaggttgcgcgttaacattgtatacaagcacaccgtccaataactggccattattaataatcacaagtgaatctatttttttgttcgagctgagaggtcgtaactactactgtagctcgaatctctgcatgtgcttttttccatgaagctttgc

SEQ ID NO: 14115 - DNA, 655 bp, Zea mays
  unsure (1)..(655): unsure at all n locations
  Clone ID: MRT4577_112863C.1
ccgggtcgtcttagcgtccgccccgtttccggtcgtgctcgacataggtgtgggggacgacgagaggaggatgcgtggactgcaccacctccacctgcggctgtgggtccttcaactcgatggtgctggacaccgtcgcggtagacgtctgtgacctctgtgacgaccgacttcccaccacggcgaccgcatgggaagatgctcctccaccgagacggagtagagcgacggcggtggcagcggcaggaggtcaaggatatacgtctgtaaaccgcggacggggctcgggcgtgcgcagcggctgcaggtctcgccagcgtcggcgtcggcgaggtcgccgccatgggcgcgcggccgtgtggtcacagtcacagtggtcggagtgtgattggttggaaatcgaacgcgatgcgggcctgccttttgggctcggtgggccgtgagtcccattttgtttgggcggcaaaggaaacgaattgatcctactgatcatattcgtttggcttcaacggtcaggatttggcttccactccatgggcctttcgctcgacaagctcatcaaagccgncgncgccgccggcgtcgcctcagctcgctccggctgcctctgcctcccctgcctctgaggatttgctttgggagagacttattatga

SEQ ID NO: 14116 - DNA, 253 bp, Zea mays
  Clone ID: MRT4577_112864C.1
ccctcggaggccggcgcgggcacaaaaaaaaaaaatctgtatcatcttccccagcgcagcccctcctccatgtcgtctgcatccgccccccacactctgcgcatggacgctcctttcacacgctgtcagaaagttcgtacgggacgcaaccaagactgctcacccgcgacaggccgggggcagccttcctcaccctctccacgcccaccctgttcggaaacatgatcaagcccgaccactcctccccccccac

SEQ ID NO: 14117 - DNA, 771 bp, Zea mays
  Clone ID: MRT4577_112865C.1
taggggccttttttttttttttttttcgttcttttttttttcccagaaggcctggtggcgatcgagcgcaacgccgagctggcttttaataaactgactgtcaaagtagcctttgcgcagcgccacattggtgagggattttttgaaattgtcgtaatcgttatggtgcagcacggtgccgatggcaggacgctttttgagcagcgccaggtaatcgctgtcgtcacgtgcgccgccgcgcaggatcacgttggtgccgccaatcaacaccggttcgcccgcagagacgcgggcaatcaatacctgacgcccttttgctggtggcggcagcagttcgaaatcaattgtaggttcgtagtagcctaaggctttcaacccttcgcggatagcatcatcaacacgtgcctgaaaacgccgatccggcgtcacttcgtcactctggatagtggacaactgagcgcgcacattcttttgcagttcgcccgttaatccctccagttttaatcgtacattcgcggcgaaagccgtttcactcgccagcaacaaaccggcaaaacataaaagacggatctttggcacgttctctcctgaatatccttgttcccacctctggaaggaaacgtaagcgcaactccgcgctgagcctggtcggcttttatgcagaacacagactgataaaaacccgctaatgcaggttgaaaaacggacggctagcccaaaatttcttatgtttaaatctagcctgatttgtggtgtcccggcccggccggc

SEQ ID NO: 14118 - DNA, 587 bp, Zea mays
  Clone ID: MRT4577_112866C.1
taggggccttttttttttttttttttccttttttttttttttttttttttttttttttttttttttttttttttttttttttttttttttttttaaaaaaaaaggaattttttttacccctcctttacatcccgcatcactggagaagaaaaaacccccgcaggggacaaataaaaagagagagagttttttcccccccaggcaacgggaggggggggagcagcagctaaagagggagcccccaggggctcggggtttctggttccttccccccctctcggtcctaatttaaacccccacggggcaaaacgggggggtctggaacctgaacccggaaacgccgggggcgccgttgcccccgggggggacaaagaacccggggcaggggacaaaaagggggtaggggccggaaatccagttggcgaccttccaccggaagggggcgttaaccttgacctggaggaaaaggtaacccccctggaaatcctgggggaacgcgtccgcaaagtaaggcgcgaaggggaccccggggcccaaaaaaaagggggaccacacgtccacgtcgccggggccctggtacacggggg

SEQ ID NO: 14119 - DNA, 480 bp, Zea mays
  Clone ID: MRT4577_112867C.1
cagaatcttatggctgcctccatggagcctacggccctgtatttacgatacggagggcgcccaacgcttgcgtagctattgatgcggcgcgagcacatcctctttgtgctgcttagggacacgttctttctaagacaccaaggtctactcttgaggtactatcacgaccgaagccttctatgctctaaatgagatactacagactccggcttgtacaagaaacagaaccacaaccaggacgtgtctcagtggaacaatgaccttggcgagggctgagaagcgcctactgaccagagtctcacaggtatctctagaaaggaccgctgagtgctgactcttatagagcagaagaatgcgtgttatgcttcctaacccaacaccagaactttatcaatgtaggtgcacaggcaccaagagtactacaccctctacaaggcctcagagaggtggacgacacaaccgtaaagagggtacacacat

SEQ ID NO: 14120 - DNA, 471 bp, Zea mays
  Clone ID: MRT4577_112868C.1
atgggcaagaacaagaagggtggaagttcgtcgcaccactccgacgacaaacggaagcgcgagccaagtcccccctcggaggactttggtgactccgagtactcggaggaggagttttcctctgagtccgaggggtcgccggtctatgcctctcccccggtgtcgtccgatgactcggacgattccctggggatcgctgtcgaggtgtggacgtacatccgggccgtcgagcgctctgggctcgagggctcggatgactcgaagatctcctcggacgaggagaactcctccgactcgtccgaggaggagagaggcggtgacggcgacgacgagggagacagtggtgatggaggcgacggcggcgatgatggcgatggagacggcaagggcgacgacggtaggggcgacggtggcagcagcaagggcgacggcgccagcagcaaggccagtggcaaagcgccactggtttaa

SEQ ID NO: 14121 - DNA, 364 bp, Zea mays
  Clone ID: MRT4577_112869C.1
aatagtcacattacagctagctgcaaaaatcgttcatgaattataagcatcaggcagacttaaaaacatggtagtcttagaacattgttctatatccttgcagagcaactagaaaaaactctcaacacagcacattcagaggatttatgcgttggcagcagcctgggcagcggcatcccgcttcctttgctcttctatgatgctcagcttgattcccttgcccttgggcaggctcacccacggcttattacccttgccgatggtgaacacgttgcccttgtgcttctccctgttcttgataacacccacacggccagtgttccttccgccagtcaccatgacaacgttgccaacatcaaacttg

SEQ ID NO: 14122 - DNA, 222 bp, Zea mays
  Clone ID: MRT4577_11286C.1
tttttatagcgcagcacgcacaggacccgggcgggggagcattagaactacgggctcggccagctgtctatctggctccactacaacaacggccccggcgaacgatacaacgcatacaaactgtatgacaacacgagcaaaattgtgcacggctgccaaatcacattcaagacactggttaggttaaggctgatcaacctgcaccatgtgctgccctacggc

SEQ ID NO: 14123 - DNA, 231 bp, Zea mays
  Clone ID: MRT4577_112870C.1
tttttttttttttttttttagggttgaacaagcagataagataaatagtcacattacagctagctgcaaaaatcgttcatgaattataagcatcaggcagacttaaaaacatggtagtcttagaacattgttctatatccttgtgcttctccctgttcttgataacacccacgcggccagtgttccttccgccagtcaccatgacgacgttgccaacatcaaacttgatga

SEQ ID NO: 14124 - DNA, 547 bp, Zea mays
  Clone ID: MRT4577_112871C.1
acaagctttttttttttttttacaagcttttttttttttcttttttttttttttttttttttttttttttttttttttttttttttttttttttttttttttttttttttttttttttttacccggggcccgacccccgtggggggggattccaacccactggggggcgtttttaggggatcccggctcggtcccaaatttggggaaattatgggcaaagctgtttcctggggaaaattggtttcccctcaaaattccccaaaaaataagagccggaagcaaaaaaggtaaagccgggggggcctaaaggggggcctaacccaaattaattggggtggccccactgccccttttccagggggaaaacctggggggcccgtttttttaataaatcgccccacccccggggagagggggtttgcgttttggggcctttttccctttctcggtaaatgaattggtggcctcgggggtttgggtggggggagcggttttaatttactaaaaggggggaataccgttttccacaaaatcaggggaaaaccca

SEQ ID NO: 14125 - DNA, 347 bp, Zea mays
  Clone ID: MRT4577_112872C.1
cggacgcgtgggcaaaaaatgtgattatttgttataatggtctctgttcttaaggcgtggcctaggcgtcgcctaggcgacgcctaggcgtccgggcggtggtctaacgcctaggcgccttgcccgcctacctcgcctaggcgtccaggcggtggtccaacgccttggaccgccttaccgctttaaaaaccatgataatggtaaacgtaagttttgtgctatgagcctatagcttctcccctatcgtgggcagtcgtgtcaggatacttggtttctgtgaaacattcaggctgtcattatgtctggtctgtagaatgtgctagtgtgaatgttctgctatttcaata

SEQ ID NO: 14126 - DNA, 1226 bp, Zea mays
  Clone ID: MRT4577_112873C.1
cctcgaggccggccgggactgtaagaactttctcagcccattatcacggcggcggtggcggagcggaaggcgaaggagtagcagcagcaggcgggcgccgagtagcgggctccccacctcgagcttgccaccatggctagaggattgaagaagcatttgaagaggctcaatgcgcccaagcattggatgctggacaagcttggcggagcttttgctcccaagccatcttctggacctcacaagtctagggagtgcctgccactgatcctcatcatcaggaacaggctcaagtatgctcttacataccgtgaggtcatttccatcctgatgcaacgccatgtacttgttgatggcaaggtcaggacagacaagacttaccctgctgggttcatggatgtcatttccatccccaagaccaatgagaactacaggctgctgtacgataccaagggccgcttccgccttcacccaatcagggatgaggatgctaagttcaagctttgcaaggttaggtctgttcagtttgggcagaagggcatcccctatctgaacacgtatgacggccgcaccatccgctaccctgacccgctcatcaaggccaacgacaccatcaagatcgatctggagaccaacaagattgtggacttcatcaagtttgatgttggcaacgtcgtcatggtgactggtggaaggaacactggccgcgtgggtgttatcaagaacagggagaagcataagggcagctttgagaccattcacgtggaggactcccttggccaccagttcgccacccgtatgggcaacgtgttcaccatcggcaagggtaataagccgtgggtgagcctgcccaagggcaagggaatcaagctgagcatcatagaagagcaaaggaagcgggatgccgctgcccaggctgctgccaacgcataaatcctctgaatgtgctgtgttgagagttttttctagttgctctgcaaggatatagaacaatgttctaagactaccatgtttttaagtctgcctgatgcttataattcatgaacgatttttgcagctagctgtaatgtgactatcttatctgcttgttcaaccgtgttgtcgtgttttgattcactgtttgtttcatggtcttttcactcgacagaaacagttatttcttaagaacttcaccattatattcccaaaagtgacccatgatattggaaaaaaaaaaaaaaaaaaaagag

SEQ ID NO: 14127 - DNA, 1083 bp, Zea mays
  Clone ID: MRT4577_112874C.1
cattgggtacctcgaggccggccaggccctatcacggcggcggcggcggagcggaaggcgaaagagtagcagcagcaggcggcgccgagtagcggctccccacctcgagcttgccaccatggctagaggattgaagaagcatttgaagaggctcaatgcgcccaagcattggatgctggacaagcttggcggagcttttgctcccaagccatcttctggacctcacaagtctagggagtgcctgccactgatcctcattatcaggaacaggctcaagtatgctcttacataccgtgaggtcatttccatcctgatgcaacgccatgtacttgttgatggcaaggtcaggacagacaagacctaccctgctggtttcatggatgtcatttccatccccaagaccaacgagaactacaggctgctgtacgataccaagggccgcttccgccttcacccaatcagggatgaggatgctaagttcaagctttgcaaggttaggtctgttcagtttgggcagaagggcatcccttatctgaacacgtatgacggccgcaccatccgctaccctgaccccctcatcaaggccaacgacaccatcaagatcgatctggataccaacaagattgtggacttcatcaagtttgatgttggcaacgtcgtcatggtgactgggggaaggaacactggccgtgtgggtgttatcaagaacagggagaagcacaagggcagctttgagactattcacgtggaggactccctgggccaccagttcgccacccgtatgggcaacgtgttcaccatcggcaagggtaataagccgtgggtgagcctgcccaaggggtaagggaatcaagctgagcatcatagaagagcaaaggaagcgggatgctgctgcccaggctgctgccaacgcataaatcctctgaatgtgctgtgctgagagttttttctagttgctctgcaaggatatagaacaatgttccaagactaccatgtttttaagtctgcctgatgcttataattcatgaacgatttttgcagctagctgtaatgtgactttatcttatctgcttgttcaaccgt

SEQ ID NO: 14128 - DNA, 1215 bp, Zea mays
  Clone ID: MRT4577_112875C.1
caacgaaaaatgaccaaagacttccaatatcatagttcacagctgtgaatataatggtgaagttcttaagaaataactgtttctgtcgagtgaaaagaccatgaaacagagaatcaacacacgacaacagggttgaacaagcagataagataaatagtcacattacagctagctgcaaaaatcgttcatgaattataagcatcaggcagacttaaaaacatggtagtcttagaacattgttctatatccttgcagagcaactagaaaaaaactctcaacacagcacattcagaggatttatgcgttggcagcagcctgggcagcggcatcccgcttcctttgctcttctatgatgctcagcttgattcccttgcccttgggcaggctcacccacggcttattacccttgccgatggtgaacacgttgcccatacgggtggcgaactggtggcccagggagtcctccacgtgaatggtctcaaagctgcccttgtgcttctccctgttcttgataacacccacgcggccagtgttccttccgccagtcaccatgacgacgttgccaacatcaaacttgatgaagtccacaatcttgttggtctccagatcgatcttgatggtgtcgttggccttgatgagggggtcagggtagcggatggtgcggccgtcatacgtgttcagataagggatgcccttctgcccaaactgaacagacctaaccttgcaaagcttgaacttagcatcctcatccctgattgggtgaaggcggaagcggcccttggtatcgtacagcagcctgtagttctcattggtcttggggatggaaatgacatccatgaacccagcagggtaggtcttgtctgtcctgaccttgccatcaacaagtacatggcgttgcatcaggatggaaatgacctcacggtatgtaagagcatacttgagcctgttcctgatgatgaggatcagtggcaggcactccctagacttgtgaggtccagaagatggcttgggagcaaaagctccgccaagcttgtccagcatccaatgcttgggggcattgagcctcttcaaatgcttcttcaatcctctagccatggtggcaagctcgagatggggagccgctactcggcgccgcctgctgctgctactccttcgccttacgctccgccaccgccgccaagacaacgagcccggccggcctcgaggtacccaatg

SEQ ID NO: 14129 - DNA, 1160 bp, Zea mays
  Clone ID: MRT4577_112876C.1
cattgggtacctcgaggccggccggcctatcacggcggcggcggcggagcggaaggcgaaagagtagcagcagcaggcggcgccgagtagcggctccccacctcgagcttgccaccatggctagaggattgaagaagcatttgaagaggctcaatgcgcccaagcattggatgctggacaagcttggcggagcttttgctcccaagccatcttctggacctcacaagtctagggagtgcctgccactgatcctcatcatcaggaacaggctcaagtatgctcttacataccgtgaggtcatttccatcctgatgcaacgccatgtactagttgatggcaaggtcaggacagacaagacctaccctgctgggttcatggatgtcatttccatccccaagaccaatgagaactacaggctgctgtacgataccaagggccgcttccgccttcacccaatcagggatgaggatgctaagttcaagctttgcaaggttaggtctgttcagtttggtcagaagggcatcccctatctgaacacgtatgatggccgcaccatccgctaccctgacccgctcatcaaggccaacgacaccatcaagatcgatctggagaccaacaagattgtggacttcatcaagtttgatgttggcaacgtcgtcatggtgactggcggaaggaacactggccgcgtgggtgttatcaagaacagggagaagcacaagggcagctttgagaccattcacgtggaggactccctgggccaccagttcgccacccgtatgggcaacgtgttcaccatcggcaagggtaataagccgtgggtgagcctgcccaagggcaagggaatcaagctgagcatcatagaagagcaaaggaagcgggatgccgctgcccaggctgctgccaacgcataaatcctctgaatgtgctgtgctgagagttttttctagttgctctgcaaggatatagaacaatgttctaagactaccatgtttttaagtctgcctgatgcttataattcatgaacgatttttgcagctagctgtaatgtgactatttatcttatctgcttgttcaaaaaaaaaaaacatcaatgaaaactgaattaccaattaaaaactagattaaaagtttaattaaaaaaaaaaaaggggttgccc

SEQ ID NO: 14130 - DNA, 297 bp, Zea mays
  Clone ID: MRT4577_112877C.1
ttgtcttattaataacctcactataaaccatcctgtactaggagtaggtccgggggtttttgatgcagctgtaacttacggcacccttctaatggcgacgctactttatcatacagccgcgatcaaaagcccttccctaaaccgccgctcctaagccttggagactgaacgacagtagaacatgacagatgtctatgagcatacaaatctaagctgcatgtaaaactgatgagcaacggcttataaaggaatgcaatgtcagagtttctctatgacaaatataatgactcaatcatt

SEQ ID NO: 14131 - DNA, 351 bp, Zea mays
  unsure (1)..(351): unsure at all n locations
  Clone ID: MRT4577_112878C.1
tattcacccctcctaataactttccccaatcccctcacccaccgcgggacatactaaaacccgggcggaaatattaaccaccacatctnncgccctattttacatcctctcctacattctcctcaacgctgcccatacacctgccgagtcacccaaagcatcacctactgccaacacacctgccaagacacccaacgcatcaactactgcaggtactgccaaagcacctgactatgctcccacgaaaactgccaccaatactgcaccttaaaacggatttaaccccgcctctacccctgccccttccaattccccatctacgaaatcttgtacaaattctcgtccaaccac

SEQ ID NO: 14132 - DNA, 1600 bp, Zea mays
  Clone ID: MRT4577_112879C.1
cctcgaggccggcctggccgggatcacggcggcggcggcggagcggaaggcgaaagagtagcagcagcaggcggcgccgagtagcggctccccacctcgagcttgccaccatggctagaggattgaagaagcatttgaagaggctcaatgcgcccaagcattggatgctggacaagcttggcggagcttttgctcccaagccatcttctggacctcacaagtctagggagtgcctgccactgatcctcatcatcaggaacaggctcaagtatgctcttacataccgtgaggtcatttccatcctgatgcaacgccatgtacttgttgatggcaaggtcaggacagacaagacctaccctgctgggttcatggatgtcatttccatccccaagaccaatgagaactacaggctgctgtacgataccaagggccgcttccgccttcacccaatcagggatgaggatgctaagttcaagctttgcaaggttaggtctgttcagtttgggcagaagggcatcccgtacctgaacacgtatgacggccgcaccatccgctaccctgacccgctcatcaaggccaacgacaccatcaagatcgatctggagaccaacaaaattgtggacttcatcaagtttgatgttggcaacgttgtcatggtgactggcggaaggaacactggccgtgtgggtgttatcaagaacagggagaagcacaagggcagctttgagaccattcacgtggaggactccctgggccaccagttcgccacccgtatgggcaacgtgttcaccatcggcaagggtaataagccgtgggtgagcctgcccaagggcaagggaatcaagctgagcatcatagaagagcaaaggaagcgggatgccgctgcccaggctgctgccaacgcataaatcctctgaatgtgctgtgttgagagttttttctagttgctctgcaaggatatagaacaatgttctaagactaccatgtttttaagtctgcctgatgcttataattcatgaacgatttttgcagctagctgtaatgtgactatttatcttatctgcttgttcaaccctgttgtcgtgtgttgattctctgtttcatggtcttttcactcgacagaaacagttatttcttaagaacttcaccattatattcacagctgtgaactatgatattggaagtctttggtcaaaaaaaaaaaaaaaaaaaaaaaaaaaaaaaaaaaaaaaaaaaaaaaaaaaaaaaaaaaaaaaaaaaaaaaaaaaaaaaaaaaaaaaaaaaaaaaaaaaaaaaaaaaaaaggggcgcccctttttaaaagaacccaattttactaccccgggccttcgtttttcaaaacctttttttttggggccccctaaaattaaattccctggccgccttttaaaaacgtcggaactggaaaaaccctggggttccccaattaaatcgctttgaaaaaaatccccttttccccagttggcgaaaaaccaaaaaggccccccccaatcccctttccaaaaatttgcccaccctaaatggcaaatggacccccccctttaccggccctttaaccccggggggtgggggggttcccc

SEQ ID NO: 14133 - DNA, 182 bp, Zea mays
  Clone ID: MRT4577_11287C.1
agacagaaccgagcgtaagctgctgaggtaatgagcgaacccattcgtgatccgggcgctcatcgcgctcatcctcaagcgccgcaactcaccgtaagccgaggagaagcacatgcagaaagtgactgatcgcgaagctcgagccttctgctaaaaaaagatggggtgcagctgcagcacca

SEQ ID NO: 14134 - DNA, 415 bp, Zea mays
  unsure (1)..(415): unsure at all n locations
  Clone ID: MRT4577_112880C.1
gggcattaaggccaccccatggggaaaaaaagggatgggaaaaaaggtgggggcattgccaacgaggaaccagccctagctctgaaacttggcaggttgaaagccctggggcggctccttcgtatgttcaaaacccactctgatcattatcaaaggggccctatcggaattaaaaaaccccccgaatccgggggaaataaacccgtccaaacctaggggtggggcccccccacatttctttggaatccccggcttcccctctcgcaagcccccccccaccgttaaccagggccgcgcaggggcgccccccccccccgccagtccccccccccgggaggggggtgggggtgggggggggccgcggggggggggggggngggggggggggggagaggggaggggggggggggggggg

SEQ ID NO: 14135 - DNA, 545 bp, Zea mays
  Clone ID: MRT4577_112881C.1
aaataaaccaaaacagatggaaattacattccaaccgatagataaccaggatatcacatctgaaacgcataatataatatatccttacgcatacactgattaacgagaatgtgtgacaaaattaatctggatcatatactaagtgagctgccaagtgggattatgtcgaggctggctacatgaatgatcatgctaataaaacactacggcaacagggctgatggaaaacatcttgcatatcacaaacgggtcccccatgtgatattaccaattgtgctaataaagacacacaccaagttacgggaagcgtgaacttaaacctgtatattgtagctctttccctcttccatcttgttatacaagcactaacagaacacccttggccttcacatgtacgtgcaaatagctcatgccataataatgcatctcagtatcatgtagcacttccccacggttaacgcggactgaccgtatgaaatgcctccgtaatcaactacatattcattgcgaaatcacccactctggcttatgggcccatgcaattg

SEQ ID NO: 14136 - DNA, 1054 bp, Zea mays
  Clone ID: MRT4577_112882C.1
aactgaactttaaccaaacaccgccgaaggcaaccagcccaaccttcacgcaccgcatttcccaagggaaccataccagagcggcagagccttcccctccgctccccagtcccacccgcaccctagccctcagcaaaccctaaccgctcgtcgccatgaagcacccctcgttcaaggccaccggcgccaagcgcaagaaggtcggcggcgccaagcgcgggctcacccccttcttcgcgtttttggctgagtttaggccgcagtacctggagaagcaccctgagctcaagggcgtaaaggaggtaagttgcttcttctcaccctaggcatgtagctgggtttcgcttaggtggctggtatatgcctttgctcgtcggtgactttgcttataggtgagcaaggcggctggggagaagtggcgctctatgtcggatgaggagaaggcgaagtatggcggtagcaagaagcaggatggcaaagcaagcaagaaggagaacactagctccaagaaggccaaagctgatgttcgggagggagatgaagcagaaggttctaacaagtcaaaatctgaggttgaggatgatgagcaggatggtaatgaggacgaggatgagtaaatagtacgatggggaacagcagctttgcaattgagtgtttgctgctttacttatttttctatatgctgttccttttgatgttatatgctgtaaggaaaatctgtacatgatggtaccttagggtatggcatgctggagttcccctttaacccgaagagccggatacttttgccagcctcgtcagcatgtgtaaacagttgttttcttgttttatcgacttattgggtgactacccaagagttggtttgtagtcaatgaggtatgctgccccctgtggtgctacgcagctgcagcaacatcagatggtcaggctaaaatcatgttgtgggatctgattctaatgatgcttatttagtactattacaaatatctatcgttgcttatataaatttgttaaaccttgagatatttttcaaaaaaaaaaaaaaaaagcggcc

SEQ ID NO: 14137 - DNA, 312 bp, Zea mays
  Clone ID: MRT4577_112883C.1
ttgtgttttttttaaattaaacctgctttatgctcagtcaagagaacagcggaaaaacaacacgacacggggcccacgcagggaacagacgaaaaacgacaggctaggctgagccggaaacgaggagaacaccggacccaggcgaggcggacgccgaaaccgccacaaaaggcgcaccggcccgcggtaggcaccaaaaaaccaggtggcgcacagaacccgggaagctaaacacaccaaaaagggacgaacaaaacaaaaaagagctgaaaaacgccgaaaagagcctgactaaactagaagaaaagcaag

SEQ ID NO: 14138 - DNA, 614 bp, Zea mays
  Clone ID: MRT4577_112884C.1
cactctccgtggatcaggaccgctcccgtcagagtagtggcgaagatttgcccgggcggagaccccactggatccatgcaggtctccgcccgtgttcccgatccggctaactcctcctccgcttccgtctcattcgtccccataatcaaggagtctgctctttctaatatgacccaccgcaaacatcgcgagcacaaactcgattggtgctatctcaacgacgattcgtacacagacatttttcacaacgaggttaaacagcttgtggataaaatcttctcctctgatggccacaaccacgcatgtgtagtcacttgcggttccactagcaaaacccaccttgttatagggtccgatcatcaaccgggcttgctcactatggccatggagcgaatatttgactatgccaaacctattagggcaactgtcagtgtttcctcttatcatgtgcttcaagacagccatgtctttgatcttttggatcctaagaacaacgaggtccttgtgcgagaggatgctgatggaaggactcatctgaagggcctctctatggttgaaatcaattcaattcaggagtttcagaatttgtgtatgatagtgacaacaccaaatcg

SEQ ID NO: 14139 - DNA, 710 bp, Zea mays
  Clone ID: MRT4577_112885C.1
ccggccggggcgagatccgctcgctcgcccacccgccccatggcacctcatggccgctcaagcgaggatccacctgtcgggcgtcttcccgacccacggcaatcgtgcatcaccatgcgccgttgaaggatccatccttcgacctacgcttatctaacgcctcgatctcctccatcccattgcctcactgccgtgacgagacaaccacatacctacaaatacgggagttgctccaacaatggggtcgagaggaggacgaggatctccagatggcgctccgcatgagcctccagggctccccacgtcgttcagccctcaccattgtgaagtgtcaggagctctccaaacagctcttctacacatgcctcgcaaggacgaggtcctttataccatcgtccctgctagcgagacaggaggtcccagtggagcggctaaagccgagggtcgaggcacaggagagagggaactaggctctcaagtaaaagtacccgatcggactaaacccgcaagagaaggtgaagctggagaaggagcacatgtggttgttcatggatgacagcatcaaggacctcgccaacatttccatggagtagatcaacgccaccgagctcaccaagaacgatgtcgacatccggttcaagtgtacatccactctgcgcctgctgcaatgctgatttaattgttgctcctacacagccatttgcgattca

SEQ ID NO: 14140 - DNA, 341 bp, Zea mays
  Clone ID: MRT4577_112886C.1
gggccacgcacgcgtccgcaaacgagtccgcggacgcgtgggcggacgcgtgggtgaaaacccaggttgggttgaaagtattggtgtcaatctgtgagattatttatcacttcagattgaagacatgatttggtagtggtaaagaaggagggggaatgagacatggtgggggagttagataattgagtactactgaaaggatggggacgggtaatccgaaattaatagtagaaggggctagagttacagtgattaaacaaggaagggggcacaggagaagggggcgcagtccaaggcctcatgatgattatggtggtcgtggtaaggatctcccaaccagt

SEQ ID NO: 14141 - DNA, 720 bp, Zea mays
  unsure (1)..(720): unsure at all n locations
  Clone ID: MRT4577_112887C.1
aatcttctctatgaggtcgatcacgtattataaacttttatgtgtcttgagatttccattcctttgaggccaaagatgaaatatgtggatgctatttctgtatgacgtctcacgtctgattacaaaacccattactgccttccttctgaggcctctgttaatttggatcttgttattttgtccgtgtttattttcgccgagtctgcgttgtggtctggtggcattttggatgaggtcgggtgatgagttgcatagttcagatgatcaaccctcgtggttctgattacattgagtaattagtctttcgctcctatctgacgaccttatcaatgccactccgatattatatactttccgttaactgatttcgatacactaatctttattgacgtcgtatgttacattctcagccagatactttcgccgcttcaaaatcctggccaagaggttcacggcgccggctcgcatccgtccttgccctgctcgcctatgctagcaccttttcgtctcatatggctgcaccttgcttatcgtagttgaaatggtgcacgtgatgtatgcattgtaatcctattaattacaccttgcttcagttcatgttcggttgattaaaaaaaaaaaaaaaaaactgtacgattgctgctaccatgtcgataacgtcatcatgcatcttatcggnatgtanggtttgcttgaatagattcaaatcaactaattccg

SEQ ID NO: 14142 - DNA, 270 bp, Zea mays
  Clone ID: MRT4577_112888C.1
ttcagaattaaattttgcctgcacacctaaacactgacaacatttagcttaaaggttttccatggagtatagtggtaagagctgtagttagcaaaattggcatcctctttagggtgtcaattctgtgctgctttgcaaattgttgaaacttttgattttctgtttggcgatgctagtcagtgttcacttcttacatcttagccaagaatttttatctaaatgcagaaacttattaatgaaatccatttaaactagcacaacattttggga

SEQ ID NO: 14143 - DNA, 245 bp, Zea mays
  unsure (1)..(245): unsure at all n locations
  Clone ID: MRT4577_112889C.1
gccanctganaagtattcntccaagannancagcccacccgctcnaagcacangtttcgtcttgnngagagccgcnaccaccaatggcntgttanaacactncntctttagcggcgactcngctggcgttcgcnctgacgtttcagncctgcctcgccgggnggnngctcaccgcgcnggtgcantagccggccataaccatgaggtannagaagggcncgctcctgncgggccnatcgncgtca

SEQ ID NO: 14144 - DNA, 1496 bp, Zea mays
  Clone ID: MRT4577_11288C.1
cacggaagctttgcttcggttgactgcactgcactgcacctgctgcctgctgccgagttcagttggtccagggccatggccatgtcctcgtcgcgcgccctcctccgccggatcgggggggctctccgccgccgctccttctccgacgccgcggccggccccgactccgccgccgtagggtaccacgtcgcgggcgggcccagctacatgcgcggcgccgtgttctgggagcccgggcgcccgctcacgctggaggagttccacatgccgcgacccaaggccggcgagctcctcatcaagaccaaagcctgcggggtgtgccactccgacctccacgtcctgaaaggcgagctccctttctccagcccctgcgtcgtgggccacgagatcaccggcgaggtcgtcgaccatggcacgcacacccccgcggagatcatcagcaggttcccagtaggaagccacgtcgtcggcgcgttcataatgccatgtgggaactgcttctactgcgttaagggccaagaggacctgtgcgagtccttcttcgcgtacaaccgcgccaaagggacgctctacgacggcgagacgcggctgttcctacggggcaacgggaagccggtgtacatgtacagcatgggaggccttgcggagtactgcgtggtgccagccaacgcgctggcggtcctccccgcctcgctgccgtacacggagtcggcgatcctggggtgcgcggtgttcaccgcgtacggcgccctgaggcacgccgccgagatgcgggcgggcgactcggtggccgtgatcggagtcggaggggtcggatcgagctgtctgcagatagcaaaggcctttggagcttccgaggtcatcgcggtggacgttctcgacgagaagctccggaacgccacaacgctcggcgcgacgcacactgtgaacgcggcgaaagaggacgccgttgagaggataaaggagatcactggcggtaggggtgtcgacgtggctgtcgaggcgctcggtaaggcgctcacgttttcccagtgcgccaggcgcgtgggcggccgcgtgggggcggtgatgatcgggctcgcggcgacgaatgtggtgggggaggtcgacataacccgcctcgtccggcgacaggtgaagatcatcggctcgtacggcgcgagggccaggcaggaccttccgcagatagtgaagctggcggagagcggcgccttcagcctccggaacaccgtatcgaggaagtgcaggttcgaggaggcgaacggcgcctacgaggacctcgaccagggcaagatcgtcggccgagctgtggtcgagatcatggagtgaatgggtgacgacgatgggcgtgggcgaggtgatcagtcatgtggcgtggttccaggcccctgggccagacgataccaataaataaaagcgcgcagatttctcgcttggctttaaaaaaaaaaaaaaaaaaaaaaacaaaaaaaaaaaaaaaaaaaaaacaacaaccc

SEQ ID NO: 14145 - DNA, 406 bp, Zea mays
  Clone ID: MRT4577_112890C.1
ttccgcctgtttattatcgtacaaacaagccagacccgggggccaggatacaataaaccaaacgccacaccgcccgccgaaaacagatcctagaaacacaggacgaacacgagactacacaatgagacacaacaaccgaacaacccaaaacacagatggcccacagccacaaatacacggacgaagaaaacccgcccgcagcaagttaaacaacaccggagccaacaagccacctgggccgcgcggacccaacacgggagacccatcaaaaggcgcaaaagaacccggaaaccccaaccaggcagccaacgacgtatccggggccaccaccacaggaagccggaataaccacgccacagactccaccaccaatgagcacaccgacagaaagacggcaccacacctc

SEQ ID NO: 14146 - DNA, 507 bp, Zea mays
  Clone ID: MRT4577_112891C.1
actatctctgttatcttcgacacgctatgctgagaggtatggatccggtgtcgctggctctttcggtcttccgctcgtcatggctgagtccccctggtatgagatcctggtgcgtctccacgacatgcgcaccacatgtcttgacttctccacgcccaccgtgtccgtcgacgtgctcctcaaatgtgtggtgtcgatatatcgggaaaccgacgacgacctccgcatcggcaccggcacgcttcgaggtcgcgcactacaacatgctcttctcatcagatgatgaacatgttacctccacctccttgatcgtcgggcttccacgcctgaaagatataacctgctccctcctcggattggacgactgcaaggtggtggagaaacagactaacacctgagacagctgataaaaacttggctgatgccgacttctcaggattctggctgaactgctactcgaggaatggactcctcaagtccgtgatctccatctacagatgctctgcg

SEQ ID NO: 14147 - DNA, 334 bp, Zea mays
  Clone ID: MRT4577_112892C.1
tttcttattattgttttttcttttttttatttcttaccccggattttttaacgggggtggggcgcccggaggaaaaacctgaaactttttttccctctttataataagaacttaccgactgcttccataccatctgataggaaaaaccatcaacctttgctgtataaaccaacacttgataccaaaaaatttcaagaaccaacccttctttatcagggtgccaaacaagttcccaaccagaaaacaaaacgggagatcttcttcaatttttaagaaccttatatttttccacattcccggggccttcccaaaggcctgcccatgggtgaacccc

SEQ ID NO: 14148 - DNA, 473 bp, Zea mays
  Clone ID: MRT4577_112893C.1
gggcaaaaccaaacccccaatggaacccccaaacctttgttttgccccccaaacaaccgagggggccaaaccctttcaagaaattgggtaccccaaaactatgccccccggaccccccctaaaaaaaaaagggggggggggggccgttttccccgagcccccgaagcccaaaacacccctaaacaaaaaaagggcctggaaaacccccccccccattggcccaaacccggggggatgttgttgctgcccccccccaaccctgttttttgccccaattttgccagggggggaaaaaacccccccccccaaaaaaattctgggccccccaaaaaaaaaagtttgaaaagccggaaccctttcttaaaccctataaaacccttggccccaagggaattccccccccccaccaaaaaaacacgggttttctaaaggggccctaaaaccgccccctatttcccgccccaagacccccg

SEQ ID NO: 14149 - DNA, 1478 bp, Zea mays
  Clone ID: MRT4577_112894C.1
cattgggtacctcgaggcccggggggaccatttcattccttccttccttcccctcgctcgccttcctggcttcttcctccccagcacgcacacgcacacgcacacacccagccttttggctgccctgccggccgtcagagagagaaaccgagctctaactaactgaagtggcggccacatagctagctactcttctgatcctgagcgcgcacgcgccatggctcaggaggacgtgcacctggacgacgcaggcctcgcgctgggcctgtccctcggcagcggcagcggcggcgcctctggtgcggcgcgccacggtggtatcagccgccggctgagcagggaggtgcggctgccgtcgccgcacccgctggagccgtcgctgacgctgagcttgccggacgaagcgaccgcgaccgggtccggcgggggcggggccgcgcacagcgtgtcgtcgctgtcagtggcgggcgtgaagagggagcgcgtggatgacgccgagggagagcgggcgtcgtctacggccgcgttgccgcgggcctgcgccggcgccgaggacgacgacgacgacgggagcacgcggaagaagctgaggctgaccaaggagcagtccgcgctcctggaggaccgcttcaaggagcacagcaccctgaacccgaagcagaaagtcgcgttggcgaagcaactgaagctgaggccacggcaggtggaggtgtggttccaaaacaggcgagcaaggacgaagctgaagcagacggaggtggactgcgagctgctgaagcgctgctgcgagtcgctgacggaggagaaccggcggctgcagcgggagctgcaggagctccgcgcgctcaagttcgccccacacccacaggcgccgccgtcgtccgcgacgcaggccggcgcggcggcgggcgtcgttccggcgccgccgccgccgttgtacatgcagatgcagatgccggccgccgccacgctgagcctgtgcccgtcctgcgaccgcctggccgggcccggcgccgccgccaaggccgagcccaggcccaaggcagccgccacccaccacttcttcaaccccttcacccactccgccgcctgctgatgatgagggcagggcagcacgcagccacgcaacgcagcggcagtaaacagagcaccgccccgtgcagataataccacgtctgtacgtgtcacaagtaattaacaaacgtatggtcctcctctctatctattttcttgatccggagggctaagttagttgttttcgtgtcgatcccaaatgcatcagctaatccatcaatcataggcttgatagagtagtcgaaaaaaatagccgtagctttcctagcactccctccgccccccccccccccccccatccatgtatatttctgttgtaattctgtccctctctcgcggtctacttgctcccttttcgattggagtacgtagctcctttgcctttttgtttttggttttttgtt

SEQ ID NO: 14150 - DNA, 2533 bp, Zea mays
  Clone ID: MRT4577_112895C.1
ctgcaggtttcggtgcggaaactcccgggtcgacccagcgtccggtgccagcgtgccaggtaggggaagcaagcgatctctgtcggtgggggagctgctgacggttgtaagtgtagagcgcacgtttggctgccaggatggatcatgtagtcgggggcatgttcaagctcgggaagaagatcaggaatggatcatttggggaactttacctcggcacgtcctgtgatgacgggtccttgatttgtggagctcacttttcctttttctccgggtgtgcttcgttgtgttggtgcttctgactgtgcttgtttgatttgtgtgcagccgtgaacgtgcagaatggcgaggaggttgttgtcttatccacgcttccgagcaaagcccaggctgcccagcacacgcgacgcgaaccagctggcgaggaaccctagcggagcactgtgcaggcgaccgcggcgcgctatcacttacggggggatacggcggcatcgtccccctcggcccctcctccatccctggtgcggcggcgccagcctgcaggtgttgaatgctgatttgttgtggctgattaatcgggttgatcgtcgattaatcgtgattagtcggctgatcgcccttctggcgatcagaaacgataaggcaatctgaaaacattggccgccaaacctccagagcgactcccgcgagccgtgaccaccatagctaaatcaacgcaccagaagctttcacggagctgtctcgtccacgagtgttccagctgactcctattccctgcgtcaatggcgagctctggcaatgaagggcgtgtggtggtggacctcggctccgcggcggagtcggtggctgctgacgaggaggcgcacgccacgcctctccacgagattgagtccctttgcatgcgctgcggcgagaacggcatcacgaggcttttgctgacgttgatcccgcacttccgggaggtggttctgatggccttcgagtgcccacattgtggtgagaggaacaacgagattcagtttgctggacaactccaacccaagggatgctgctacagcttggaggttccgttggggcagagtgagatgctgaatcgtcaggtcgtgaagtctgattcagcgactatcaagattccagagctcgactttgagatccctccagaagctcaacgtggaacactttctactgtggaagggattattatgcgagctgtggatgagctgcaggctcttcaagatgaacggaagaaagtggatcctcagaaggccgaagctatcgatcaatttttactgaagttgagatctcttgggtcaggagaggctgcattcacttttattcttgatgatcctgcaggaaacagctttattgagaatccgcatgctccgttattagatcctttactatctgtgagattctacgaaagaactcgtgaacaacaagcagcacttggctttcttgctgaaccaccaaaagaacaacctggagaggctgtattgcctgcttcagcagtggaatccaattctgatgggttgcaaagcgtgccccatggctcagttggagctgttgcaggtcgtcgtgctatagctcagggaaaccctgatgaagttgctgcagcattgtgtagatattcagcaccagaagaggttgatactttaccatcaacatgtggagcctgtggaacagaatgcgtcacacgtttctttgctacaaaaatcccatatttccgggaggtgattgttatggcaacaacatgtgacatgtgtggttatcgcaattcagagctgaagcctggcggtgaaattccagctaagggaaagaaaattacactgcgtgttcaaaatgcacaagaccttactcgtgatgtcataaagtcagattcagctagcgtaaaagtacctgaacttgagttggaactttcatgtggaacgttgggtggtatggtcacaactgttgaaggtttaattgtgaaaatatgtgaggctctggagagaatacatggatttcaattaggcgatagtacactggaatggaaaaagaagaaatgggatgacttcaaggagagactatccaagcttctgagtttacaagaagcctggactctaataattgatgatggattggcggcttcatttgtggccccggctactgattcgttagaagatgatagccaactaaccattgaagagtatcagaggagttgggagcagaacgaggaacttggcctgaatgacatggatacgtcctctgcagacgcggcttacaacacgaccaacacataatttttttagttttgttgtgccgaatgtatttgttacgctatcagtttactttgatgaactttcagtgtgtatactaatatcaacaacttatatttcctctgacgataaacatcgagcggtaatgcgtcgaacgatatttgggatattttatcgactacgggcttgacgaaaaaaaaaaaaaaaaaaggcccctagggccaaacccgatttgctgtcacccgtgcaggtccatgaattgccaacgttggttcggaggc

SEQ ID NO: 14151 - DNA, 1323 bp, Zea mays
  Clone ID: MRT4577_112896C.1
ggggaggcaaagccgcgtagtgctggacgtcggctgcggcgtggccagcttcggcgggtacctgttcgaccgcgacacgcttaccatgtccctggcgcccaaggacgagcacgaggcgcaggtgcagttcgcgctggagcgcggcatcccggccatctccgccgtgatgggcacccagcgcctcccgttccccgccaacgtcttcgacgtcgtgcactgcgcgcgctgccgcgtaccgtggcacatcgacggcggcatgctcctcctcgagctcaaccgcctgctccgcccgggcggcttcttcgtctggtcggccacgccggtgtaccagaagctcccggaggacgtggagatctgggacgaaatggtgaagctgaccaaggcgatgtgctgggagttggtggcgaagaccagggacaccgtcgacctggtcggactcgtcatcttccagaagccgatagacaacgtctgctatgataggaggccggagaaggagccggcactgtgcgagccctccgacgatcccaacgctgcatggaacataaagttccgggcgtgtatgcaccgtgttcccgaggaccagtcagtgcgtggcgcccggtggccggtgctctggccggcgaggctgcggaaggcgccatactggctggaccgcagccaggtgggtgtgtacggcaagccggctccggacgacttcgcggcggacctccagcactggaagaaggtggtccggagctcgtacctcgccggcatgggcatcgactggaagaccatccggaacgtcatggacatgagggccgtctacggagggttcgcggcggcactgcgggacatgaaggtgtgggtgatgaacgtggtgaccatcgactcgccggacacgctgccggtgatctacgagcgcgggctgttcgggatctaccatgactggtgcgagtccttcagcacctacccgaggtcctacgacctcctccatgccgaccacctgttctccaagctcaagcccaggtgcaaggtgttgccggtgatcgtggaggtggaccggatcctgaggccgaacggcaagctcatcgtgcgggacgacaaggagacggtggacgagatccagggcgtggtgaggtctttgcagtgggaggtcaggatgaccgtgtccaagaacaagcaggcaatgctgtgtgcgaggaagacgacgtggcggcccacggaaatcgagaccagatgacctaaccgtgtagttgtttcaaaacacgtaagtacagaacagatcgatctacacacttggtgctgcagtattgcaataactaagtgagctagtccttatatgac

SEQ ID NO: 14152 - DNA, 323 bp, Zea mays
  Clone ID: MRT4577_112897C.1
aaacaagaagctttgttccacattaagttacaagggggaaggaaagtttttctttaaaaacaaaagaacaattttttctttaaaacacagtgtttaattttaaagtgggtgaatgaatgctttaaacatttggttaataattcaataaggggttttttgcacgcactaaaattttgttttttttgacacccaatttatcacctttgttcagccagtggccaggtgcattttttgggccctttaatgtttttttcatttcaataattttcaaaagttttacttttttattttggggccattgaaaatttatttttttttttaat

SEQ ID NO: 14153 - DNA, 225 bp, Zea mays
  Clone ID: MRT4577_112898C.1
aaagggggggagatttcacgtttcaaggcccccacaaaaaattcaagggtcaaacctggtccatggcaaacacaggtttgcagtcttaaaaacgggatctggaacaaagcccaaaaaacacaacgggacggggaacaaaggtcaaaaatcttaaaagctcaaaaagacccagaacaaatcatccatcactcccccgggggggttttttaacctttccggaccccg

SEQ ID NO: 14154 - DNA, 1374 bp, Zea mays
  Clone ID: MRT4577_112899C.1
gggtacctcgaggccggccgggatcctccgttgcctgccagacctaggctatttcccgatcagaccttttatttcccgattagacctattcctctctcggcctcccaccgccaccggcggcgacgagtaactcgcccgctgaccccagcaggcagccatgggagggcacggcgggttgaacatcctgccgcagaagcggtggaacgtctataacttcgacaaccgtgagaaggtgcaaaaagacgaggccgccgccgcccgggaggagcagctccagcgcgaggcggaacgccgccgcgagtcggatctacgcctcgctgcactacgccgtaaccgcggcctggtccaggcggagacgccccccgctcctccatctcaccccgccggccccgctgatccggcggacgcccttccttccccggcggacgcccttccttccccggcaacggatggagaccacatcaacctcttctcaggtggatcaggcgtcgccactgatttcgatgcgctcgcctcggccagtggtgggaggggcgcggctcgggagcgggagcctgatgccgaccctaaccctaagaagcggaagaagaaggaagaggaggtgagggttgtggggcccgatgaggagaagtacaggctgggctacggccttgccgggaagggcgtggcggtgccctggtacatgtcgagccctgcagcggcagcggccaaggaggggaggggcagagatgcaagggagggtaacggggtgaagaagagtggagggaagaagagcatcgaagagctgagggaggagaggaagaagagagaggccaaggagaaggaacgcgagcgagccatccttgttgctgcagggaggaaggagagacaggtggatcgggggcgccagtcaagatgggctcggtgatgtaaggattttcatggtataatgtccaagaatactaaggaattaaggataagtcatcgaaccgggcatggcctgactaccttaccatgcagatgcatgtggctgcaaaaattacaccgttcagttgccaaaggatagttgtgagcagtccaagagcatcatgatatcagtaacaagaagattgtatcatttgttggaaatcaatttatttggatctttttttgtaaaatattccgtgtaatatactgagaatgcaatgaagtcatgaagctagcagtacatgtaacacaggtgttgcttgctgtttgtaaagctatttacttggattgccccgcccttcccccctttttttgaaatttcttcaatggcagataacttcaaaaaaaaaaaaaaaaaaaaaaaaaaaaaaaaaaaaaaaaaaaaaaaaaaaaaaaaaaaaaaaaaaaaaaaaaaaaaaaaaaaaaaaa

SEQ ID NO: 14155 - DNA, 523 bp, Zea mays
  Clone ID: MRT4577_11289C.1
tcgagcggccgcccgggcaggtacaagcttttttttttttttttttttttttttattttttttttttttttttttttctttttttttttttaatttttttcctgttgttttctgggtatttgggccaaaaacactccaaaaaccaacacccgctttgttcacggaaaacaagggaaaaaagtgaccctaacccaaactacggattggaaaccatcctgggggggggccaatggaaaccaagggccacgaccgcccaaagggccattggccgcccaccggggggcaccccgggcggaaccccgctaagggccaatcccggcccactggggggcataactgggggctccgggaaagggaccaaccctggcgaaaccacggacaaaaccagcccctgggtaaaaaggaaatccgggggcgccccacgaaagatacaacccggaataattaagtggaaagcccggggcgcctaacgggggggcaaacccacaataaagggggggcgctcaatggccccattcccggg

SEQ ID NO: 14156 - DNA, 484 bp, Zea mays
  Clone ID: MRT4577_1128C.1
gtgttgttatgcttaataaatttttactagtttacgagaaaggtcagccgggacgggccaaacgcgtggaaagggaaaaaagggaaagtgggggggggggaacaaattttttttttaagagaaagaactttctaaatggaaatggaattagtaggatttatacacaacatgacggaaaatctggctcagttgctaccagggccaacctggaggctgccggagcagagtcgtgaagtgggataacatggcgtcttgggccaggggagtcagcggccatcacatgaaatagcttaaaaaggggggtaaaagggataagggggggcagggttctgccaagggaaaggtctagaaggttaagggatggcaatggaatcccaactcaccccaggacaagccgtggcacggaatgtccatttttggtcatttgaaggactagcttccctttggtcccaactttgcccaggggtggatggtgaaaaaggga

SEQ ID NO: 14157 - DNA, 323 bp, Zea mays
  Clone ID: MRT4577_112900C.1
gggcccccaaaaaacggggggtttcaaaccctgattggggaatttttttaaagcaaacttgaattgccgggaaacatttggtccccaaatttttttttagggtcaggcagtaaaaattgaaaccggggaattttttataaccccgggaatggccgaattttttacttccgtttgacccttgttttgctttaaaaaggggcccttgatttttgggccccaaaatgggaatttttttttgggggcccctgtttccattccctcatttaatttgggaacagggcaccctttttttaatgcctgttcggacctttttaaaaaggggg

SEQ ID NO: 14158 - DNA, 288 bp, Zea mays
  Clone ID: MRT4577_112901C.1
gacctatcttttagtctaatctaaactacccacgaatctcaatgaccaagaaaagaggtggcgattagctgtgctgaagaggttagaataccaagaatccaacagagagatgattctgttcagtgcatctcatctaagacgtatctggttcaagctagtaaatagagctcggggtataaatagagcatccagtcgaaaaccgaccgactcctcttgttatagcatgacggggtagaattacatttttatttactacactacatatcctgggaaggcactgacctaagg

SEQ ID NO: 14159 - DNA, 178 bp, Zea mays
  Clone ID: MRT4577_112902C.1
acagacagacggcgatttttatttatatttctaccaggggaacaagggcaaatttatggaccatactcaagtgagcacattcgacaaaggcaggtttggttaccttgattacaaatacttctacaagaaggacatcacaaagaactacgatgtctacttatttgccgtagcgctgttt

SEQ ID NO: 14160 - DNA, 527 bp, Zea mays
  Clone ID: MRT4577_112903C.1
gctgcccatcgaggtgtactcaggccaaagcacaaatcttacagcaagcaaacggttcctggaattcacggatacaagcagttcaggctgacggctacgactgctggtccaaggaagcaaacaatgcaagcggagccggcgcaacggtggcctgagtacagcataggatgcatgcacgtacacgaggagaaactaaacggcggccaacggcgagagagagctggatgctctagctgtgctgaacacccctaggacgaacggctttggcttttattaatcagaggaggggagctgctcaaggttgtgggagataaagagcagctcgtaaatgaccccgtcaaggtcgtcgccgatgaggggcccgacccagaacacccactggtagacctactcccagctgacgagggtggagccgaacgacacggctgtgttcatggactcgccgctgaaggcgccgtccaccagaatgttggccaccacgatgaagcccttggctatgggggccatggtgtccatgctgtccttct

SEQ ID NO: 14161 - DNA, 446 bp, Zea mays
  Clone ID: MRT4577_112904C.1
ccggccagcgactggggatatgtcggacacggagacgatcccggggtagacgaccccctccacgccgctgctcaaggacgagctcgacatcgtgatccctacgagccgtaacctcgacttcgtgcagatgtggtgtcccttcttcaagacctaccacctcatcttcgcgcatgtacggtgacccgacctatgaccatcaaggggaccgaggggttcaactacgagctctacaaccgcaacgacatcaaccggatcctgcgaggccataggactcgtggatctgcttcaaggactccgcctgccgctgcttcggctacatggtctccaagaagaagtagatgtacaccatcgacgactactgtcttcgttggaaaggacccatctgtcaaggatatcagtgctcttgagcagcacatcatgaacctcctcagcccatccaccccgat

SEQ ID NO: 14162 - DNA, 226 bp, Zea mays
  Clone ID: MRT4577_112905C.1
cccacgcgtccgaaatgaggaaatcaggagaaaaattcgtgcaaaggcatatgttataacggctgcttttcgattcaaagaggctggccgagtccatgttcggtctgaagaaacaaaagtaccgattgctgatggtgcacttggctttggaatcaaagaagacgagattacagcactgacaagggatcacaactactctggtctgcagcaatatggaggggtttct

SEQ ID NO: 14163 - DNA, 464 bp, Zea mays
  unsure (1)..(464): unsure at all n locations
  Clone ID: MRT4577_112906C.1
attatcaatataatccttggactggntttttttttttttttttttttttttttttttttttttttttttttttttttttttttttttttttttaggggaaaaagcaaagcaaatcggcaatggaaggccacccaccccaaaatggcaggccccccaaaaaaaaaacgaaaaatttttttgggccgggaagggaacaaaaaattctcattaaaggccgggactttttcttccttgattgggggcaagttttgggggggcaaaaattaccccccggggtctttgaagaaagggggggtgggctccctttgggggaaccccccacatggggggccggggtttcccaaaacacagttccttgggccccttggcccggggcccttttatccttccttttgggacggaaacgggcccgctctttcctggggagccatctttgggaaccggggggcgcccccgggtttggg

SEQ ID NO: 14164 - DNA, 1744 bp, Zea mays
  Clone ID: MRT4577_112907C.1
cccacgcgtccgcccacgcgtccgccacgcgtccggaggatcattgtccttattattattggctaaggcagagcgaagaactctaccactactatgtgcagacctcaagggataccttttgcttggtgatacttctgaccctttcattcccattttactgtttatatgtcatacacttgttcccaatgtcgttgtggccctgaacaagaccaaataaatgataaacacaaatgaatatcctccacagtaactgctaggccaccggaatatcagagaaaccttcattaacaaggtaagttatccagtcaagatagatgtgtcaagacctacagtgatgaaaaatattaaaaatatgtctactagatgcctcatttttcctttctgaggtagagcaaagcaccctgacactgctcttaaaggaactgccattttttcttcttttcgcagctggttgaccagtagtactattatttagtggctcaatctagcaaaataagaaaatttcacctcacattcaacatattgcttgtctactagaggagccaacactttagcaagatcttgaggcaagtatccaagcatctcctcgcattcagaccctgcatacaacacctacctgttctagaatgatttcagaacatttttcagtaggtactttttacagttatgttatgtactagaatgatttcggagaccatgtagatatccaaaatgaatctttttgttgtgaccgaagggagtaactttttaggttttgtggttactttttcaaaaattaactctttcgttcactataactacaaaatagtaagccagtgtactgcaagaacaatgttcttcttgaatactcaaaagaacaatgtccatcatggattctgctacgtgaccatgtggtccagcttgtttggtacacgaggccatatctttgtgttcgctttatgtatatgttccctttttattcctcagtttattcacttttatcttgtaattgcaggtttcttactcctgggtaggttccatttgtcttaaatagctttagagcaccaccttatgatatctccttttgactatgattattttcctatgaataatttttctgggaatactattaagataccaactaatctttgatatcctctaaaccaaacgcttcatgatagatgattcttgaggttgttgaatgaattggtcttgcgcatgtttgcaggcctttattggcccactaatctttgatacccactaatctttgtgctctcaattagctctaaactaatctttgatacccactaatatttgtgctctgaattggcctaattaatgatcaagtggtcatggtgtatgtcaactaatcactttctcttcatgtactactaggttataattatttgatgtggagtataaacatgcttcttgtaacatacatactgatggttaggtacctatcctagccgtgtttgcaggcctttcagattgaaccgattacttcaacggtgtcatacatgattggtagggatgtgatggagggagggggcaatgcaggtgcagcataataccctggttgtatttggcttgggagtaagtggatgttagcaatagtggagcatgtgtgggaagcggaggccgatgacagctcttaccctttcaaagacaaaacttatcctctgaaagtcccaacacgtggaacactgaacctcttttatgtgtatgatgataaaaccgtttttttaccggcccgtccggtatt

SEQ ID NO: 14165 - DNA, 699 bp, Zea mays
  Clone ID: MRT4577_112908C.1
cctatagggcgattcggcgaggcgaggccggcccggcctacagatgcaaatcagtaccaggcgtgctctccgtgagctctacgcctctacctgtgtcttggcgacgactgggcgaccgacgacgcagccgtaggacaggcgaccgacgacgcagccgtaggataggcgaccaggtcttcctgttggctcttgcccttcgccggcgacgagcacccgccaggtcttgacacatctatcttgactggataacttaccttgttaatgaaggtttctctgatattccggtggcctagcagttactgtggaggatattcatttgtgtttatcatttatttggtcttgttcagggccacaacgacattgggaacaagtgtatgacatacaaacagtaaaatgggaaggaaagggtcagaagtatcaccaagcaaaaggtatcccttgaggtctgcacatagtagtggtagagttcttcgctctgccttagccaataataataaggacagtgagcctctgaatgcggctgctgctacccaagcagctgtgaaaaaaagaagtggcaaccagctagatagtcctaatagcactgtcaggctacttcgttctacatcaaaaaataaggacgaggcacatagcgggcctctaaatgacaggatcattgataagccagctgcaaagaaaaaaaaaaaaaaaaaagcggcc

SEQ ID NO: 14166 - DNA, 440 bp, Zea mays
  unsure (1)..(440): unsure at all n locations
  Clone ID: MRT4577_112909C.1
ggggggggggggccaaccagcaccaaagaaggaccgaacgccccaaagcaagagcaggccaaagaagaaccgcaaagagagcaacaagaaccacaagaaggagggcgggcagcaggccaagaaggaccacaagcgggcgaagcacccgcagagagaggggagcaacccacaggagagcaagcggaggcagagcaacaagnacaaggagagaaggagggagaccanaaccaggcagaaccacgacngagaggcgaccaacgagggcagngagcaccaacgcaacgaccagaaccgcccggacgagagcgagccaggcacgcacaagaagacagccaagccagccggccgcccaaaaggcacgggcccaccgggagaccgcccaaggggcccaggccgagcaggacggcgacaggccaaggncagaagacagggaagggacc

SEQ ID NO: 14167 - DNA, 109 bp, Zea mays
  Clone ID: MRT4577_11290C.1
ctcaaccgcgctggaggagcgcgctctttcctgatagaaacttgtaacaagtgggtgagcatgtaactgtgacagcatgttcggtattgtcagggatttagcactggca

SEQ ID NO: 14168 - DNA, 528 bp, Zea mays
  unsure (1)..(528): unsure at all n locations
  Clone ID: MRT4577_112910C.1
ggcgaatgggtacatcgagggcggcgggagtcagtgagggacgaatgaagtcgcctaattctttctatcgaattanctgccttcttcccccctctttcatcacctttttctaatctncactttacaccatattcaancccaatctttaactcaattatcccccccatctccaactcaaccatatccncatcacactctcatccaanaacatccacaacttccacatactttttccccatttcctaaaactacccaactacaaccatttnaccnttaacaaaccttctaaaatccctactaaaattctccacatcaccactcccaantccccttacccccaatcatacaaacacatcatatccacttnatttccactttctccatacaaccatttacctaatcacctcccctaatttnntcaaccatatcacctccctcaccattaaaccctatccttacctttcaaattaccatcttcctacttttaaccactcccanttcctcaatctccctcaccatctttttctt

SEQ ID NO: 14169 - DNA, 392 bp, Zea mays
  Clone ID: MRT4577_112911C.1
gcgcttgttcttctccccccgtgagctccagccgcctcttgctgtgcggtggaactcaagcgagcagccgatagcggcggaggagagatgagcgtgaccaagttcatcaagtgcgtcacggtgggggacggcgccgtcggcaagacctgcatgctcatctgctacaccagcaacaggttccccagcgattacatccccaccgtgttcgacaacttcagcgccaacgtctccgtcgacggcaacatcgtcaacctcggcctgtgggacaccgccgggcaagaggactacagcaggctgaggccgctgagctacagaggcgccgacgtcttcgtgctcgccttctccctcatcagcagcgcaagctacgagaatgtcctcaagaagtggatgcc

SEQ ID NO: 14170 - DNA, 247 bp, Zea mays
  unsure (1)..(247): unsure at all n locations
  Clone ID: MRT4577_112912C.1
atgtccttctcgagtgagccttccctagagtggggttgcaattcttatgggggcagccaacccgaannaccgttncttcgtcagcgagctaccctgaaccaccaacaacgactcgctttataatgccttcctctcctaccccaagaaactagaactacaatgtcatttccaaccggtagacgcagagctccaaaggattcccatcagcgtcctactgaatcatgtacaccatgctaaccagtttcac

SEQ ID NO: 14171 - DNA, 1444 bp, Zea mays
  Clone ID: MRT4577_112913C.1
cccacgcgtccgctatgagccaaataaagagagaagccgataaactgtgtttcacgtcccggcgatgagcccccgtgtggtcctcctcttcctcgccgccctccgcccctgcgccgccctcgtccgccttcactccaccactttttccttcactttccttgacgccccagcgcgctttggcccccgagtgagcggcgatgggatctgcggctccctgcgtgccgctgacccggccgaggcgtgtgagaccatcaaagaccgcggcggccgccgcggcgcgggcaggaaggctttcgtgctgatcgcgaggggcaactgcagctttgaggagaaggtgcgggcggcgcagcaagcggggttcgacgcctccatcgtgtacgacgatgaggagaaggccagcctttactccatggttggtgaatctgatggcatacacatacctgcgatatttgtttccaagatggctggtgaaacactaaagaagtttgccaggggtgaagatgaagagtgctgtattaactcgtcgatggatgagactgcagggacagtgttggtaatgtcatttgtgtcacttgttgtcatcatgtcagttcttgcttcttttctatttgctcgaaactgccgacttctacgccatggagttgataatcacccaccttacgtcaagaaacaagtggtggaaaagtttccctgctcagcgtacagtgctccctgttctagtgaagataatttccaggaagcttgtgcaatttgcttagaagactacaataatggtgatatgcttagacatctcccatgcaagcatgaatttcacaagatctgtattgattcttggctcacaaaatggggcatcttctgccctatatgcaagctagaagtaacattgggcgggtaggcacacttcattactgcatccaagtgctggcagttctattgaagattgttgatcttttgatccattgcgaggttcaatattcattttaatgattgatctttgagaatgaagtacagatctcagttcctcaggttgggccttgtagtgtgctactagactactgcgttcaggttaatatttcgatcatctgtttgatatccttgtttggtgtgtggaagagctcaaggagctctgctgctgataaatgtcagcacttctgttgcagtgtattgccctgtattcctagagaaattaggtgttgtgtgcaagcaaagtgtaatcgtaagtccaatgtaaaccccttttataccaggttacgttaccttgctcattttattttgtgggcacagataaatgctcgttaattaggcaggggttgatcttactctaaaaaattgtcctaaggctcagaaataacgatgtttgaagatgcatttgttgcaaaaaacgatgttgggatcagattttgatgaatttattttcctaaataaaaaattatacatataaaat

SEQ ID NO: 14172 - DNA, 437 bp, Zea mays
  Clone ID: MRT4577_112914C.1
ccggccgggttcctgtttccgcgcgcgagatcgccgccccgggtgggctctagatcccgatggcctcgcgccgccgcaccctgctcaaggtcatcatcctcggcgacagcggggttgggaagacgggggtgaaattcaccaagggagccatcattacatacagaaataccactcccgacatcgctgagaactaaacctgtggtgctcccaccaactacaacgccaaccaggagttcaagagcaaaaaggtcgtcctcatctcagacccagaagctaaaactaatactagaaatgcctatcacgatccttcataccccgagaatttttaataaaccaagggcaagggcgatgaccagatcatcgacgacgctgccaacgacacatttgtcatagccgaataggacaaagctaatggcaatcaccgaatgaaaaatatt

SEQ ID NO: 14173 - DNA, 393 bp, Zea mays
  Clone ID: MRT4577_112915C.1
atggcgtcgccgggtatgggtcacaacaccgctctgactcggcaaaaagatagcagtgctactacaaggggggaatgggacacccttgaccaagtaattaggaaagctagggagagattaccttacccaaaagggtcaagcggggagtgcgtcgctgcagagtatacggaggtcctcgggtcgaactgtctgtacagctttttggacgagggattcatatgcttccttctttctaacaccgtagcgggttttctcgaactagtggaactttggaaatgcctcgtagtgctaccctacatcgcctcctctatagaggtgtatgggattcatgaccccgtggaaggtgggtatcacggcttgtgggtaaatatgtgcaacctctatagagtgtaa

SEQ ID NO: 14174 - DNA, 176 bp, Zea mays
  unsure (1)..(176): unsure at all n locations
  Clone ID: MRT4577_112916C.1
ggctggtctgcntttnggtgcctcgacttcttgctagccgccggnttagtctttccctaccctagggctcaggttttggtgggaggtgntgangctgnnncgtgggcgacgaccgttctctgcgggtgttaagcttgttgactgccgttcaggctcaagtcttccgcgtttggctg

SEQ ID NO: 14175 - DNA, 366 bp, Zea mays
  Clone ID: MRT4577_112917C.1
tgaaaaaaaaaaaaaaaaaaaaaaaaaaaaaaaaaaaaaaaaaaaaaaaaaaaaaaaaaaaaaaaaaaaaaaaaaaaaaaaaaaaaaaaaaaaaaaaaaaaaaaaaaaaaaaaaggggcggccggttttaagggtcccaagtttccttccccgggcttgcaacgtattactttttttttggggccccctaatttaaattcccgggccgccgttttccaccgtcgggactggaaaacccttggggttccccaatttattggctttggggcccttccccttttccccggttggggtaaaagcaaaggggccccccccgatcgcctttcccaacatttccccaccctgaatgggaaaggggccccccct

SEQ ID NO: 14176 - DNA, 518 bp, Zea mays
  Clone ID: MRT4577_112918C.1
ggtgaaaaccatggcccaaggtcttaaaacacgggcgaccccggggcaaaaaagggccacatcgccgggggggaaaaaaaacaggcacgagcaaaaaaagggggccaacccaaccagaccagaggcaccccagggggggggcgactggaaaaaagaaaaaccaaaagtagaccggaaaaaaaaaaggcccaaaggggcccaaaggaccaaaaaagggagtaaaaaaaagaagggaaaaaaggggggggcccaacccaccccaccccgaaaagggggccccccacggggaggaaatgcggggggcctaaaaaggggggaccacccccccgggccggaaaaagggggccccccagataaagcggtggggggcggcttttttaaaaaaacaaacggggggggccccacccaaagggcccgccccgggcccccgggggggggggcgcctgtttaccgcgccccagcagggagaaacaagggggtgaacaacaccgggcccaaaaaaaaagatgggggggggg

SEQ ID NO: 14177 - DNA, 306 bp, Zea mays
  unsure (1)..(306): unsure at all n locations
  Clone ID: MRT4577_112919C.1
ccttaagtaattaccnggnnnannngganaannangggtgnctttttctgccacataaccaagactactgctgacaagtacaaaacgaatagctagctaactcagaatggccgggcatcgcttggagctggcaaatcaaaaccgcaatccatgctccggcggccacagggcacacgctacagctaacctagtcctgcgcttaccttttttccgcaggataatattgggcagtaggtgaaataaatcaacgcgggcaacgttccaggccgaaataacactccgtggtagttgaaagctatgtgatat

SEQ ID NO: 14178 - DNA, 355 bp, Zea mays
  Clone ID: MRT4577_11291C.1
gccaggggggggggccaaacttgggaaccaaaaaaagccaaaattccctcgggcccccggggggccccggtggccggggcccgttttttaggggaaaagggggttttgcgtggtttaaaatgccggtgggccggccggggaaaaacgacggggtatacaaaaaatggtcaagtttgggccacccattttggatgggcaaaaacaaaaggggcgggttttttggaacgggaactgggggggcgggtcacctcaacggggctaaccacgaggggaccaaaaagctcttttgggggaatgaaactgttatgggggggaacccggggctccccccggaaattcggagcggtccccggag

SEQ ID NO: 14179 - DNA, 323 bp, Zea mays
  Clone ID: MRT4577_112920C.1
gaaagaacaattggccccccctgggtttttttgattttttgggggggggccaaagggggaactccacccgcggaaacccccagattgggtttggttaagggtacaattttttggatgggagactaattttttatttcccccgcgggggcaccccatgtttttttgtttttaaaaattctcattacccccgggggggcaccatgttttgtttttaaaaatttaataggatcctggcatgcctcaacaaatttagggggaaatccaccaaaaactggcccccaagttacaggggaatgggggtcccaaccagcttttgggcttaa

SEQ ID NO: 14180 - DNA, 492 bp, Zea mays
  unsure (1)..(492): unsure at all n locations
  Clone ID: MRT4577_112921C.1
cccgccaggcgccaccgcacagcacagcggggngcagacagcggggcgggncngcaggcctgacgcggaagcacaacatgnngccatactaccacagcgngcttgccgtgtatgactgacactgtacaaaacccactgttgcggtctgacttccttgccactggctggagattgtgaggtgacgctgttggcgcctaggctgcctcagggggagcaagagctagtgcatgcaaccacgacgaggttgagggtgccggaaagagcatgatagctatgtgcgcgctgccgatggaggaacgttctgataagtacccctgggtcgacgaatagtgctatcctggtgagtcttcgactgggaaaccaagtgtgctacctgcgggcgacgtgggggggactgtgcgtgatgataatgcgtctgttgcggtgctgggtcacgcggagcatggggtcttcgtgcccagcgtgggacagagggctggacaccgcggggca

SEQ ID NO: 14181 - DNA, 400 bp, Zea mays
  Clone ID: MRT4577_112922C.1
accattttgaagccccatgatggtcaagctgtttactcagttgcttttcttacagcacctgaacgatcaaatcatataaatcaaagtacatcgggtcttctgaatcgagaagttaaaatttgggcttctactaatgaggatggctggttgttgccaagtgattctgagacttggaagtgtactcagacgttggaacttgttagttctctggaacctagagtcgaacaggcatttttcaaccatgttgcggtgctgccccaagcgagcctgattttgcttgcaattgctaaaacgaacgctatttatgccgtgcatgttgagtagggcccaaatcgtgcttcaactcgcttagactacatagcagatttcacattttgaatggccaaaattaagccttaaa

SEQ ID NO: 14182 - DNA, 198 bp, Zea mays
  unsure (1)..(198): unsure at all n locations
  Clone ID: MRT4577_112923C.1
atctataaatnatatnaaaaaaaaaaaaccaaaaaatccaataaaaaaagtaaaaaccaaactcctgcaacaaaataaagagccaaggtagggagacccctaacgatgcattacacagaggattccaaccttaaccacaaaagaggtggccgaacatcaaaactgaaggcaaaaaaagaagctaggccggatcacacc

SEQ ID NO: 14183 - DNA, 461 bp, Zea mays
  Clone ID: MRT4577_112924C.1
tggctaccctcgagtggtgtactaccccgtcttcacgcctccctcacaaaagaggccgtccttttccgacttcacaggggggacaggaaataggggactggtctcgattcggagacgaccttaggcgtatcttatccggcctattctgtgccggggttggcaccgccgaagacaacgacctccccgactacgtgatccagggccgcgtatattgcgacacctgccgggccgggttcgtgaccaatgtcaccgagtacatcgggggcgccaaggcgaggatggagtgcaagcacttcggcaccggcatagctggagcgctccatcggcggggtgaccgacggaaacgagacgtccaactatcgagctcaaggacagccacgaggaggacatctgcggggctgctccttgcaggagaggcccgcgcaagtactgggaccaggatgcaggcgggacaggggacc

SEQ ID NO: 14184 - DNA, 170 bp, Zea mays
  Clone ID: MRT4577_112925C.1
tatacacatgacagacagctgcacgaactgcatactgcctgcatgggattatttaaatataagcctccttgctaatgcgtactagtgaaagctcatggaacagctgtgggcctaccatctgatgatcacatcggctacaggatacaaggttacaatgcacttcatgctag

SEQ ID NO: 14185 - DNA, 336 bp, Zea mays
  Clone ID: MRT4577_112926C.1
acgctatcctgctgtagagcggccgctaggatggtcgcacatgccatggtttacactgtgtggactgttcagacgctcgggtgactgcggaaaccgcttacttaaatcttgctcttaggcttaatgttttttattcgggtctgtctaccttatcatttgttgtatttgacgataggttccgttatacgtactatgtgatggatcctagctgaattttcggctgtaagtttcggatccacttgggacgtggcatgtctaccggattcggtctcatctacgacaacgtcgactctgccaagaagttcgagcccaagtacaggcttatggcggacggtc

SEQ ID NO: 14186 - DNA, 1471 bp, Zea mays
  Clone ID: MRT4577_112927C.1
ggccgcttttttttttttttttttatttttttttttttttttttttattttttttttttttttttttttttttacatacctatcaattcatttatcaaactagtcaataaaaatagcaaaacagctcaccgtttcaatatctgactcgaatccgcgagatcggtaatgattttccggtctagacaatttgtcgagcgtttggcaggtacattacgagcttcacgcacaccaccacatgacgaactctcaacaccgatcggacttcatccgagtaactcggcgaaattaacttcaactcgcagtcggtgtcgcacgaaggtgaaatgggcccaagggatgcgagcacgaaggcgcttgcacatcgacgcgaagagagaaaactagagcacgaagagacgctagtatccaggctgggcacgacgacaaccaaacagtgaagcacgcgcgggcagtcagggagcttcacgacgggtcacagctagaacaactggcaaggcgaagctcatcgacgaggtcgagcagaggatggcgagcgcgagcacacgccgagacttgccaaaaacacgaagacgatggcatgctacacacatgaaaaacgaacgcaattccacggcagcttcacgaacgcgacgaggacgcaacaacaggagctacactcggcgatggaactcgacagcggcgatctgggcgagcgcagcagggagccgggacgagaccgcgaccgagcgagctctggccggcatgggcgcgacggccagggagctacgcgcagaggcgaagcgaccgacgcgcagaatagggagcagagaagcagacgccgagctggggcgaactgcggtgcacaggagctaggcgcgcggtagagaccgagcgccatggggagcaagcagcgggcgcggctgtgagagagatccgtgcgggggaaattctgggtgccacgagagagagcagggctccggccgggcgcgcgcagaaaagaggacgagggcgctggggctgggcgcggtccgagcagagagggagatgagcgccgagctgaaggaggaagccgcggcgctaggagttccgagctgggactgggaagcaagggcgcggccaggcgagtaccaaagacgagacagggagctccggcgatgggaagtcagggacagcgggagagagaaacaggagatcggctgggggttttggcgaggccatggcgagcaagaagcacagcgcgcggcatgggagcttgagaggagggagctgggcgcagcgctgggcgctggccagtagggagtagcagagggcgcgcggtgatgagagattaggggaaggaggccgagctggagctgagcgtgcgccatggaagccgtgcggtcggccattgagatgggcagagggagcgcacaggaactccatggctcaagagcgagcaagaaaaaatcagggagcaagggctcgcggggaggatcccggccgacctcggggg

SEQ ID NO: 14187 - DNA, 321 bp, Zea mays
  Clone ID: MRT4577_112928C.1
ccttgaaacacccccaaccaaaaaaaaacagctccattaaaccaaaaaaaaattcccaaaccaaatttaaaaagggggcaaaaacgggaggcagggaaggacccttaagccggaaaaatgcaaaaagccaataagccaaaccatcaaactaaaatctctttagcaaaaaacgggaaaagctaaaccttccacaatgtctcggggacgccaaccaaccctgggttcttaagggtccagtcccccggccccgaccaccccaaaggcgaactcccgcaaattggcggcccgccccttggggacccgccctctggcccacccccg

SEQ ID NO: 14188 - DNA, 627 bp, Zea mays
  Clone ID: MRT4577_112929C.1
cggccgctcgaggcggcgggccgggagtacatgccaccccacgaacgaagccccttcacgaaccacacagctgtggccgtgccgagacagcccgcacccgctccacccctacaaagtgagcgagtataaactcgccgcgcaccacccattgctcgccgtttccgtccccttccttcgagcgtcgtctgcgagagactgcaagtgactgcctccgtgtgcgggtggtgtctgggagcggggatggcgacgcacttcgtgctcaacaccggcgccaagatcccctccgtggggctcggcacctggcagtccgaccccggcatcgtcggcgaggccgtctacgccgccgtcaaggcggggtaccggcacatcgactgcgccagggcctacaacaacgagaaggaggtgggtttggctctgaagaagctgtttgaagagagtgtagtcaagcgtgaggatctgtttatcacctctaagctatggtgtggtcatcatgccccagaagatgtgcctgaggcacttggggattctctcgatgacttgcagcttgactacttggatctttaccttatccattggccatttagagtcaggaagggaacaagcattggcaaccctgaaaattcttac

SEQ ID NO: 14189 - DNA, 285 bp, Zea mays
  Clone ID: MRT4577_11292C.1
gggccaaaatattttcttttataaccggggaagcatttttttacatttttgaaaaaaaaggtcccccttttaaaaaaaaaaaaacagggcttcaatatgtgacctcaaatccccaaaatcggcaggctttttttataggttttatacaaaaaatattctcacctttgcaagaattgggtgaaccagcattcagcttccattttagctaacaaaatattcccaatctaacaaaccggttaggatcttctggcagctcgggcgatttttaagctcaaaccaacaatt

SEQ ID NO: 14190 - DNA, 858 bp, Zea mays
  unsure (1)..(858): unsure at all n locations
  Clone ID: MRT4577_112930C.1
tttctctgccataggcttattatttagctgtgccttttgcagttcctataatagcacaggcctgtgctggccagcatttgcaacccaaatcaatttgttgataccattttattgattgaatccatcctgccacatgcttttgcttctccctgttaacatatttttattgctgtcatgggctcatggcaatttaaacttttctcatatgtcatatatgaagtcaaacagttacacggcgtacattctgcttgaacatggttgtttgttcgcctggagcacggaaagggcgatcaccttcaccgccccctaaaaaaggttcaccttcaaagaaagtccgttcgccatcaccaccacttaaaaaggcttcaccccctaggaaagtgtcgcctcctgctgaatcagctgttctctgcattgatcatttatcaaggaatgttaatgaagctcacttgaaagagatatttggaaactttggcgaaatggtgaatgtggagctatcaatggaccgaatgggttaccttcctcgtggctatggatatattgaattcaagaagagagctgatgctgagaaggctcttcttcacatggatggtggtcaaattgatggaaatgttgttaagttgagattcactcttcaaccacgccaaagggctgcgtcacctatgaaagctccgccccctcctccaaaaagagatgctcttcagattgaaaaaggtgttagcagtgctgaaaaggatgcccagcagcgtcctaaggaatcatctccacgaaggaaaccagcttcacctctacggaaacgatctccanatcgaanggctgaatcacccagcgtncacctgacccatcacctaagcgccg

SEQ ID NO: 14191 - DNA, 288 bp, Zea mays
  Clone ID: MRT4577_112931C.1
gcggggggccgcccgcttgctctgctcctgcctatgcggggcggggtctggacgcagctcctatgcctgtcgtctctgtgggtcttctctttggaccggcttgaggccggttctcgatgctcttggctcctgccccctccacgaccgccgctcgttctcaccctggggcgcggggcggtactcccttccgttctgtcgcgctggccgcgaacgcgttcacctggggactatcttcgattcctcgtgccactgtccccgtgctcgctgcgcctgtgtgttctggaccgc

SEQ ID NO: 14192 - DNA, 266 bp, Zea mays
  Clone ID: MRT4577_112932C.1
attcggctcgaggtatgctccccctactgttcaacttcgacaagatgggtaccagggcctccattgaggcaagggctgccatacccatcccattggctaccacccactccaccatggcgaaaggggccgaggagggcatcaaggagccgcaaccgtagacagcgctcctagagcaagtcgaagcgcctacagtgacagaccggagcagcagaccaccatgtgcctagacgctggaggaagaaagaacgccaaggcataacgtatgc

SEQ ID NO: 14193 - DNA, 301 bp, Zea mays
  Clone ID: MRT4577_112933C.1
gagctggtcaacagaaccacattcaagggctacaggagtagaccgaatacatagaggcgagcgcgctgtaggtataaggcacgctagcgacatcgacgtgacagataaaggccctgaatcagcaatacagcttacagaagaggaagagaaggacgtaggcgacctgggatggatgccatacaaagaatacataaatgtatgcaagggggctttgcaattctctcgaatgcaaattgatgatgtgctactcacgtgcattcagatcgcatgaacatattggttaggaagggatgttcaaatt

SEQ ID NO: 14194 - DNA, 137 bp, Zea mays
  Clone ID: MRT4577_112934C.1
actcgagccgaatcggctcgacgagctcgagctgaagcgaggcgtagccgcattgggttgtactagagctcctagtgttgcactactactatatggagcgcgatctccacacgcgcgtgaacgctaggtacgtacac

SEQ ID NO: 14195 - DNA, 546 bp, Zea mays
  Clone ID: MRT4577_112935C.1
atggcgttagcctatgcagcagccaggctagtccacccatgcattggcatgggcattgtgtccaagcagcacccaagaacaccgccgccgtcctcctgctgcctacacctccaccacatcctctaccttaggcccgtcgccagcagccaccacttggcgcgccacttcgtcgacgtcaccaaggacgacaagccgcttgagccgccaccggcggcggctgcagagacagagagcacgcagcaggaggaggacgaggacggcgggccaaagttggacccgaggcggttcgaggagaagttcgcggtgctgaacacgaggggtccacgagtgccggtcctgcggctgcccgacgactggcggtgccccacctgcggcgccgcgcagtccttcttcgagagcaagagcgtggagatcgccgggttcgcgcagaaccagcagttcgggcagggcggcaaccccctcacctccggccagaagggactgctcatctacgacagcctcctaatcagcttcctcttcttcatctccggctacttcccgcaatga

SEQ ID NO: 14196 - DNA, 497 bp, Zea mays
  Clone ID: MRT4577_112936C.1
aagcgctccctcaacgaccacgtccgctccttcggctccaaccactgccccgtcgacgacgaggccgccgccccaccaaaggaccgcaccgtacgtttccacaatcggtgagatcgtctctgtcggctgctgctatagtacgtacgtagttgcgagtgaaccatgcatgcaaccagccgatgcgatcgaggaagatcaagaggtaactaattaagcacaagtacgtgtagcgtatttctttgggaatcaattcaaagcaaaagtatgaagaacatagctcaataagatggatggctctcgtgccaaattaagctgtgaagtagctgaattttcttctgccggtatcatgggctgcaggctgcgcaacccggcctcttcccatgcatgtagccagcttgtaaccggagaaaatttctcagcttcacaggctaatttaatttaattagtgtgcaatccaatatgcaaatgtacgagagacgaggatactggatactgag

SEQ ID NO: 14197 - DNA, 1192 bp, Zea mays
  Clone ID: MRT4577_112937C.1
atgtccatggccacgcaagcctccgccgccacgcgccacctgctggccgccgcctgggcgccggcggcgaagccgtggcagctgagctcgcagctcgcgctgccgtcgtcgtcctcccgcgggccggccacgctccgcgcgtccaccgaggaggtgagggagttgctgctcagtccgaactgctggttctacgcgaacccggcgatctccacgctcttgctctcgaagaaggactgcgcggcgccgcaggtggggcaccgccagtcgttgggcagctgcgcaaaggggaggcccggcggcatcggcattggcatgagcatggtgtccaagcagcacccaagaacaccgtcgccgtcctcctgctgcctacacctccaccacatcctctaccttaggcccgtcgcaagcagccaccacttggtgcgccactccgtcgacgtcaccaaggacgacaagccgcttgagccaccgccgccggcggctgcagagacagagagcacgcagcagcaggaggacgaggacggcgggccaaagctggacccgaggcggttcgaggagaagttcgcggtgctgaacacgggggtccacgagtgccggtcctgcgggtaccgctacgaccaggcggcgggggacccgtcgtacccagtgccgccgggcctccccttcgcgcagctgcccgacggctggcggtgccccacctgcggcgccgcgcagtccttcttcgagagcaagagcgtggagatcgccgggttcgcgcagaaccagcagttcgggctgggcggcaactccctcacctccggccagaagggcctgctcatctacggtagcctcctcatcggcttcctcttcttcatctccggctacttcctgcaatgatgacgccaacaacgactctttctgatctgatcttctttccgtttgtgtgaatagaatacttcgtccgtgcatgtactcctccccactcccagggaacaacattcatcatcaatcgactataaactcttggttttagattttttttttaaatgatgcggtgatcgttaagttcacaggaacaccaagcgcatatcccctccatggttgtaatatgtggacaacaaaactacaaactagacataaagcatgtcataggcacagtggtagaggagggtacgcgtggtgcacacatatcttatccaaccattgcctggcc

SEQ ID NO: 14198 - DNA, 641 bp, Zea mays
  Clone ID: MRT4577_112938C.1
tcccacgcgtccgcccacgcgtccgcccacgcgtccgcggacgcgtgggccgcggtctcgcccaccacccgctccggccggctcttgcgctagctgcatgctcgcgccgccctcctctccatcatccagtgctctctcctcttgcgattcgctcgctggcccggagcttcccttcccagaagcgcagcgcccatggccatggccatggggcaccgccagtcgggcagctgcgcaaaggtgaggcccggcggcatcggcatcggcattggcatgggcatggtgtccaagcagcaccaaagaacaccgccgccgtcctcttactgtctacacctccaccacatcctctaccttagacctgtcgccagcagccaccacttgacgcgccactccgtcgacgtcaccaaagacgacaagccgcttgagccgctgccgccggcggctgcagagacagagagcacgcagcagcaggaggacgaggacggcgggccaaagctggacccgaggcggttcgaggagaagttcgcggtgctgaacacgggggtccacgagtgccagtcctgcgggtaccgctacgaccaggcggcgggggacccgtcgtacccagtgccgccgggcctccccttcgcgcactgcccgatgac

SEQ ID NO: 14199 - DNA, 790 bp, Zea mays
  Clone ID: MRT4577_112939C.1
ccggccgggtttttgatccctccttccagagtgtggcgcaatgtgcaatttgtttcctccaaatggtcgtactcttggacagacaattgtttataagttggttgcagccaaaaatgctgcacatttaccttcgctaattagcctatcaagtgaagattgcgataaactatttgggttatttgtttcggagttcatattaactaacaaccacttgtatcagagagaagaattggatgtcttgagaacacttccaatgtataagacagttacaggaacatacaccagtctgttaggttccgatcattgcattctttctcctacagcattctttcacccgagcgatgctcggtgcctttcttgctcatcaaatgcacatttgtttcttcaagctttgggggttgaacaattaaatgatcatgaaatactagtgaagtttgcgttgcctggatttggaaataaaacagctcaagagcaggaagacattttgacctacttgtatgctaactggaaagatcttcaactgaactctgctgtagtagaaaccttgaaggagacaaactttgtggcaaatgcaaatgaattttgtaaagagtttttcaaacctgaggaattacttgacccttcagatgctctgttgacttctgtgttttctggggagataaataagttccctgctgaaaggttcatgtcagatggttggcttgttatactcagaaaagcaggccttaggacattcacagaagctgatatgataatacagtgcgcaagaaaatagaaccatgggacatga

SEQ ID NO: 14200 - DNA, 1850 bp, Zea mays
  Clone ID: MRT4577_11293C.1
cggctcgagcacggcatctaaagccataccatacaatacaacctccactgaaaccacttggcgcaaatcaatcagatccactgtcaaggcagaagctttcctctgaatttctttgttctatattttgacaacacaaaatgtactagatttgaaatcctaaaaatacatatcccagtgaataatggccaaccgcattgaagcaaattcgacagtaaccactttacgaacgggaaaaaataattaccatgatcactcatgggcagaaaaactagtgttgcgttcgcggcacagaaatgtagaaccactccggcctaactcttcaactccgccatgcgggctttgtataggcagatataagccatgtgccagtcacctccaccagatagtttcaaaatgtcttcctccttgcggatgtttggattgtcatcatcaaactcgatccattttccgtcatcttgctttacccagccaacatagtggccagagtctgcacttcttcccttgtgtgtcaagacagcaaccaaatcatagacgccagttaattgtttctttggtagagaagactcagctttgtcaatgtccatactggatgattccccagcgctactggatgatccctcattttctttaaagccactagctttcccttgtgctttcaatccaaactttgcattttctgcatctctcagcatctgccgaggtgcttggagtttctgtttcagttcatcagagcaaaattcataaacatccaattccagtgggtaatcaacttttcgtaaaatctttgccttttggtttgattcccttttccaaaagaagcgaacgaactgcacagtcaagtacctaggcagctcatttattcttgattctctagtataaactgcagttcgacccagtgtaggtgaagctttctcaagttctgtcttcaagccatgcttaattccctcatgaagatggttcacatcttgagatatatgacacttaagggaatatactgattctgtctccatgctctcctcaccactttctgcacagtggaccctgctcacgagatctatcccaaatagttgcttcatcggaagagctgcagattcacttgaatctgaggtaagagtttgagaaagcgtatacaccaactgtgtccagcattcttctgcatcctgttgcatgtagacattattatgctgctgcgcaaattgcgggtattttttacgcagtgtctgcaagaattgtagaggtgcaacagggcgaacactttgatcaagatcaccaaaggtattacgagtagcaacagtcaaattatgagaagcttggtcaatgccattacctcttacagtatctgaatagcttagcagcgctgacttcagctctggaacagaatgcagacattgcaatgtggaattcatatagcatgtattcccaaggttataaagaccagcactgtgacccagtgcaatcacttgctcttcttctggtagatcctcaacaaacactggacctttctccggagctttcacaatctcatcagccgtgcctatcatcatcaacttttggccatctttcactcccaaagtagaccaatctgcatcgtccttcaatattcctcccttcaccataattttttggcgttcaggtggcacaccagttagtgtgtacaactgagtcttgaaaacaatcggaggctggctagtgtcaatctctatgcctggaaagagctccttctgccatttcacgcttacggtcggcatgacggcggtgcggtgacgttgtggaaacggggtttacttgctgggggagaaaggaatgggggcagcacaggcaaatgcacaggagaactcgaaacggctcgg

SEQ ID NO: 14201 - DNA, 534 bp, Zea mays
  Clone ID: MRT4577_112940C.1
gtgaacgaaaaaaatgcataatatataagcaacgttgctgctatgtgctgtacaatgtgacagactgaagaaatccagtgagctgagagaatcctatactaatggcttcagctacgaaggccgtggtggtgccacgaaaagctgcacctagaccgtataaaaaccaaaaaacactaccctgttcggttttttgatgagttagatcaaattccggcccgttcattcctgacaagcgaacggcccctaaaaattcaggaaaatttcgacacgcgtgaagtctcgcatcgatgaaagaatagcaccacgggttccacgcttgcatgccacccaagcaaaagcaactctcaacactgcattttttttgcagagtacgacggaaggaagaaccaaaaggatttcagtgtatttgctggggcaaccacacacacagtgtttacagtacctgaactctgaattccaccgcttccccatgtccgtatccatagatcacaccagctggttttggtaccttttaggcgcgcctgatgcctgtgc

SEQ ID NO: 14202 - DNA, 250 bp, Zea mays
  Clone ID: MRT4577_112941C.1
aaaaaaaaattttcacagggccgaacattgggcttttattggggaaaggaacaggagttccctcccccacaattttttcttcaaaaaaaaaactggcaaaaaaagaacccaaaaagccctcccccccgatgctcaatcaagcaagggcctatcttttttaaaaagggaaaaaaaaaaaaaggggggattggaattgcctcccccaaaaggctgcccttaaaaaaccatcggctaagagggggaaaccctt

SEQ ID NO: 14203 - DNA, 1600 bp, Zea mays
  Clone ID: MRT4577_112942C.1
cccacgcgtccgggcaagatttgatgttagcatgttagcaccataaccttttttacagtatatgttgccttaatatttttggagataacctttaatattattgcatatgctcacattatctgtgtcccctagagtgatgcacgggcattgcgtgttgtgctgagtctgactggagtcaaggagggtctaagaggccatgttgttgtagagatgagtgatcttgataatgaacctttagtgaaactggttggtggtgaactaattgaaacagttgttgcccatgacgtgattggacgtctgatgatacaatgtgcactccaacctggccttgcacagatatgggaagacatattgggatttgaaaatgcagagttttatattaagcaatggccagaattggatggcatgcggtttggggatgtgttgatctcatttcctgatgccgtaccttgtggagtcaaggttgcttcaaaatctggaaagatcttgatgaatcctgatgatggttatgttttaagagaaggagatgaggtccttgttattgcagaagatgatgatacttatgctcctgcccctctaccagaggtgaataagggttttctgcctaacataccaacccctcccaaatatccagagaaaattttgttctgtggttggcgccgtgacatccatgatatgataatggttctggaagcatttcttgctccaggttctgaattatggatgttcaatgaagtgccggagaaggagagggagataaaactgactgacggtggtttggatataggcgggttaataaacattaaacttgtacataaagaaggcaatgctgttatcaggcgacacttggaaagcttgcctctggagacatttgactctatgagtcagtagaggactccattgtacattctgattcgcgttctttggccacacttcttcttattcgtgacattcagtctaagcgtctcccatcgaaggagctgaagtcacctcatcgttacaatggcttctctcacagtgcctggattagagaaatgcaacatgcatcagacaaatctataatcatcagcgaaatacttgattctagaacaagaaaccttgtatctgtctccaaaatcagcgattatgttctatcaaatgagcttgtaagtatggcactagcaatggtagcggaagacaaacaaataaacagagttcttgaagaactttttgctgaggagggaaatgagatgtgcattcggtctgctgaattttacctttatgagcaagaggaattgagtttctttgatattatggttagggcgcgtgagagagatgagattgtgattggctaccgtcttgctaacaccgaccaggctatcattaacccagaatataagtctcagattaggaagtggtcactagatgatgtctttgttgtcatctcaaaaggtgactaattttcaggagcgtcacttttttgtgtaagtgtatattctaatgctaatccgtgctaattgaaatgataaccggtcaaacatactgtaaagtacagtcctgatccaaacagtcagctatgtacatgttaaattgtagcattcaaccaatcttggcacaaaac

SEQ ID NO: 14204 - DNA, 185 bp, Zea mays
  Clone ID: MRT4577_112943C.1
attcggctcgagatcgagttctccgtctttttgcacatgtgaggcacgtccaacagggggggctatatgagcccgactggttaatccataatggagagcacaaacctctgggcacaggcatcctggatttagtaaacatgttgttaagagccatactgacaaatgttgctataccaagagagtct

SEQ ID NO: 14205 - DNA, 394 bp, Zea mays
  Clone ID: MRT4577_112944C.1
gcaacatataaagagctagacagattcaacgatcgagcatcaaccgcggccgggagataagatatcctgattctccatgctccttgggcttgctgcacgagctcctaccgcaaccattattccacagtggtcacaagctcctatcgcttttcttcttaccccataccaatgaccagcggagtcttgaatgactgaaaacccaattgtttaaccctacaggatccaacatgcaatcgcaacaggcatattaccattatgagccttgttcctgcaacaaccgtcagccctattacagcagttacctttggttcatttggtggctcagaacatcatgttacaacaactacaacaacttgtgctagcaaaccttgctgaatactgtcagcatcatcag

SEQ ID NO: 14206 - DNA, 499 bp, Zea mays
  Clone ID: MRT4577_112945C.1
ccggccgggagttgcgatcgcctcaaacaaggaaacacaatacaccggtaccaacccagcggggggacaacgcatgagcttcaccgcctcccacatacagtgatggggacgtagctgagcgcggcgcaccctgtgagggtacgaatgtactgatccgtccaagaccatctacatgtcagggcgaagtgagggataatacgctacctccggacggggattcgacgcctcctgggggggctacacctgcttcaggggcacgccagagcttgcatgagccgtcggaatatcgcctatcggcacatccgacatatgcaggtgacctgtccggcctgatggattgggagataagaatgactcaccacatggggcacagcttattacaccttcaggagctggtggatgctcaaatcagtgataaggccggaactctgaagttccgttgcacatgaaatctattctgtgtcttgagaagtaagaatgaccagattgctggattgac

SEQ ID NO: 14207 - DNA, 1178 bp, Zea mays
  unsure (1)..(1178): unsure at all n locations
  Clone ID: MRT4577_112946C.1
aaagaatttctgcactcccacccctcaatttttcccagccgccacagccattcttcctccctgtcttcttctctcacgtagcagctcccccattcctcctacacggcagcaggcagggagccgagctccaagcccccatgccgccgagctcctcccagggcgctggcccctctcccatggtcagccctctgctccctgcgctcgacgcccctgcagcagggcgctccttcttcctcggcgcgctgaagctttcccccatggcagcaagctcaagtttctcccatggcgacttcccatgttcttccctgctcggccagcaaccagggcatccaaagcctctgtgctcggcgtccttcttccaccttcggccgacctccaccttcctgctccatggacgcccaacagcagcgcccctccctctcctccacagnagcagcagctcgaccctcctctcctcgctggcgcaaacctctcccatggcgcgctgcagcagacgccctggagcatccccgccatggctcgcgacccggctttttccctgcatgcgtgctgctgcgcagtgcgccgttgacgctcgctaggtgctcgacgaaatgtgcagcaacctcgtcgtcttcgtgcgctgccggctcgctgtttggtggagccaatggacagcacgccgtgatgccgccgtgtgttcgctgtttttgcgcagccccgaacatcgatgtcgttcaccccagtgacatcgcgacgctccttgtttggttccacatcggcgttattttcatacgattaattgtgtatgtgtgctgttttatttttgtggaagagagaaccccgtgttttgcgagaagaagggaagccgctcgacgctcgtcgatgttcgtagcgatgcacaaatcggaatctccatcgtcctcacaaacatcgattgggtttgtttatggtgagccgatgcatgtcgctcttgatctactcgtttaattaatttgaatggatgtgtgtaaaatgtttcggttatgcgcattggtgggatcacgtttgcgattggagaacaagagtttattcgatgtatgcgatttgtagtttgtacaattatattttagtcgatgtggtgtacaattgtgttggagtgtgggtaggtataaaaatgttttggttataggccgtagcaataaagggaaaaaaaaaaa

SEQ ID NO: 14208 - DNA, 404 bp, Zea mays
  Clone ID: MRT4577_112947C.1
ccctccccccctggggcccctgggctgtcccggaacggccgcccccggcccgctggccttccccgtcctcccttcccgggggggggggagagccgggggcatccagggggaccgcgggcccccgggtgaaaaagttccccgccgccttttgctccaacctacaggctcacaaggcaaaaactgcaaggcctggggggcctaatggcgtacctgcccacactcaatcgctgtgcccccctggcccgcttccaagcgggaaaacccgacgcccccctggctttaagaaatcggcaacccccccgcagaaggtgtttttcgctctgggccccggggcggttcttttttttcccggggggccggccttcagcgttttgcccttaacccccccgccctgggggagttgg

SEQ ID NO: 14209 - DNA, 734 bp, Zea mays
  Clone ID: MRT4577_112948C.1
gtgcgcggcgcgccggccgggccggggacacttcactccagttcccatacacaaactccctcatcttcaaacccctaccatcaacacaatggcctcccttcactacctccctcccgtcaagccttcggccattgccctcggcactgccttcaaccacgccgtctctcttgcagtcctcggccccatcttcggtgatgcctaccgtcgcgcccagcaagcaaactccaaggaggagtacttccactccaaggaggccgccaccgccgccgcttcatggggaagctccatcctcggctccggtatccaggcctacggtgttggtgctctcatcaacgctaccggcaccctcacctacaagggagctgcctaccttggttctttgatcttctttgcttctgctgccccatcgattgtctcccaagtcgtcactgagaagcgacccatggacacgattgccattggtgccgttgcccgcgtcctcgagactgtcggcctcagcatgttcctcacctactggggtacccgcaccaaccccttcgactaagcgcctcataatgttccccgtaaaaagggcacaaggtgtttagggattctgctccgtctgcagcttgattggacagacaggacacagatgacatgagttttcttagcggaaagaagcggaaaattagccttttctctatgatgtaatatataccatcaatgaacaatgtaatttcacttcacttttggcc

SEQ ID NO: 14210 - DNA, 201 bp, Zea mays
  unsure (1)..(201): unsure at all n locations
  Clone ID: MRT4577_112949C.1
tctcaatcgagcagcgcacagccagataatctctcgctagagngccggccgtgtggctagctaaccacgagaagaagatagataatatcgctattgctttcgcgctcgcgctgcgagagncgtccccgccatgtcttcctcgccagcagacctctcctgcgtcctcacccgcggtctcatcgtctcgctgcgcactgtccg

SEQ ID NO: 14211 - DNA, 339 bp, Zea mays
  unsure (1)..(339): unsure at all n locations
  Clone ID: MRT4577_11294C.1
cgcgaccatggaagaggtctatgcgaacacgatgggagcgggggctctgctggacctctggacctcggccgtgcgaccgccgaggcctacgtatcctaacagaacgaggcggcctgacacggaccacctgtcgctgcagcggtggacgttcccgcccttctaccggctcggcgtcggttcttcttcggagtgcggcggcctccgcggcgtgatgattcgtggcagcagcattcccgggctcggcatgcccggcagtggtagcagcctacccgggttcaggttgaccggtagcggcaggatgcccctcgtcggnggaggactcgaaagatatgctgaaga

SEQ ID NO: 14212 - DNA, 1638 bp, Zea mays
  Clone ID: MRT4577_112950C.1
gcggcggtggcggtgctgctgatggcgacggggctgcgcgcgcagctgcgggtgggcttctacgacagctcgtgcccagcggcggagatcatcgtgcagcaggaggtgagcagggcggtggcggccaacccgggcctcgccgccggcctgctccgcctccacttccacgactgtttcgttgggggctgcgacgcgtccgtgctcatcgactccaccaagggcaacaccgcggagaaggacgccgggcccaacctcagcctgcggggcttcgaggtcgtcgatcgcatcaaggcgcgcgtcgagcaggcctgcttcggcgtcgtctcctgcgcggacatactcgcgttcgcggccagggacagcgtcgcactcgtaagtcactgctttttagtgtcagtggacgcctgccttttgattttaacccgacatgattagtctacatggatttggaatccaatgctggactagactgaaaagcatatgtgtctgttcgacctttttttgacgcacatgatgccgcgtgcagctgcctgaaagaactcgatgcattgccgggcccgggcatgggtccaactcccaactttatttttttacagtatttgcttactctccaatccatccatccatccatccatccatccgtacgtataggccggcgggaacgcgtaccaggtgccggcggggcggcgggacgggtccgtgtcgcgcgcgtcggacaccaacggcaacctgccgccgccgacggccaacgtcgcgcagctcacgcagatcttcggcaccaagggcctgacgcagaaggagatggtcatcctgtcgggcgcgcacaccatcggctcctcgcactgcagctccttcagcggccggctgtcggggtcggccacgacagcgggcgggcaggacccgaccatggacccggcgtacgtggcgcagctggcgcggcagtgcccgcagggcggcgacccgctcgtgcccatggactacgtctcccccaacgccttcgacgagggcttctacaagggcgtcatgtccaaccgcggcctgctgtcctcggaccaggcgctgctcagcgacaagaacaccgccgtgcaggtcgtcacctacgccaacgacccggccaccttccaggccgacttcgccgccgccatggtcaagatgggctccgtcggcgtgctcaccggcaccagcggcaaggtcagggccaactgcagagtcgcctgatccatcatcatcatcactcgtgtggagttgtagattcgttatattgatttggaccggacgacgtcgacgggatggcgtagcatagcatggcctgcttgcgcaattgtatgtatgccctgtacttgcgcgtgtatgggtttcgctgtgcaaattttcgttggctcccccgattgattgaggcgtgtgtgcgtgtgtgtctcttctgaatctgaatggaaaatctgtaacctgagctaaaactgctcgtgtactacccaatagttgcttcaaactacgatggattttttttccaaactatcacttccaaacacgcacaaatatgtactgtatttctcaatcaactaaggatcggagaaactggtttgtaaaggggattttgtaaacaccagtcaatcagacatgtaactcgacatgggccta

SEQ ID NO: 14213 - DNA, 339 bp, Zea mays
  Clone ID: MRT4577_112951C.1
aaaaaacaaggccccagggctcccccccacagcaacaccactggaaacaagggaggggccgaaaaacactgaacatggaccacaaaacagggccaactgacaaacacggaacatgtaccacatacagaagaacacaagacaaaaggagctagccccgaaaaggcatcggccacccccatctcaccttggcacgaaatggaaacccaaatggaccggacccccaaactgcaggggactgcactacacaccagttcaaagcaaccaaaagtctccagacccccgcgacaactggccaacacaactgcccaccccggcccaaaacggacgcgagggacaacc

SEQ ID NO: 14214 - DNA, 171 bp, Zea mays
  Clone ID: MRT4577_112952C.1
ccggccgggcttgccgccaggcaggccattaaccctcgttcctgtcgctcagtcacgacctccattcacatgttccccggaagtggcgcggtcagcatgaaccatggctgacttcaagggccccctcggcggtcacctcttcgcacccgaaggttcatgaacaaaccccct

SEQ ID NO: 14215 - DNA, 203 bp, Zea mays
  unsure (1)..(203): unsure at all n locations
  Clone ID: MRT4577_112953C.1
aatctgtatgtgatacacatntcacctgaacgccattgcttgtatcgacgactcactttatggagaaatgtaaatttacagttgggtagtgttgacctatattatcatttgtcaagatatgcagaggaacaacttttttaactatttgacctatttgtccgaggaagcgatgcggaacgccatctaaggggtgaacggtctag

SEQ ID NO: 14216 - DNA, 379 bp, Zea mays
  unsure (1)..(379): unsure at all n locations
  Clone ID: MRT4577_112954C.1
gtattgcgaccttttattanangaanntttgccgggtgcgggtttgcatatacaattggtgttgccgctacataaccatcattacggaataggtgacggaacagaaaaaggggctgctcgattttccatcgggaggaccaacttacacgaaatttaacagcaatgagactaattagcatacagatataaagagggccgttattccacacaggacgcatgctttttgcatgtgccaagataagctctaacgagcaaaccacactccggaacctaactcgtacgcaggagttccaaaacgggcacccaagaagaagaacctcaccactatgaggccttgacgcgggagctctcggggacggcgggagcctcacccttgaag

SEQ ID NO: 14217 - DNA, 1734 bp, Zea mays
  Clone ID: MRT4577_112955C.1
ttacttctttgctccgaaatgtatactaatcaagcgaccttcatcatcatacttataaaatggtgggtcttctgaattattgcttaggtcatgcttggcagctttcttctttattcggtctagacgcttcttggggcactcgcgaataagatgtccttcatttttgcagtagtagcaagcacctcttgctttgagttctttgcgagtcaactttgcttgaccaacaggggatgagggttgattgggtgtctgtatctcatatagctgagcctgacttgattcttctgtttgggaatccgtgtgtttcgtgacttttgcttgcggttgaggtggtctaatcatgtatccgaacatttttctattccttttgttgttcttcattccattcatcgaatatctctgtgactcatttttctcgctcgtagttgttaaggtaggaatattgtcgttggcaccgtttacttcatttccattggggttcatcattttcggacatatgtagtttactaacatttttccttcgggtgcactgatggtcttccttgatctcaagggacacttaaagataccatactttgttgcaaactgggcactgataagagaatgtgttgtacgaggatcatacaacacggtggcgatggttgtgtgaatgactagtgttccaaaaatcgccgccttatcatatggaatggttcctgtcactgcataacttatccttcctgtggtctctttccgttgtttattctttgttgatgcatgggtttgagggtgttgtcttttcttttggaccttattgatctccacatccttcttaggacaaccattaacaagatggccggtatcaccacagccaaagcaagcacgacttgataagttacatggtggagttgtctttacgttgttggcagaagtttctctgcatttttgttcatattccatgtctggagactgaggtagcttcatctcggaggtgatctgtagtgaacacttctcaagacagttacggaagtaatgaccttcacgtccacattgatagcaagcttttcttgaagttatttcttgactttttgcacgtttccctttttgtttcttggatctgatgcgaccatgaggctgaaactgtgtgcaagtaatagtccatccatcaatgtaacactcatgtgtttcttcttggggctgggcatccttgtgatgtttcctttttggaatactttgcaattcatcaactgacagtgcattaggtatgagagaatctgttattagttgttcttggggagacatttgtctttttatgccagaaaataaaatctggttcttctgttttgtagtttcactttcatttgtactgatcttaaccaagaagaatggtaatagatccaaagaatccataacaaaacttcttgtggagtagggataagacagagaatagggactcgacaatagctttgaaagggtttcttctggcaaactttgcttcaagttccgcaatcctagcttgatcatcttgtagtgcttctgagtagagtcttctgatagaccagaatcagacatttggaacatcaatatcataagcgagagtgatagatcaatcagtgctgtttcagtcgcggtggcgaacggcgtgcggatgcggacggtccggcgagttccatgggcggtccgagcacgacgaggcgatgtatggtccagccggggtgctgcgcggttgcgtcgacggtggtcggtgagcgccat

SEQ ID NO: 14218 - DNA, 357 bp, Zea mays
  Clone ID: MRT4577_112956C.1
acgacccacgcgtcgcgaacacctttcaccatatgtacgtccatatcgttgaacaacactggtcgacacaatgggggtggcgctctttgccctttgtctcctgtctattgattccagcgccaactattctcatacaatcggccggtgctgctgctagccaccgtcgtcggatcatataccgacgacagtgcatcttccacctccgaattacctgccacatacggcgcatatgacaccgccggtcacacactgccgtcgtctgacatttaacaccgtcgttccatgtacagtcaccagttcatctgcaaccgtcaccattccactatcctactcaacaacacatgcctgagcctcatc

SEQ ID NO: 14219 - DNA, 984 bp, Zea mays
  Clone ID: MRT4577_112957C.1
atggaaacatggaaaagtcaagaaataaccgcaagaaatgcttgctatctatgtggacgtgaagatcattaccttcgtaattgtcctaagaagagttcactaccgaacatccccgagataaagctatctcagtcttcagacatagaatatgaacaaaaatgcacagaaacttctatcaacgtcatgaaggcaactcaaccaagtaacttatcaagtcgtgcttgctttggctgtggtgataccggccatcttattaatggttgtcctaagaaggatgtggagatcaataaggtccaaaagaaaagacaacaccctcaaacccatgcatcaacaaagaataaacaacggaaagagaccaatggaaagataagttatgtagtaacaggaaccattcaaagtgataatgcagtaatttttggaacactgtgtcccttgagatcaaggaagaccatcagtgcacccgaaggaaaaatgttagtaaactacatatgtccaaaaatgatgaaccccaatggaaatgaagtaaatggtgccaacgacaatattcctaccttaacaactatgaacgagaaaaatgagtcacagagatattcgatgaatggaatgaagaacaacaaaaggaatagaaaaatgtttggatacatgattagtccaccccaaccacaagcaaaagccacgaaacacatggatacccaaacagaagaatcaagtcaagctcagctatatgagatacagacacccagtcaaccctcaccccctgttggtcaaacaaagttgactcgcaaagaactcaaagcaagaggtgcttgctactactgcaaaaatgaaggacatcttattcgcgaatgccccaagaagcgtctagatcgaataaagaagaaagctgccaagcatgacctaagcaataattcagaagacccgccattttataagtacgatgatgaaggtcgcttgattagtatacattacggagcaaagaaataa

SEQ ID NO: 14220 - DNA, 316 bp, Zea mays
  Clone ID: MRT4577_112958C.1
aattcggacgaggacccctctctctcaagtctccgcacttgttaacgagaagagagcagccgaggatgcgcaccgaagccctcgcggggcctgctcctctggcggggggcgtgctggcgctggcgcgcgcggcctgacccgacaactggtgaagacagaagtgacggtgcagaacctgtcagccacggcctacctgaccgtgcccagcgccgtgtcgggcctaccgtgaccggcgccccagtcccgggctgtggcgggcgctgccgcgccgacgccgcagtgggagtcacgcgcgcacggggtctctactggccca

SEQ ID NO: 14221 - DNA, 619 bp, Zea mays
  unsure (1)..(619): unsure at all n locations
  Clone ID: MRT4577_112959C.1
atggnggttttctaaacacatggttctctcagacaactattaacaagatggttgatatcaccacaaccaaagcaagcacgacttgataagttacatggtggagttgtctttacgttgttggtagaagtttctctgcatttttgttcatattccatgtctgaagactgagatagcttcatctcggaggtgatctgtagtgaactcttctcaggacagttacgaaagtaatgaccttcacgtccacattgatagcaagcttttcttgaagttatttcttgactttttccatgtttccttttttgtttcttggacctgatgcgaacacgaggctgaaactgtgtgcaagtaatagtccatccatcaatgtaacactcctgtgtttcttcttggggctgggcatccttgtgatgtttcctttttggaataccttgcgattcatcaactgacagtgcattagtttcactttcgtttatactgatctggcgacaaggaattccatagtactcacaacaacaacatgttccaaggtcacttgtttgttggtttggttgggcatccttttgtgtcttgaatgtctgttcatcaactattttatttaaagtgttgttttgacttgccc

SEQ ID NO: 14222 - DNA, 854 bp, Zea mays
  unsure (1)..(854): unsure at all n locations
  Clone ID: MRT4577_11295C.1
cagtggaccctgctcacgagatctatcccanatagttgcttcatcggaagagctgcagattcacttgaatctgaggtaagagtntgagaaagcgtatacaccaactgtgtccagcattcttctgcatcctgtcaagatcaccaaaggtattacgagtagcaacagtcaaattatgagaagcttggtcaatgccattacctcttacagtatctgaatagcttagcagcgctgacttcagctctggaacagaatgcagacattgcaatgtggaattcatatagcatgtattcccaaggttataaagaccagcactgtgacccagtgcaatcacttgctcttcttctggtagatcctcaacaaacactggacctttctccggagctttcacaatctcatcagccgtgcctatcatcatcaacttttggccatctttcactcccaaagtagaccaatctgcatcgtccttcaatattcctcccttcaccataattttttggcgttcaggtggcacaccagttagtgtgtacaactgagtcttgaaaacaatcggaggctggctagtgtcaatctctatgcctggaaagagctccttctgccatttcacgcttacggtcggcatgacggcggtgcggtgacgttgtggaaacggggtcacggcatccatcgatccatctaaagccataccatacagtacaacctcctctcctctccatacactgctccgcgtagcagctagcgggatccgaaaaatggagagccagaacacttgcgaagcagtgttgccggtgagcactctgagcgagcctctcctcccggggaaagccgacgacgacgacctggaggcgcagctcacc

SEQ ID NO: 14223 - DNA, 2661 bp, Zea mays
  Clone ID: MRT4577_112960C.1
atggagtggataagaaagacagagaattttattgatcgtgcttttgctttgtcaagaggcacggatgtgcgatgtccatgtagtatgtgtcgggtttgtagatgccaagacaagagaactctgtcggggcacctttgcaaatatggctacatgcctaactatgaagtctgggtgtatcacagcgaggagttgccccgtgaaaatgtgtttgaagcccacaacaatgatgacgtggaatatgatagaatggaagagatgcttcaagatttaagggaggatcctgattttgtgtttccaccacatagtaaggagctacctccagatgttaaaaagttctttgacctccttaaggctgcagaagaaccattgcatgaacacacaaaagtttccatccttgctttcgtgactcgacttatggctattaagtctaagtacgtgttctcgaacaattgttacaacgagctcttgatcttaatcagcgaagtgtttccaccaaatcacaagatgccgaaagacgtgtatcaatgcaggaaactgctctctggtctagatggggtagagacagaggaggggagacaggtgggaaatgttgatgatgaggtagagacagaggaggggagacaggtgggagatgatgatgaggtagagacagaggaggggaggcaggtgggagatgatgatgaggtagagacagaggaggcagagacatggtggggatgccatgatactggtggttttggacatgatagccatagtggatggcgtgaatggcctgaggatgcaagtggatggccaagagatggagggtcaggagttgggggagctagtgggtcaagggaaggagaagcttgtggttttggaagtgggggagttggaggggcttgggtggatagtagtttcactggcacaggtcgtcgaaggcaagtaaagaaagtgttgggcaacatatgtcgtatgaaatggcctggattggtgatagaggatggtaaggaggtccctgtcacaagatgggatcaatatgcccttgcaataaatgcgcaacatgggaatgcacaagctgcagtttggcacgacttctggaaacattacaagttgcctgaaggagatactcatacggaacacgcacactccgtgttccataggaatgcggcaagtgttgttggggatatgatgtactatgctcgaatccagcattcgattccatggatagctgtcaatgatgctgcttggcatgcgttatgtcgttactgggcttcagttgaattcaaggcaaagtctgtgcgacacagttccaatcgtggaaccgagtcgtatcacaggtatggaggtgatgatcactttcgtttggcaaaacgaatggaagctagcactggtgcagtgcccagtgatgttcaaatataccttagggggcacagaggaccagatcctgcaaatccagatgtgttgtacagccaaaaggcaacagatcgtgtggctgcatatggcgaggcgatgactagtcagcacggaccagactatgactggaggacctcacctattgatcctcaggctgtgtatgcaagtggtggaaaagctcatggaaggtacacaatgtttgctaacgtcatcgactcgagccagacccctccagctaccttgccgacgcatgaacaagaggacaggttagactttgtcgataccctcttgaatagtggaggtatcgatggtgatcggcgaccccatcttgttaatagttgtcataagaaagttgtggagatcaataaggtccaaaagaaaagaaaacaccctcaaactcatgcatcaacaaagaataaacaacggaaagagaccacaggaaagataagttatgcagtgacaggaaccattccatatgatgatgcagtaatttttggaacactagtcattcacacaaccatcgccatcgtgttgtatgatcctcgtacgacacattcctttatcagttcccagtttgcaacaaagtatggtatctttaagtgtcccttaagatcaagaaagaccatcagtacacccgaaggaaaaacgttagtgaactacatatgtccgaaagtaagcgttaaaatcaacgggatagattttccagctgatctcctagtcatagaaacaatgggaaaggatgtgattcttggaaagaattggttacaaagaactaaggcgatgatgaaccccaatggaaatgaagtaaatgatgccgacgacaatattcctaccttaacaactaggaacgagaaaaatgagtcacagaggtatttgatgaatggaatgaagaacaacaaaagaaatagaaaaatgtttggatacatgattagttcatctcaaccacaagcaaaagccccgaaacacatggatacccaaacagaagaatcaagtcagactcagctacatgagatacagacaccgaatcaaccctcaccccctgttggtcaagcaaagttgactcgtaaagaactcaaagcaagaggtggttgctattattgcaaaaatgaaggacatcttattcgcgaatgtcccaagaagcgtctagaccgaataaagaagaaagctgccaagcatgacctaagcaataattcagaagacccaccattttataagtacgatgatgaaggacgcttggttagtatacatttcggagcagagaagtaa

SEQ ID NO: 14224 - DNA, 617 bp, Zea mays
  Clone ID: MRT4577_112961C.1
ccgggcccccccctcgagtttttttttttttttttttttttttttttttttttttttttttttttttttttttttttttttttttttcaaggacaatgtttatctgcccgtttttttttaaactttgggggatgaaacatcctgaacaaagtttaattttctccacaaacaaaaggacaaaaaggggcccagaggggcccaaaagggccaaactggggcttgcaatgcccactaaaatgaccctacaacagtttaaaagtttttgccattgttaattgaatttttttaaaattttaaacagccggggtttttttttgctcaaccgggaagtttttgatccccacaaggcccccaactttgttgaaaacccccaatctttttataaaatcttccctggagggggaagctgaaatacatatcctacctttcccaagtaaaaggggcggggcaggaaatgcaacagtaacaacagcaacggtttgcctaaggccctcctttgaaaatgcaggatttttaccaggattgtaaagcttgataggcttgacaggggaatttttttttccaaaaacctaaaaaccctttttttggaacctccgagcggaaaaaaattgctgttt

SEQ ID NO: 14225 - DNA, 339 bp, Zea mays
  Clone ID: MRT4577_112962C.1
ggggggggcaacccaaaaaagttttttcccaaaaccgtttggggacaaaggggcctacccgaactcccgcacaaaataaactttaaggccgtttttcccctagtttttcccccccccgtttaaaagcgaccaaaccgcataggggtccaaatggcccttctcaatccctcccccgccattggggccgggcccaaaaaacgcctacccgcgcttgccggggatgcggggggcaacctggatttttttgggcatgagggggacccccttggcggggatggcccaaaggttggggtcctcaaacaggccgacaaggtaggccccgggggtttcctggggggc

SEQ ID NO: 14226 - DNA, 442 bp, Zea mays
  Clone ID: MRT4577_112963C.1
cggactcaaaatctttgattagactgaaaatagaggtttaagcatactattaaacatgggggaaggatgattatactcactttagtatgaaagggcaacaaggctttattagagattctatatcgcatacaatatcttacgctcattgtttagttgctcaaaatctgacataacagactctgaaaaagaccttgacctgctttccattgaagatttccgaatgctccttaagtttgaggcctcaatgcgatgcctaatgacccgagaactcatggggcccaaagttgaggccattatagatgtccctatgattgtgactccaattgcaagccacttttggtgcttccccaccactacaaatgacagtgctctgaaggccacagagataagctcacaagccaaccacattagtttgttaatgatggccatcatctggttcttt

SEQ ID NO: 14227 - DNA, 891 bp, Zea mays
  Clone ID: MRT4577_112964C.1
tcaattattgcttaggtcatgcttggcagatttcttctctattcggtctagacgcttcttggggcattcgcgaataagatgtccttcgtttttgcagtagtagcaagcacctcttgctttgagttctttgcgagtcaactttgcttgaccaacagggggtgagggttgactgggtgtctgtatctcatataactgggtctgacttgattcttctgtttgggtatccaagtgtttcggggcttttgcttgtggttgagatgaactaatcatgtatccaaacatttttctattccttttgttgttcttcgttccattcatcgaatatctcggtgactcatttttctcgttcatagtcattaaggtaggaatattcttgttggcatcatttacttcatttccattggggttcatcatagttggacgtatgtagtttactaacatttttccttcgggtgcattgatagtcttccttgatctcaagggacacttaaagataccatactttgttgcaaactgggcactgataaaagaatgtgtcgtacgaggatcatacaacacggtggcgatagttgtgtgaatgactagtgttccaaaaattactgcatcatcatatggaatggttcttgtcactgcataacttatctttcttgtggtctctttctgttgtttattctttgttgatgcatgggtttgagggtgttgtcttttcttttggaccttattgatctccacatccttcttaggacaaccattaacaagatggccggtatcaccacatccaaagcaagcacgacctgatggtttatatggtggagttgtctttacgttgttggtagaagtttctgtgcatttttgttcatattccatgtctgatgactgagataacttcat

SEQ ID NO: 14228 - DNA, 231 bp, Zea mays
  Clone ID: MRT4577_112965C.1
aacaacgggggtcgtatcgacaagctcaaacaataatgcatgtcgcccgactccaggttgcgaatgatgccttaacacaaacactgaccgacaaataagatagcactccgttggggggaccaagctttactggtcaccctcaaccaccacatctgcgctcaccaaggagccgaagatggcagagccgttcaatgattactggccttgctctgctaggaggacactttcttg

SEQ ID NO: 14229 - DNA, 2179 bp, Zea mays
  Clone ID: MRT4577_112966C.1
cattcaaacaataatttttccctatgtatattttttaacaatttcatcattatcgttttgtaaaaatgagattttattcacaagatcagatccataaattggattcacaaatcgattcaaagaagatatatgcttcgacatgagtgcatcaaacacttggtaagattttactacttaagaaattgtttaattttcttataccatttcattatttgaaaatataaatattttcctttctactgccaactaataattcaaactggattgttttcagttgatataatttagggtgttacaaaatctacccctctaaaaagaatctcgtcctcgagattagggaaggttagcaagaaaacaaaggtgatacatggtttatttgtaggttcttagttctcattgaactcctccaaacttaaggaacttccttacttctttgctccaaaatgtatactaatcaagcgatcttcatcgtcgtacttatcactggttggtcttctggattattgtttgggtcttgcttggcagctttcttctctagtcggtctagacgcttcttggggcatttgcgaataagatgtccttcgtttttgcagtagtagcaagcacctcttgctttgagttctttgcgagtcaactttgcttgaccaatagggggtgagggttgattgggtgtctgtatctcatgtagctgagcctgacttgatccttcagtttgggtatccatatgttttgtggcttttgcttgtggttgaggtgaactaatcatgtatcgaaacatttttctattccttttgttgttcttcattccattcatcggatatctcggtgactcatttttctcgttcatagtcgttaaggtaggaatattgtcgttgtcaccatttacttcatttccattggggttcatcattttcggacatatgtagttcgctaacactttcctttcaggtgtactgatggtctttcttgatcttaagggacacttgaagataccatactttgttgcaaactgggcactgataagagaatgtgttgtacgaggatcatacaacacggtggcgatggttgtgtgaatgactagtgttccaaaaattactgcatcatcatatggaatggttcctgtcactgcataacttatccttcctgtggactctttccgttgtttattctttgttgatgcatgggtttgagggcgttgtcttttcttttggaccttattgatctccacatccttcttaggacaaccattaacaagatggccgatatcaccacagccaaagcaagtacgacttgataagttacatggtggagttgtctttacgttgttggtagaagtttctgtgcatttttgttcatattccatgtctggagactgaggttgcttcatctcgggggtgtccgatagtgaactcttctcaggacagttacggaagtaatgaccttcacgtccacattgatagcaagcttttcttgaagttatttcttgactctttccatgtttccctttttgtttcttggacctgatgcgacgatggggctgaaactgtgtgcaggtgatagtccatccatcaatgtaacactcctgtgtttcttcttggggctgggcatccttgtgatgtttcctttttggaatactttgcaattcatcaactgacagtgcattaggtatgagagaatctgctataagttgttcttggggagacatttgtctgtttatgccataaaataaaatctggttcttctgttttgtagttttactttcgtttgtactgatctggcgacaaggaattccatagtactcacaacaacaacatgttccaaggtcacttgtttgttggtttggttgtgcatccttttgtgtcttgaaggtctgttcatcagctgtttcatttatagtgttgttttgacttgtcaacacaccacattccttgcatttagtgacatcacttgtagttgacattccaaggtctaacatcaagaagtctggtaatagatccaaaggatccataacaaaacttcttgcggagtggggataagatagagaatagggcatcgtcgatagcttcgagagggtttcttctggcaaacttcgcttcaagttccgcaatcctagcttgatcatcttgtagtgcttttgagtagagtcttttgatagaccaaaatcagacgggctttccat

SEQ ID NO: 14230 - DNA, 1695 bp, Zea mays
  Clone ID: MRT4577_112967C.1
accagcgactcccgtagctggaactcgctcgtcaaaaggagagctcagatccttcagcttttcctttcactctgcttctagctgctgcattcgacgcatatgctgaccaaaacatccagttctagtttctccactatagtttgatatatatacatatgtatagaaggtgtaataatctatcactcttgctcgttaccccactattgggggccattgggtacctcgaggccggccggggcacatgcactcctcctctcttgcccaccagcgactcccgtagctggaactcgctcgtcaaaaggaaaaggaaacacttcgcttcagctcgttgacagacgacgactcagagcaaaatgggtatactggtgattacggtggacctagactgctgtcgctgcagagccaagatcaccaaggtcctggactgtctcaaagaggagttctgcatcgagaaagtggagttcgatgacaagaaggagaagaaggtggtggtggtgcgtgggaagttcgacgccgagaagctctgcaagaaggtgtggtccaaggccgggaagatcgtgaaggggattgtcatcgctgaggtgtggccaataccagccccgcccaaggagtgcaagcctgaggcaccgaaatgttgcgactgtgagaagtgcaagcccaagcccaagcctgagccaccgaaatgttgcgactgtgagaagtgcaagcccaagcccaagcctgagccaccgaaatgttgccactgtgagaagtgcaagcccaagcctgagcctcccaaaccagagaaatgctgcagtgcctgttgtcactgcaagcctaagcctgatcccaaaccgctgatatgttgtgtctgttgccactgcaagccggagaagaaggaagagaagaaggaagaaaagaaggacgaaaagaagccggcgccggccaaaacggagtacaagtttgtgccctacccgtacccgctgccgaaccccgcgatgtgcccgagctggccgtggcagtgcccgcctcagcagcagtgccagtgctgccagaagcctccgcctccgccgcccaagtcgccgccgaagccgccgccgtgcacctgttcgagccacgccgcctgtgtctgcggcaagacaccgccggcggtctggccaccgatgccgccacgtcgtcgccgacgagagccggggctccgtcatgtgacgctacgcgcttgctttttcatgtactcgtcgctgttggccggttgctgtgctgcgatcggttctggacttcggtgctacttgggccggtgccgttctgtgtagtgaaggtacagtgcatcgtctgcagatgtgcttgcctacttacagtacagtgcatcgtctgctgacgtgctttcttcctacagtctcttatacgaacgtgtcacgccttgttttattgcagtaattgtgtagcttccagctataatttgctactctgtatatgtggtataagatgaattttcatagctcggctcaatggaaattcaagaagtctgtcaaaaaaaatttaaggagaagttggatataagctagttgttccgttggcagactaaaaaaaaaaaaaaggcccctggccatctttattggggtgtagataaagcagggaatatttccatgatgcgactgtggacatataatacagcaattcatttggaaagaccaaaaacgtatttacccccccccc

SEQ ID NO: 14231 - DNA, 884 bp, Zea mays
  unsure (1)..(884): unsure at all n locations
  Clone ID: MRT4577_112968C.1
ccggccgggagctccctccatagattgtgacgagcaccacttacgtccggtcgtctcccgaacaacacgggtcacacgaggcttagctccgcttcgtttcctttcgtttcgttatataacccgcgcgcccgccctcccctttgctgcacatgcactagctcctcctctcttgcccaccagcgactcccgtagctggaactcgctcgtcaaaaggaaaaggaaacacttcgcttcagctcgttgacagacgactcagagcaaaatgggtatactggtgattacggtggacctagactgctgtcgctgcagagccaagatcaccaaggtcctggactgtctcaaagaggagttctgcatcgagaaagtggagttcgatgacaagaaggagaagaaggtggtggtggtgcgtgggaagttcgacgccgagaagctctgcaagaaggtgtggtccaaggccgggaaaatcgtgaaggggattgtcatcgctgaggtgtggccaataccagccccgcccaaggagtgcaagcctgaggcaccgaaatgttgcgactgtgagaagtgcaagcccaagcccaagcctgagccaccgaaatgttgccactgtgagaagtgcaagcccaagcctgagcctcccaaaccagagaaatgctgcagtgcctgttgtcactgcaagcctaagcctgatcccaaaccgctgatatgttgtgtctgttgccactgcaagccggagaagaaggaagagaagaaggaagaaaagaggacgaaaagaagccgcgccggccaaaacgagtacaagtttgtgccctacccgtacccgctgccgaccccgcgatgtgcccgagctggccggtgcagtgcccgnctcagcagcagtgccagtgctg

SEQ ID NO: 14232 - DNA, 651 bp, Zea mays
  Clone ID: MRT4577_112969C.1
tgacaggtgacatgatgtttacttattcgtttggcagttttttttaatgccttttataactttctaggttgttatgttttcttatgctataccaataaaacacatgtcagttattattatttaagagaatgttctactacatagaggcaggtttgatgccggccattttaattatatttaaaacatattgccgaaaaatccaaagtcaaagctttgcggagcagggcatagattccgttgtgtgttgttgcctttttatgtagcagttttgttccagtttatagaatgcttgtgtacaccaggtccacggcagggcgccacgaattctaaggctggtggcaaacaaaggaagtgtagcaaaggctaatgcaaaaggcaatacaatgattacctgttgagctgaccctactttattatctctttctctgctgttgctgctccatatagtttttttccccagacagtattctctgagtctgaagatcaactttcatttgtaagaagattaagttagtatacagaagcgattcgtttaagcatgcacacacaggcaggacggatatccacgtcaatctattcactgcacatagaaatgatgaaatatggagggctacagggaaagcacaagggaaaaaaatattaatgcgtgct

SEQ ID NO: 14233 - DNA, 1147 bp, Zea mays
  unsure (1)..(1147): unsure at all n locations
  Clone ID: MRT4577_11296C.1
catttgttaggaaggacgatcgggggttgcctatttcgtacggcgcgggctgccaagatatttatctacctcaagaaaatttaatttggtcccacccgggttcccccggtcacgtcgttgtttaaccaggcccaacgttgtaaaactacgtgctaaaaaaaaattttttaggtccctctatagtacccgtaagacagtttatttcctttggaccggccctttttttttttttttttttttgttggtttttttttttttttttttttttttttttttcctctgaatttcttcgttctatattttgacaacacaaaatgtactagatttgaaatcctaaaaatacatatcccagtgaataatggccaaccgcattgaagcaaattcgacagtaaccactttacgaacgggaaaaaataattaccatgatcactcatgggcagaaaaactagtgttgcgttcgcggcacagaaatgtagaaccactccggcctaactcttcaactccgccatgcgggctttgtataggcagatataagccatgtgccagtcacctccaccagatagtttcanaatgtcttcctccttgcggatgtntgggttgtcatcatcaaactcgatccattttccgtcatctgctttacccagccaacatagtggccagagtctgcacttcttcccttgtgtgtcaagacagcaaccaaatcatagacgccagttaattgtttctttggtagagaagactcagctttgtcaatgtccatactggatgattccccagcgctactggatgatccctgaaatgaaatgccctaattgcatgacaatggattgaagacccaaacagaaagcttaatgtgacagttgatccatttatttcttcacagctattactgatgattcaatgataccctgagtacaacacaaccattacctcattttctttaaagccgctagctttcccttgtgctttcaatccaaactttgcattttctgcatctctcagcatctgccgaggtgcttggagtttctgtttcagttcatcagagcaaaattcataaacatccaattccagtgggtaatcaacttttcgtaaaatctttgccttttggtttgattccctttccaaaagaagcgaacgaactgcacag

SEQ ID NO: 14234 - DNA, 1404 bp, Zea mays
  Clone ID: MRT4577_112970C.1
aaaaaagagagatctttccatactcgaaactcgaacgtttcgttaaaaacagaagacgggagagggcgacagtagctagacgaacgtgccgtggaggaccaagcagccagccgaggaaaaggaaacacttcgcttcagctcgttgacagacgacgactcagagcaaaatgggtatactggtgattacggtggacctagactgctgtcgctgcagagccaagatcaccaaggtcctggactgtctcaaagaggagttctgcatcgagaaagtggagttcgatgacaagaaggagaagaaggtggtggtggtgcgtgggaagttcgacgccgagaagctctgcaagaaggtgtggtccaaggccgggaagatcgtgaaggggattgtcatcgctgaggtgtggccaataccagccccgcccaaggagtgcaagcctgaggcaccgaaatgttgcgactgtgggaagtgcaagcccaagcccaagcctgagccaccgaaatgttgcgactgtgacaagtgcaagcccaagcccaagcctgagccaccgaaatgttgccactggtgagaagtgcaagcccaagcctgagcctcccaaaccagagaaatgctgcagtgcctgttgtcactgcaagcctaagcctgatcccaaaccgctgatatgttgtgtctgttgccactgcaagccggagaagaaggaagagaagaaggaagaaaagaaggacgaaaagaagccggcgccggccaaaacggagtacaagtttgtgccctacccgtacccgctgccgaaccccgcgatgtgcccgagctggccgtggcagtgcccgcctcagcagcagtgccagtgctgccagaagcctccgcctccgccgcccaagtcgccgccgaagccgccgccgtgcacctgttcgagccacgccgcctgtgtctgcggcaagacaccgccggcggtctggccaccgatgccgccgccggtctggccgcccccgtggggcacctgcaacgtcgtcaccgaggagagcccgtgctccgtcatgtgacgctacgcgcttgctttgtcatgtactcgtcgctgttggcctgttgctgtgctgccatcggtactggacctcggtgctacttgggccggtgccattctgtgtagtgaaggtacagtgcatcgtctgcagatgtgcttgcctcctacagtctcttatacgaacgtgtcacgccttgttttattgcagtaattatgtagcttccagccataatttgctactctgtatatgtggtataagatgaattttcatagctcggctccatggaaattcaagaagtctgtcaaatccgcatggaaagccaaggacaagttaaaacatggatataagctagttgttccgttggtaaaaaaaaaaaaaaaaaaagcggcc

SEQ ID NO: 14235 - DNA, 224 bp, Zea mays
  Clone ID: MRT4577_112971C.1
tttctggttctatcccctcagctatggcgacagccgtcacgcccgccttcccggtgcgggactaccttcaccggcggcgggttcggctttacgccaaggcggacccgcattcccagggccgcctattacgcaccgggcgggtacgctatgctccggacgggggcggggctgagggcttgggccctcccgctttcgcgggcggcgaggagcaaaccccccaagag

SEQ ID NO: 14236 - DNA, 159 bp, Zea mays
  Clone ID: MRT4577_112972C.1
cagtcacgcatcagttcatcacagcataaattacagcggaaaatgggtgcgggcgcaggtgttcgttgtttgcaaagtagatgaagaaaatgtaaccgtcattcggtagaatgctctagcagccaagcccaacaggtgaacctgtgtgttaacagcaaa

SEQ ID NO: 14237 - DNA, 421 bp, Zea mays
  Clone ID: MRT4577_112973C.1
cgggctggttttactcatagggattcttttatgcttttggccgggggctgtatggcaatgcgtgtgtatagatgggccacagccgtctttgattggaagttagctagagactaattcaaaaacttagatttggaaaaacaattatggaatgggtgctggaccaagtttttgcataataactttttatttcaaacatggtgggtgcacttttactttataagctttttaagtacgaggcgcctgaatcaactatattggtacctatgtttgaacaacttgaaggagcttatgggcagaaaacaaccttgtagttggtgcccccgggaccaagtgaagaacctggtgggggcggccttgggatagtgttaggcgtccgggcaaagccccttgaaaaacttggagtagactgtaggcccgcatt

SEQ ID NO: 14238 - DNA, 350 bp, Zea mays
  Clone ID: MRT4577_112974C.1
tgtgacttgactaggcccatctaagcacactacatctccgggcgaggcggttaagggcggttcaccgtccactggcgactgggccgtccgacgttgccgccctgcctctccaccgtctccggcaacaagcaccaccaggtgtttattgtgtctctgatgcttagtgttgtggctcatgtccatgttcaataggatcttcgggaagcccaagtagcagtgccaactccaatgctttgtccactctggtcaagctaaatgttacacttgttctgctgttgtagaaagatatggtgctggtgaaaaaatcttactcctgatctttagagaaccttggagttcttgtttagcaa

SEQ ID NO: 14239 - DNA, 836 bp, Zea mays
  Clone ID: MRT4577_112975C.1
catggttgatgactcgcttgaccggcaacttggcgagtaccgtggtaaaataagtgctctagtaagttccaaacctgaaccttcgtcacttgcaagtgttgctggacaaaacgaatcagttggcggttttcacggccagcacgaaccaataactggttctgaggaacatggcagttcaattgttgatgcaccaacaaaaggcaggctatttgctgaggccgttgtgggtcataaggattttactgaatcagcagcaggaaaggcaagcagcgagaatgaggaagggcaagctgtctcgttagaagatgatgtcgggataagtacagacgcagatgaagagcttccggtatctgaagatgatccagaagtgctactgaggaggcttcaagagcttgctgatgagaattattcgactgggaacaactgttttgttttccctgaagtagtgaaggctgattcgatgattgatctttacttaaaccgcagcatgtcggccttagctagtgagtccgacgtttttgtaaaaggagcattcaatggttggagatggaaccgtttcactgaaacaatgcatagaagcgaattaagaggggattggtggtgctgcgagctctacattcccaagcaggcatacagattagactttgtattctttaatggtgacactgtctatgaaaacaacaatcacaatgattttttcctggaaatagaaagtggcatagatgaacactcatttgaggatttcttggttgaagaaaaacgaaaggaactcgagaggctagctgcagaagaagctgaaaggaaaatacaagctgaggaggagcggaagcgagagg

SEQ ID NO: 14240 - DNA, 1672 bp, Zea mays
  Clone ID: MRT4577_112976C.1
cccacgcgtccgcccatcgttctaatcaaacttctgcacctgaatataggcttcttttcacaaaccttggtggtgaaaagcgatttgcatcaatcgtggcaaagagactggagtcttggagctttaacgcaaggagatcgaggggctggaccatcacttagcgccttcaactatgacagtaattatggaaagaaagccctgacaatgatgtacagaggaataatggaacaggatgcctttcctgttgtgcctttcgaatgctctgagaatcaagctacccttgaagagttcatcactaaagcaaaagctgctttagtgtcagttggaattattagggaccctataatgtgcaatggtaaaaatggtggaaagcttactggtaggattattgattctgatatgcatgatgttgcccgtttccttaatcgtattctgggattgtttccagacattcagaatagattatttgaccttttcacaagcatacttgatatagtcattcagaatgcacgaattgaaggacaacttgattctggtattgttgatatcaaagctaaaagtgtcgaaatgaaagaatcaccaaagactgttcatgttgatactgtgtccggtgctagtacaatattatatacttttacagttgaccgtggagtttcttgggagttagcaaattcaatacttgaagaaaggctgaaagataaagcaggttcttctagtgatggattctatgagtccagaaaagaatgggcggggagaagacactttctgctagctttcgaaggttcagctgaaggattgtacatagtaattcggccagctgttggggaggcttcgagggaaatgtctttggttgagcttaaaagcaagtacaggaaggtctcatctgttgacaaaattagtaaaggctggcaagaagagtacgactcttcatccaagcagtgtatgcacgggccaaaatgcaaactcggaagcaattgcacagtgggtagaaggttgcaggagattaatatattgggtggtctaatacttcctgtatggggtgcagtagcaaaggcactggctaagcaggcacggcagattcacaggagaatacgtgtggtccgcttggagaccacgactgagaacaaacggtttgttgggcttatcattccaaattctgcagtggagtctgtactcgaaggtttgcaatgggtccaagatattgacgaatgatttggcaagaagctactcctttggcagtccttcctttgctttggaccaaatctttgtcgctgaggcaacttgtgcatttcgcttgtgaaacggttgtggttgtacgcagtcaggaaaagtatacgacaacggctgggccacttttgtgttatatatatgaaagttacgtaaacgtttatatcagaccggggtgctgttgtaagttagcctgttgttggaggctacatgcctaaatgctgcacgatgtagtggtgtggagatgtggtggctgtggctcttatgggcctgtgttgtttccctgacaagggtggctcatatggctggcctgagaccgattgggttggggtttgttttctataaacaaaacgaggttgaggattggtcattgtttggtaggctgtacaaccgaatctggcccccccccctcagatcatgggtagagttacccgtttcttaaaaa

SEQ ID NO: 14241 - DNA, 531 bp, Zea mays
  Clone ID: MRT4577_112977C.1
aagcaggcacggcagattcacaggagaatacgtgtggtccgcttggagaccacgactgagaacaaacggtttgttgggcttatcattccaaattctgcagtggagtctgtactcgaaggtttgcaatgggtccaagatattgacgaatgatttggcaagaagctactcctttggcagtccttccgttgctttggaccaaatctttgtcgctgaggcaacttgtgcatttcgcttgtgaaacggttgtggttgtacgcagtcaggaaaagtatacgacaacggctgggccacttttgtgttatatatatgaaagttatgtaaaagtttatatcagatcggggtgctgttgtaagttagcctgttgttggaggctacatgcctaaatgctgcacgctgtagtggctcttatgggcctgttttatttccctgacaagggtggcaaatatggctggcctgagaccgattggattggggtttgttttctataaacaaaacgaggttgaggattggtcattgtttggtaggctgtac

SEQ ID NO: 14242 - DNA, 1650 bp, Zea mays
  Clone ID: MRT4577_112979C.1
atgccctcccgctcccctcccattgcccgtctcctgcatctacgccgcctgtccaagtccgctcgacattacctacttcgcttcgccgccatcgcgaaggaacactccgaccagcccccgcccccgcctctcccgtcgcgaccacggtccccgcacccctacgactacaaccgtctcatgtccgcgctcgccgcttcagtcgacggtgacggtcaccacccaggcgccggtgccgagcgggccctccacctgctcgacgaaatgcggagcctcatggggcgccgccccgatgccgcctgcttcaccacggccgccgcggcgttctcatcggcgtctcagccgggagccgcgctcgccgtgctaaacgccatggccaccgatggcgtcatgcccgacgctgctgcttgcactgtgctcgtcggggtgtacgcctgccgcctgcattggttcgacgcggcctatgaggtcgtcaggtggatgacggcgaacggcgtggccctggacgtagtcacctactcgacgctgatatctgggctgtgcagcgccgggcgggtggctgaggcgcttggcgtgctggacctgatgctggaggaagggtgccagcccaatgctcacacatatacgcccatcctgcacgcctactgcacgagcgggatgatacatgaggccaaggaactcttggaaacgatgattgcagctggttttgcaccgagcacagccacttacaatgtcctggttgaagctctatgcaaggcttgtgctttcaatgaagtagatgcgcttcttgaggagagcagtgcaaaagggtggacaccggatacaatcacatacagtacttacatggatggactatgcaaagatggcagagtacataagagctttgcattggtagataagatgttgtctgttggtctgcggcccaatgagattactctgaatatcctccttgatggggtttgccgcaggtcaactgcttgggctgccaagtgcctgttggagtgcagtgcagagattggatggcatgtcaatgttgtcaactacaacactgtgatgaggaggctttgcgatgagcggagatggttgtctgttgtcaagctctttgtcgatatagtcaagaagggaattgctccaaatagctggactttaagcattgtgatccacagtctctgtaaacttgggaggcttcatgaagcactttgcttgattggaagtgaagagtttgtcgctgatgttgtgacatacaatactttgatccgttatctcaacttcctggggaaagcttatgaggcctatctactgcttcatcacatgatcgagaaaggtattgctcccaatgacaccacctacagtcttttgattgactgtctctgtaaagaggggaaattcttggttgcacttggctgtttgaaccgatgtatggaaggtgggctctctaaagctgtagtatcaagtattttacgaggtctcatcgctggtggtaagcttcgtgaattgcaagcactaatcggatggattcttggacaaggtttcgtattagatgtgtatatataccaggaattaatcatttctttttgtaagaaaggatactgtcgaggtcttgaaatgtacatagtgtgtcatatattggaaagaatgatcaggctgagatga

SEQ ID NO: 14243 - DNA, 2011 bp, Zea mays
  Clone ID: MRT4577_11297C.1
attcggctcgagatgacacttaagggaatatactgattctgtctccatgctctcctcaccactttctgcacagtggaccctggaaaaaaagcattcatcaacaaatatcacaagttcacggcgatcatttcatatttgttacatacttacatgaacacccaatctaccagttgttatgacaaataccaaatggaaacagaaggactgtttggtttgttgcctaacttgccacactttaactaactttttctgcctaaggttagttcttcaatacgagcgactaaccttagccaaagtgtggcacagttagccgcgaacaaaacaggcacagaatacggaacacctacacaacaattactcgatgacagcactaaaacaatcataagttcataacaggctttacaggcacagacgcccatgtatttgatatgcagacatcaaaagtataggaggtgcagtttgtatcatttaccgttctggacatgcattgggaaataatgtttattgtattcagctaacaattaggtaaaggccaattataaacataaaataagatactgttgtatgttggaactgtctgtgtactgtttaagatatataaaacaggataactagccttatgtcagtatagcagggttctttttggtgtgtgtctaattagcacatggcacatctcacataatcttttgctggtttgaactggacctgtaccatatttttcttctataattatatgctattctatgcacctctcctgcctgtttgagtaaaaaataaacggtcgcaccaaactacaattgtagaacaaaaagtaacatatacatatatagggcatataatacaagggagggggggacagaacctgctcacgagatctatcccaaatagttgcttcatcggaagagctgcagattcacttgaatctgaggtaagagtttgagaaagcgtacaccccacctgtgtcccgcattcttctgcatcctgtcgcatgtacacattattatgctgctgtgcaaatcgcgggtattttttacgcagtgtccgcaagaattgtagaggtgccacagggcgcacactttgatcaagatccccaaaggtattacgagtagccacagtcaaattatgagaagcttggtcaatcccatcacctctcacagtatctgaatagcttagcagcgctgccttcagctttggaacagaacgcacccattgcaatgtggaattcatatagcatgtattcccaaggttataaagcccagcactgtgcccataaatattaggacaactcatttcagtaaagatgataaatactagcaccaaaaggataaaaaaaggtaacatcattgcagccggccgtatcatcataacttttggccatcttcactcccaaagtagaccaatctgcatcatccttcaataatccacccttcaccataattttttggcgttcaggtggcacaccagttagtgtgtatagctgactcttcaaaacaatcggaggctggctagtgtcaatctctatgcctggaaagacctccttctgccatttcacgtttactggagatcattcaaaaaacatagttatagtatgaaaaaaaatatgtctgcgcaacatggaactaatattatgaagcaggccataataccaaattctggtgttaaaacaaaagcatatccccagtaattaggatggataaaattctcttccttctaggatttgtaaataaattaagacaacttgtgaagaaaatcaacaagaagtttcatgcgaaatgatttattcagcactgtaacaaatcgaaccgagcacatgccccccccccccaacccccgccacgggcgcacactgagcacatattagtaggagggttcgagccccagaaccggaggatgcgggggcgaaaatatagataatgcggcgctaaaatcgacaccccggtgcgggaacgaaaggcgaaaggggaggagtgagagaggagctaacccccggccggcctcgaggtacccaatg

SEQ ID NO: 14244 - DNA, 110 bp, Zea mays
  Clone ID: MRT4577_112980C.1
cggacgcgtgggctgcgccgggagataatatctgttgcagttctcgcatttagcggtactaaccttttgcagtactagcaacacgcagaagattagtaccgggaaatgcg

SEQ ID NO: 14245 - DNA, 331 bp, Zea mays
  Clone ID: MRT4577_112981C.1
ccggggaaacaaaaatccacaggtgggtggtcctaaccaagaactcgcttagtcgcccaaatggccacatgcccgaagggtggctttgatccactcctaccacaaggccacaactgggtgtttccgtaataatcacaaacccagttccagtcccgacgcttaaccaactttttttatttagacggcccaaatttccagggggggcttatgttctgatggggcttagggtaggggtagtgatacctacggggaccccgttacaccccccccaatcccggtcctgtttggggtaaaacagttgttgtctgtctccaagagagaattttttttt

SEQ ID NO: 14246 - DNA, 906 bp, Zea mays
  Clone ID: MRT4577_112982C.1
cttttgcctttgtgctgtgcctgtgacttgcaaggaacgtcggcgagagggccgggcaggcaggcaggcgcacagcacagacacagactcctcctcgcccaccggccggccggcgctcccgacgatggcgtccaggtgcttcttccccagggacgctgccgccgccgaccacccgcagtccaaggcggcggcggcccaggccctcgagcggctgcaccacggcgggcgcctcctgtccagggaggacgtcgggggcgcggtgcgcgtcaagatcgtcgtcagcaagcgcgagctcaagcagatggtcgcggcgctcggcgacggcggtctggtggccgcggccagcagcgagcgccaccggcagcgcgcggcggcagcggcagggccgggcgccgagcagaggctgcagtcgctgcggcggcgcagcgtgcggcgggcggccgaggctgccgcgcggcggatgcaggcgggcggggagtgggagcccggcctgcagagcatccccgaggaggtttgctgatgactaccgctctctaccactaccagaccagtagatgatgatggcgtggcgtccttctctttcatggctagtagtagtagtagcagtaatctcttgactaattgtggcttgggtacgttttgatccatcacttgcctcgctgctgctaaaagcgcgctaggagatgtatggtgttgtacagcgctgttctcgttctgctctgggctatccttatcatcggcccagtacggctgcttcttgatgtagtttctgcgtacgttttgccctgtgagttttctctttattttggtgtggaccaagagaggaggaggaaattgagagatgtgttttggaccttggatcacaatgcggttgctgctggtgattgattctggagcgctggcgtc

SEQ ID NO: 14247 - DNA, 386 bp, Zea mays
  Clone ID: MRT4577_112983C.1
agaccattagctttatctactccagagcgcagaagaacccgatcgacaccatgagggtgttggtcgttgccctcgctctcctggctctcgctgcgagcgccacctacacgcatacaagcggcggctgcggctgccagccaccgacgccggttcatttaccgacgccggtgcatctgccacctacggttcacctgccacctacggtgcatgtatcaccgacggtccacctgccggcgccggtccacctgccaccgcccgtccatgtgccggccgccggtcatttgtcggcggcaccatgccaataccctacttaaccgacccgggcttaatcttattcccagccacacccatgcccgtgccaacagacggattcaaacccgtgccag

SEQ ID NO: 14248 - DNA, 823 bp, Zea mays
  Clone ID: MRT4577_112984C.1
atctccacgcgtgcagcagccgcccgggaggagctcgagccgcagcggtggtccatggcgccttcgctgtcatccccagctggagaagcatgaaccgcagagacggacggatctgtccggccctcgcgccgttgttcgtccactctcaaggataatgtgtttctatgagttggagaccccccaatagcaaattcagtccgacgctttgatggacttaagagagatgctgatactatgaggtgaaatgctcatctacttaagagaaacgttcacaaggatgactgaccgtgtgcggcactgacctcgatggcgtgctgcatcatttctgcccgacctcaatgtttacctcgtcacccacagccagatggtcgaagacatcccgatgaagcagcacatgcttgtaccttctttcgttggtggcgggagaaagaggatccacccgctcccttatgctgattcgagccttccttcatggattgcctactctacaagatgaagtgctggtttatgaggatattttccaaaaagagttgttagggtatgacgtactcgattgatctatgagatgacctgcttggtggcgaaggttttttacatgtgctcaggttctcgtgtctcgcgtgtggcagtaccgaggagggactgacgatggtcagcttgtgcatactggcattgtggtgcttgaccaagagggcacccacatgtatggccagattcctgctaacagtccaggcacggcggtgccattcttgcctctttccctacgggatcagctacacttgtcgtgctgcctcttgatgagatgaacactcctatatctgca

SEQ ID NO: 14249 - DNA, 492 bp, Zea mays
  Clone ID: MRT4577_112985C.1
accttcgcttttttttactcttatttagtggaacaataccgagcgtcctttcattttaattgttcttttaggtcattgctcacactgacactgccacccatggagatgcgtgacacattattacccaatcaccggcgcttaatgactcaactagctagctagccagcggctatactacagcacatagtttctccagcgggggacaccgcccgcagcagcggaggggcatggagtcggctgctccatgccgcacatcccctacagctgctgcggtatctgcaccaccaacaggcacgtgacctggccgctttaccctgctgctggcaggatggactggaggaccaagccgaagatcgcctggtaccggagctgcggatccacctgcctgagctgctggcaacactgctgccgcatcgactggcactgaggctagcagtacggcatcaccggcgggctgcactgatgccttagaaactggacacactggcccag

SEQ ID NO: 14250 - DNA, 409 bp, Zea mays
  unsure (1)..(409): unsure at all n locations
  Clone ID: MRT4577_112986C.1
agaccattagcatttatctaactccagagtcgcagaagaactccgatcgacgaccatgaggggtgtctgctcgttgcacctcgctctcctggcatctcgctgctgagcgtccacctccacgcatacatagcgtgcggctgcggcttgccagtccaccgtcgtccggttcatcgtaccgtcgtcggtgcatctgccaccgtncggttcacctgccacctccggtgcatctcccaccgccggtccacctgccgccgccggtacacctgccaccgccggtccatgtgccgtcgtcggttcatctgccgccgccaccatgccactaccctactcaaccgtcccggcctcagcctcatccacagccacacccatgcccgtgccaacagccgcatccaagcccgtgccagctgca

SEQ ID NO: 14251 - DNA, 408 bp, Zea mays
  Clone ID: MRT4577_112987C.1
aagaatatgtggtggtgacttctgttgatggttttacacccacccaccaaaagacaagggcatagtctgaccggcgccgcccaggaggggaaacgggaaacacacccggtgcgtacgcgagaggcggcccaaaacgggtcggggccgaccggcttactgagggacaaagtggaaaacggggccttccagcacgagcgggccacgctacactctcgccatccacgaaagtggccggctgagccacacgagcgactggagaccacccaggcggatccctgtaacacaccggcgaagccaccaggggcctagcgagagacatccggcccacctgagggcctgcacgccctgaggcggttgacaacaggcgctggctgtccgtctaagagagcgacgggcccggcgaggaga

SEQ ID NO: 14252 - DNA, 1197 bp, Zea mays
  Clone ID: MRT4577_112988C.1
aataggcacaaaagtagcccagtgcctggccaaaagagtgactgcagtagctcactccaaaaggcaggcatttttgactgggttgatgcttcgagtgatgatgaatgcacagccattatgacttccatggaaaaaacaaaggatccaagctaatactcaagcgaagaatttgacctcccagagatatggtggtcgtggatcaattgccactgttggttccatatcagattgtactggcggtaagtcaggcttgaattcttctaaaaagccagaacctgttggttctaccgatgatttatatgatattggtccatatactcagatggcagctgaagccatggaagcactgtccaatgcatcaactgtcaattatgtagtcagggagaatgcacatcctgaaagctcagttcttagaacaaacatgggaaaagaaagcaaagccaataagatatgttttgagttgtcacttcaaaagcgaattggtggaagttcaagctctgtgaaaaagcatcccagcaagttaaaagacaagaagagtcgaaaacagatgacaaggaaagcaaaaggaagcatagacagtaccactatagaaggagatacaaatcatgaggtgtctgaaggagttaagggatctggtgcaagtgattcaaatgttgtaggttctaatgctgtaatgtgccctaaaaggaagaggacctatatgtttatctcaagaagttcaaaagttcaattcaataaagctgggagctcaactacaccaagatccaaaagtaaagaagtagttgatgtatcaacaacaaaaccagttagtgtatctggccctgatttaaaccagcttgccagagtagaaaaacaattcacatctgcacaggaagatcataactccagcttgacaaacagaggaccactgggagagctaaacagtaaatgctcccattttaggacacaagtatcaaagaagccactgaagagaggacttgtgaaatcaccaggttccagagaacttgtcagtctgttaagaaatgaagcatctctagttttgcagacaagcaggcaaagaagaaacatgtccaaagtccatgtcctgttgagccatagcatggataaggaaaccatcaaaatgcaaacaaaggtagtggctcaatacgttagttatagatatcaaaaacaatatttaatggtctgttgatgaatctc

SEQ ID NO: 14253 - DNA, 465 bp, Zea mays
  Clone ID: MRT4577_112989C.1
ccggaccgggaccgggaatcccaccactgggtcttcagaccattagctttatctactccagagggcagaacaacccgatcgacaccatgagggtgttgctcgttgccctcgctctcctggctctcgctgcgagcgccacctccacgcatacaagcggcggctgcggctgccagccaccgccgccggttcatctaccgccggcggtgcatctgccacctgcgggtcacctgccacctccggagcatctgccaccgccggtccacctgccgccgccggtccacctgccaccgccggtccatgtgccggcggcggtcatctgccgccgccaccatgccactaccctactcaaccgccccggtctaaggcttatccccagcggcacccatgcacctgccaacagctgcatccaagcccgtgccagctgcaggcaagctgcggggttgggtgcagcacggatcctgggcc

SEQ ID NO: 14254 - DNA, 433 bp, Zea mays
  Clone ID: MRT4577_11298C.1
cccacgcgtccgcccacgcgtccgaggaggcgtccactgacgacaagagcaccggcggccaggctgacaacactactgtacaagaggcatccaccactgacgataacagcaccggcggccaggctaacaatagcaccaaggacacaccgacagagtcaaaagagaccgttggcggtgacgacggcacggcccagagccagacgagcttcgacgacatgaatggcagtacgaacgactcgcagcccatgaaagaagacgggaaggtcgccgagaatagctccgatgaaactgccagcggcggcaaggtggaaagcacagacgacgacgcgacaaccggcgcggcgtcaaacaacgcaacttccggaggccagaacgtcgcggccgagaccatggcatttgcagccgcggatgatggcgccaacggcaacatcac

SEQ ID NO: 14255 - DNA, 2108 bp, Zea mays
  unsure (1)..(2108): unsure at all n locations
  Clone ID: MRT4577_112990C.1
tcgaggccggccgggcccgggagctacattcttctagtaaatgcatatgaatcatcagcggaggcacaatttctagaagactttgttgcagatacttcaggccaggataatgcgaaatctactgctactgtgcctccaccatcagtaattgatcgtgttatgaaagatcttttcagtgatgagactggcaactatatggaagcagaaaacaagtatagtcgtgctatgcgaggtgcacctgcagatcactttttggccagttctgtttgcatgcactgtggtttggcaactgcaatatatgcgcaatagctgcactatggattgattttgtgcgggaaattcgttggtgctgggaggaatcagaaagattgccaaggatgaaaagcacttcaagcattgatctctcttcttgtcttatccaccaaaagttacaaatgctcacgatatgcattgagaggaagagatcactgaaccgtgagaaaggtgctggctacaaagatgagacttcaatagtatggcagtgaacaagtctaggaaaggatcnagctggtgttgtgcctaaaatgatgctcctgaatacgtttcaggaaatgcatgctccatatactcaggatgcacctttgatgaccgaagatatgcatgaagaaaggctccatgcagctgaagcttttggcaatgccattggtctatctggacagctggaaagggatatattatgttccgatatgtctgcttttaaagctgcaaacccagatgctgtctttgaagattttattcggtggcattcacctggtgaatggttgagcgaggacaaaacagatggtaatgcaggctggcctcccaaaggaaagctttctcaccgtatgtcccaacatgggaatgtgtggcgcaaaatctggaatgatgctctgccattgcctgtttctgaacagaagtctttgcttgaccctgttcgggaaggagaaaaggtgcttcattaccttgaaactttaaggccacagcagctccttgaacaaatggtgtgtacagctttcaaatcatcagctgatatcctgaataagaccatgtatggtggcttcaaggaaatgaagacaaaaatggatcgactatatgtcaccatggcgtcaacactgaaatcttttctagggaattctgatgtcaatgatttggttggaggcctgaaacggctttgtcaagttcctgagcaccgcccacgcgtccggattcttgctgcttccatcaatcggaagcttattgatgctccacgactagctcaagcaatattttacgactactacaacttctaccttccaaaaatgggaactagcctggaaagcatttgctatgagaaggagttcacaactaaggaaaaggtcgggatgtatgagagagatgctgtgtcgaacctgtttcctccccctactgctaatcagtcttggaggaaagttttgagcatgggaaatcttctgaacggccatgaaccgatgcaaagggaaatcatattctcagtccaggagagaataagcaacggtcattattcgagcccaaccccattatgtaccaacaatgagaagatccagacacataggatgtatatatctgggacatctaatgacctttgggttgcattgtctgtaacgtcctgggattgagctgcacgatgtatgagaggagcaattggtgttttaattagcttagaatcccgttggtgcagataaactatcattgtatttttttttttgttggatgtaccagaagtccagaaggggccaccaggacatggctagtgacgcactgaggacaagcatccatttttgacatcagatcaaagtattgattatttacgtcttgtagcagtcagaactcagaaatgctaatatattcttggcttcctctagagaaatggttgtagacaagctctatttggctgacgtttttggtctgttaggtggtgggctggtgagttgcaacacacacactggggttgatgtacgtaaacatcttgtatgacttttgcaatgagctaggctttgttcaaaaaaaaaaaaaaaaaaaaaaaaaaaaaaaaaaaaaaaaaaaaaaaagggcggccccgacataaaagctcg

SEQ ID NO: 14256 - DNA, 386 bp, Zea mays
  unsure (1)..(386): unsure at all n locations
  Clone ID: MRT4577_112991C.1
gggggggggtttcattaaaatagttcattcaggtcattgctcacactgacactgccacccatggtgatgcgtgacacattattactcaatcatcgccgctaaatgactcaactagctagctattctttttctatactacatttatggtttcgcanggggggacaccgccggcagcagcgtaggggcatgaagtaagatgatgcaggccgaacatcgccgtaagttgctgcgctatgtgggccgtcaacagccccgngacctggccgttttgcggttgttgctgcatgatggactggaggaccaagccaaatatcgcctggtaccgttgctgaggttacacctgcctgagctggtggcaacactgtgtggtgaactactggcactga

SEQ ID NO: 14257 - DNA, 306 bp, Zea mays
  Clone ID: MRT4577_112992C.1
ccaacccttccggttcctttcctccaaccttgtaaaaccgaaagttttttcccattcccctaaaaagccaaattcctagatcccaaacttcccaaaaagcccttccctattaacggttcctcccttgtaatgtaatagtcctggtcctccaaaaggtccacctaagtttcctcaacgattccaatcccaaaaattccttccgccagatttttaagaagggccctataaccccggtttgccctggccttcctaaccattgccacccaccattccaaattttataccttccttttgttccaattcttt

SEQ ID NO: 14258 - DNA, 270 bp, Zea mays
  Clone ID: MRT4577_112993C.1
tccacgcatgctcgaactaatgctgcaactctgaatgcatccactgatgattgcaatggggagtgttcttctgtgaattcaccttcgaattgccgatcgaatcatgatacgcatgacgacatgctagaactgttgggccctctgcttggcactagttctatcgctaggcgtaaagaaatacttgctgtcatactaactgtgtctaggcttgactttacacttgactagtcaactgcttattcagaagctctatatgaatctgaacatgga

SEQ ID NO: 14259 - DNA, 458 bp, Zea mays
  Clone ID: MRT4577_112994C.1
ggggaacaatacttttttcttttcatttcaatggttcattcagggcattgctcacactgacactgccacccatggggatgcgtgacacattattactcaatcatcgccgctaaatgactcaactagctagctagccagcggctatactacagcacatagtttcttcagggggggacaccgccggcagcagcgtaggggcatggagtcggttgctgcaggccacacatacgccgtcagttgctgcgctatttgggccgccaacagccccgagacctggccgttttgcggctgctgctgcaggatggactggaggaccaagccaaatatcgcctggtaccggtgctgcggctccacctgcctgagctgctggcaacactgctgccggaacgactggcactgaggcgaacaatagggcgtccccgtcgggctgcactgatgccctaaaaactcgacgcact

SEQ ID NO: 14260 - DNA, 824 bp, Zea mays
  unsure (1)..(824): unsure at all n locations
  Clone ID: MRT4577_112995C.1
ccgggtatcaatctaccttgtttggtttatttggaatggctgaaaactcaccactatattaggtctgttcttttcaactgccagtaaggtttaggcattgtgtcatcaaaggtatttagtatgagctgcagacgccgtacttgagcaccaactgggcaatacaaatccgtcatacgctatcatgcatgccatccacctctgcatgagctgcatactcgtgaactaaaagccttaatcacagtcacacctatagtccaaaataagtgctcaaccaaccaacccacactgctcctatgtcgtgctatatcaatgcattggactattttacaatttagtttaaaatattttcaaatggtaataggttttgatggagccagccgtattgaaccgtgaaagagttgcattggacaagaaaaacaggatgcctgagtaagttatattataaacaatagttaacacaagatttcgctatcaaatttatgaacgttatttagttgcatgtttaatatagcttcaggttgttcgatgactatagcaatgaagatttttatggggtacaacggaagtatagtattgtcgctcgagttgaggttaaattcccgattgaaccacgttatcgtgacaggcaacattacanttttgtctgacatcaatgtaagacaacccctctttaggtttcatttacataactatatataatggttcgtaccacaatctatntttgtgctgaaatcaaattagggagcncaagatcgaggccattacaactcggtatgagatagtcaaaacttcaacagtttgctccatgaaaagcatgtctacag

SEQ ID NO: 14261 - DNA, 576 bp, Zea mays
  Clone ID: MRT4577_112996C.1
atgagacaacgaatatggctggagttgatcaaagactatgagctggaaatatattatcaccgagaccaagttaatgtggttgcagatgctttgagcagaaagagccaagtcaacatgatggttgctcacctgatgccatatgaactagcaaaggaattcgataggctgagtctcggatttctaaacagcacccagggagtgacagtcgagctggagcctactctagaacgagatatcaaggatgggcagaaaaatgatgagaagatcaatgagattcgatatctgatcctagatgggaaaggcaaagacttctgggaagacgcagaaggcgtactgaagaagtgcttgggaatgccagaagagcaactgccaatcgaggatcttgaagttcaagaagacctaacatatatcgagaatccaattcagattttggggatagcagacagagtcactcgaaggagcaccatcagaatgtgcaaagtcaagtggggccaccattcagaggaagaagcaacctgggaaagagaagatgatctgaaagccaagtatctcgagttctttgctagccaaccctga

SEQ ID NO: 14262 - DNA, 584 bp, Zea mays
  Clone ID: MRT4577_112997C.1
tcgcgatctataactagtagaccattagctctatctactccacagcgcagaataacccgatcgacaccatgagggtgttgctcgttgccctcgctctcctggctctcgctgcgagcgccacctccacgcatacaagcggcggctgcggctgccagccaccgccgccggttcatctaccgccgccggtgcatctgccaccttcggttcacctgccacctccggtgcatatgccaccgccggtccacctgccgccgccggtccacctgccaccgccggtccatgtgccgtcagcggatcatctggcgccgcctccatgccactaccctactcaaccgtcccggcctcagactaatgcccatcacacccatgcccgtgccaacagccgcatccaaacccgtgccagctgcatggaacctgccgcgttggcagtaccccgatcctggtgccagtgcgtcgagttcctgaggcatcagtgcagcccgacggaaacgccctactgctagccttactgccagtctttgcggcagcagcgttgccagcagctcatgcaggtggagccgcagcaccggaaccaagcgatcttc

SEQ ID NO: 14263 - DNA, 195 bp, Zea mays
  Clone ID: MRT4577_112998C.1
atggcctccaagagagcgacttcgaaggctgctactttcatcgacgacgcagcgatggcagcccttctggctaaaaagaagggcaaggctcccctcgtggacgacatccctcaggaggccggtagtcaacagcaaaagtcaacgtcaagacaatccgcctaccccacagggcactgtgcgcacatgcagctctga

SEQ ID NO: 14264 - DNA, 573 bp, Zea mays
  unsure (1)..(573): unsure at all n locations
  Clone ID: MRT4577_112999C.1
nnnnnnnnnnnnnnnnnnnnnnnnnnnnnnnnnnnnnnnnnnnnnaattccccctttttttgggttttttggtgggtttttttggaacaatacttttttcttttcatttcaattggtcattcagggcattgctcacactgacactgccacccatggggatgcgggacacattattacccaatcatcgccgctaaatgacccaactagctagctagccagcggctttactacaacacatagtttcttcagggggggacaccccccgcagcagcgtaggggcatggagtcggctgctgcaagccccacatcgccgtcagttgctgggctatttgcgccgccaacaaccccgagacctggcccttttgcggctgctgctgcaggatggaccggaggaccaaacccaaaatcccctggtaccggggctgcggctccacctgcctgagctggtggcaccactgctgccccaaccactggcactgaagcgaacaatagggcgtccccctcgggctgcactgatgcctcaaaaactcgacccactggcccaagatcggggtgcttccccgacccctgggt

SEQ ID NO: 14265 - DNA, 518 bp, Zea mays
  Clone ID: MRT4577_11299C.1
attgaaaggtatagcccttagtaccaaaacataatggtagttggttaggctacctctgccaactcagaattaacactgatgtcaaattattgaaatatgtcagctttttgggaaaactgaagttatccataaaacacagttcacaaaagtataagatatattgtggttctttggtttattttccagtgcacatttacccataacatgtcataaatgggtacagccattctggatggacacaagctacttgctgcactgagtaactgtttacatcacttttaatgccgtagatctccttacggtcactgacttaaaagaaaatctcaaatactaccttagcaacttcataattatgaggatgcctactgacttttttaaagactttctttgggcacaggaggggcaagtagtgaaagtatattctcttcctttaaaaattctaagttagaagcaatagcagtttttataaaaacagcccttagtaaaaacttctggagtgttaaatcaagtttttggag

SEQ ID NO: 14266 - DNA, 384 bp, Zea mays
  Clone ID: MRT4577_1129C.1
attagacactatatatatatggattgagggagtaaataaaattcatcctttgtcgtaagaaagaaaatgtagcaatcatatagggcgccttcatatattcatatcgtcctttttgaatgtatgtgtgcatagaccttcgtcgcgtaccgacgtacacccatcagttgttgctagtgttgctcgacgcggatacaactagtagccattggctttggcagcggccttcggcggggatggcttcggtggcatgggcgacggccgcggccatgggcttcggaggtgatggcggcggtggcatgggcctaagaagtgttggacccgggtttggcccggggtacggctggttgtggaagcatttgatcccgcatgctttgaagcaatccc

SEQ ID NO: 14267 - DNA, 140 bp, Zea mays
  Clone ID: MRT4577_112C.1
agaaccatacacgtgcaacccattttaggtcagaaaaagtaaagcagtggcagtctgcgcgacagatacagcaatctcaagcggcctagtgaaagagaacaactcattctgttcacgtgctaaactgaagggcgatgggg

SEQ ID NO: 14268 - DNA, 581 bp, Zea mays
  Clone ID: MRT4577_113000C.1
cttttgggtccctcgaggccggccgagaccattcaacgcccagcccatgacccgcgcaggagacaaatctactccggccctagctgccgggaacctgcggcgctggcacgacccagatcctgggccctcgcgttgcgttcctgaggcatagggcagaccagacggcgacgccctactgctcgcctgagcgccagtcgttgcgtgagaagtgctgtcagcagctcaggcaggtggagccgcagcaccggtaccaggcgatctttggctcggtcctacagtccatactgcagcatcagacgcaaagcggccaggtagcggggctgttggcggcgcagatagcgcaacaactgacggcgatgtgcggcctgcagcaagcgactccatgcccctacgctgctgccggcggggtcccccactgaagaaactatgtgctgcagtatagccgctggctagctagctagttgagtcatttagcggcgatgattgagtaataatgtgtcacgcatcaccatgggtggcagtgtcagcgtgagcaatgacctgagtgaacaattggaatgaaaagaatacagtcttgtccc

SEQ ID NO: 14269 - DNA, 384 bp, Zea mays
  Clone ID: MRT4577_113001C.1
gaccattagctctatctactccagagcgcattagaacccgatcgacaccatgagggtgtggctcgttgccctcgctctcctggctctcgctgcgagcgccacctccacgcatacaaacggcggctgtggctgcacagccaccgccgccggttcatctaccgccgacggagcatctgccacctccggttcacctgccacctccggagcatatcccaccgacggtacacctgccgacgccggtacacctgccaccgccgagacatgtgccgccgccggttcatctgccgacgccaccatgccactaccctactcaaccgccccgggctcagactcatacacagccacacacatgcgcgtgccaacagccgcatgcaagcccgtgcc

SEQ ID NO: 14270 - DNA, 479 bp, Zea mays
  Clone ID: MRT4577_113002C.1
cctcgaggccggccgggccgggatctgcactaatcccgctctttctcccggtctcagacgtgtctcgctgctccttgcggctgcacgctcgatacgtacccactggaggcggcctcgaccgcgagaaagcctcagcgtcgccggtgatattgtaccatgttcttcgtcggaggaggcgtggcgaaggagacaatgagaagacgccggcaagcctcccgccactgcggcggcataccctgcccccatcggccattggtccgcaaccgcaacccaggcctccgtctccttcaatagtatgtcacaagatgacgaggctgactgattgagtgtgatgtactgaaagctgaagtgattgtctattgagtcactgtactagcaaaccctgcaacaatacgagctgcaattcattgtttcgcttgctcaaaaaaaaaaaaaaaaaaaaaaaacgaaaaaaaaaaaaaaaaaaggcccctagggcc

SEQ ID NO: 14271 - DNA, 801 bp, Zea mays
  Clone ID: MRT4577_113003C.1
tacaggtagtggttgtttagtgcgttgttattttgcctgtaattcttcgtgacagatcgcattacaacacacttgaccatggcgtgggtctctccgttagctagaataggtgcatccactctcctcaaagctcgttctcaaagtcttccagcggctctttaccatgaaaaggtgattgatcactatgaaaatcctcggaatgttggaaccctcgacaagaaaaaatcctcagttggtactggattggtcggagcaccagcatgtggtgatgtcatgaaacttcaggtggaagtggatgaaaatggaaagattgttgatgccaaatttaagacctttggttgtggatctgcaatagcgtcatcatccttagcaacagaatgggtgaaaggaaaaacggttgatgaagcattgaaactcaagaacaccgatatagccaaggaattgtgcctaccgcctgtgaaacttcactgttctatgttagctgaggatgccatcaaagcagctttggcagactatcgtatcaagcaggaatcattgaaaaatcagtctgcttaaatcatgaagaaacaaactttcatttatatctagttaaggattgtgctattgtgatattctgtgtgatctgtatggaatgaaagaggtcttacaagctcgtttaatgaaataacttcttgctttcttgcgttgcttcgcagcaaaaatagtttcttttactgggaggggagaatcatttgatgtgtgcatgattctatggtgttgtttgtgcaaagagtagtgccataaataaaattaatactgagg

SEQ ID NO: 14272 - DNA, 587 bp, Zea mays
  Clone ID: MRT4577_113004C.1
tgctcgccgctcgctgatgtgcttcacgagcttctggatctcccagcactccgaggcgctatggcgagcatggggtggacagggcacgacccactgtcacttccctgttgccgggggcgcttgccgcgttcctcccagcccccagtcgcagttgcggcgaccggagcaccagactacggcctatcatggtcgtggttcttcttcttcttcttgccaccgccctgggtggtggcacctaagccacccgtccgagtaactccggtttgcagcgtcgagtgccatgcacggccctcagcagctctggcacacttgtcggccagagtgaagagcgtggcgacggtctccaagtcatgtgtcgtcagcttctccaacatcttcttatcctgcaccccctatcggaaagcagtgataatagaaccatcggagatgcaaggtatagtccctcgtaccttggtgaaatgggagatgaaagcccggagattctctctaggttcttgcctcactgaatggaggtgagcctccacgccatgctgctggtaagcactggcgaagttcgctgtgaaccacgcacagagctcttcccagga

SEQ ID NO: 14273 - DNA, 396 bp, Zea mays
  Clone ID: MRT4577_113005C.1
ggcgtgctgaaatcggtatccagcacgttgattggcgtcagtcctgagtttgaggttgcgctctacacgttgtgcttttttgttggaggggaagataaccgcgtcgatattggcccgtatagtgtgaacgtcaagtgctaccgattggggaacaacaaaattggatcagcctttcccattgcagagaactgattatctggtgctatgcttctgcaggtaccatactgttcaatttgttgctgccatctgcaatcgtattgctacttgcactgctaaaaagttgacgaccgagactgaagttacttttcatgattttgttgctgtggatgtggaagctttccgatgtatattttctgcctttgtcatgtttatttactgatatgctgtttgttgatg

SEQ ID NO: 14274 - DNA, 394 bp, Zea mays
  unsure (1)..(394): unsure at all n locations
  Clone ID: MRT4577_113006C.1
ccgggacctaggctggattcttttgagcggcccgccctttttttttttttttttttttaataaaattcggggccactttaagccatggcaccaggcccaaacacatggaatccaagttgcaggtcgaaacacacttccgggccccaacaaataaaaaaatcccaaagatttaatggtttaccgtcccaagatcaaaccctttaatgtcttatctacaatgaactgacctacactaaactaccttagctccaacccgttaaagctattgcacaatttctccaggccctcctcttttactctacttattttttaacactacaggagtatacccnccaacaatgtatttaccaccaaagcaccaccttaccttcccagtatacgcccctacagatga

SEQ ID NO: 14275 - DNA, 2025 bp, Zea mays
  Clone ID: MRT4577_113007C.1
cggccgcccttttttttttttttttttttttttttttttgtttggacatcggaaagcttccacatccacagcaacaaaatcatgaaaagtaacttcagtctcggtcgtcaactttttagcagtgcaagtagcaatactattgcagatggcagcaacaaattgaacagtatggtaccttttcatgcacaagtaaccagctcaccatgaacagtacattgttaacttcacgtaattgattatgaaacgaagaaagtgaatatttggaaacctgcagaagcatagcaccagataatcagttctctacaatgggaaaggctgatccaattttgttgttccccaatcggtagcacttgacgttcacactatacgggccaatatcgacgcggttgtcttcccctccaacaaaaaagcacaacgtgtagagtgcaacctcaaactcaggactgacgccaatcaacgtgctggataccgatttcagcacgccatgccactcaaactgaacagtcagcagctgtatctctgaatcaggcgattcaccacggcgccttggaaatatataaccttggtaatccacatttcccttggcttcttccaggtaaaactgaatccagttatggaagcctgatacctcactctccccttgtccccgtcctttgatctcaccaacaaacacatgctcaaaggcagaagagcagctagagttgccacctcttccatacaaatcaaaccatagggatgtcagcattctcttgaagtcctcgtagtcctgaggcacagcccccttctgcactaagtaccggtgcaagtacttaattggcgctgttctagcgatctcttcaacgaaagctatttcttcgtgcttatcctgctgggtaacaacttctttgtacccctggtgggggttgtagttatccagaagtgcgcagaaacgtgagtaggtgggttttcttagcacatcgtcgcctagccagctgaacaagctttcagatgccatatcacccttctgataaactttcttccccttgccacagtcgattatgtagtccttaccaggaacaatacggttcatatcgagctcccaaagtcggctacacgctttcgataagctattcagctcctccctggtgggctcgaaattgagtccttggtggatatgaccgacatcctcagagtacttttgttctgatggtggctttctgtatccattccatgcttcagactgctgtggtcttccatggcgctttttctcaccgacggtctgccagcctccatcgtttatcctttcttcttcctgatgctgattcccgtatccttgtgcctgctgctgttgctgacgccgccggctgccactgccatcccacctttcctccccctcgcactggttctgccggcctgcgtggtgctgctgctggttccgaccatcggcccttttccaaccctcgtcatccctcctctcatggcgattgtcccgccccgagcttcgatggtcccggcgctcgtccggatcgctgcccttctgctcggagacgacctcggcccacgtcgaccgcgatcgttcgtcgcgttcctcctccccgtcgtcatctggatcggagctttgggccgccctcctcctcggcacctcgtcgtcgtcggcgcggccgtggtccctctccctcacggcgtcctccacggcgtcgatggccacgtggaccaaccccttgatgagaccctccatcgcgcgccgacgagagcgaacggggaaggcgggtgacgggctgggtactggagatggatcggactgaccggctgccgcgggatgggatctgggacggggagggacgcgtgcttggttggtggactccactaatcgagtggctggcgctgcgacgcgcaggagatcatcggggatttccttctgactttgaatcgtccgtcctgcgtgattactgattaagaacctgaagaagaaacttttgcagcggtcgtggacattcgcggtatgggccgggtggcttttttttttttttttctccccttccgtta

SEQ ID NO: 14276 - DNA, 257 bp, Zea mays
  Clone ID: MRT4577_113008C.1
gattgattcatttatagattcatttcatcaaaatacaattcccatgtgcaagaataggacacacccaccacacactaaaacacccaactgcggctctggggagggggatatacactgcaagaacactatatacaggcaggctgaacaaacacgccactggggctctgggcaagactatatatatatacactgcaagaacaaaatggacatgcgggaaaaaccgggggccacgagcaagggggacaaagtaacaaggg

SEQ ID NO: 14277 - DNA, 701 bp, Zea mays
  Clone ID: MRT4577_113009C.1
cattgggtacctcgaggccggccgggatactctggccttctggtctctggcctacgctgcctgcctcgcagtacccaagacatcgtcggcctccggacttttgggatccccaaaactctcaccgaagaaaacctacccgaacctcccccttgcctattgcatccggatgcctgctgacgataccatctccaactctaccccatcgctcggctctgtctttctgaccaagttccccttccgacggctcggactgcccggctgctgccaaggaaggctatcgcataatacgtatcttccttatgtattatcagtgggtgagcctttcatgtcagctacctctgcggctatgactctctccattacgatcctgacgagcgagctcttctagacgaactcgcacacgtactgaggagatccacacgatgctctgccgaatggctatgctacatcgagaacgattgattctattatatagtgcgacacgcggcactaacaaaagagaagaaaacgatgcgtcaccgtcgcagcgtcccaggtaatcgctcagcttctacagaggacgtaactgctgcgcttgccaggactcatcgtcactacggtagctgcatgtgatgaatctgtcattggcctcacaatctaacacgagatacatcccgtaatgatctgccgcaacgaatggcaaggcgaatgtttcaactatg

SEQ ID NO: 14278 - DNA, 281 bp, Zea mays
  Clone ID: MRT4577_11300C.1
cggggaaggtcctgacccaaaaacaaaggggcccccattattaattgagatttaggaacctaaaaacagacttaaacataccggaaaaacgggaaaaaaataatttttgttagggcgttcccaaaaccggatcaccccatttattaattaaaaggcccttgggtttatcccgggttgggcattttggaccctgggggtttcgtgccctacaaatttgaaggggcctgggcagattccgcaaaggggtccggggggttaacccggacgtgcagtaccccgtt

SEQ ID NO: 14279 - DNA, 1570 bp, Zea mays
  Clone ID: MRT4577_113010C.1
cttcagagttcggggaggcgaggcgaggcgaggcgtggagggattgggaattttttgggaggggaggaggcgtgagcgggaggaaagtgaagagagagtagcttccgatctcgattaccccggtctccgtatcgggaatccaattcggttccatccaacgcctgagatcggattccaacccccatttcggaccgatcgctttccgcagaccgatcggctttgggggattttttttcccgagcgatttttctggaggctcagatcgggtcggtctgagtttagttgatcgcggagcgatgctaatcgaggagcttccgggcgatccgggtggaggacgaggtgagggcggggaggatgagctgctgctgccgcgtcgcgaggatggcgacgccgcggagggcgagagtggagtggtgatgcgggtggccgtcgacgcgaagcgcgcagcggtgggtgtaagcgctcggatgcttttctacccgacgctggtgtacaacgtcgtgaggaatcggttcgagaagcacttccactggtgggatcagatcgacgagcatgtcctgctcggtgctgttccattccctagcgacgttctccggctaaagacgcttggagtttgtggtgtggtgacacttaatgaatcatacgagaggcttgttcccacatccctgtacgaggctcatggaattgaaaatctggtgctaccaacaagggattacctttatgcgccttcatttgttaacctttgtgaagctgctgactttatccacagaaacgcttcatgtgggaaattgacgtatgtgcactgcaaagctggacgagggcgtagcactacagttgtcatttgctatttggtgcaatataaaaatatgactcctgctgaagcttatgaacatgtccgcttgcgtcggcctagggtattactagcttctgcacagtggcaagctgtgcaagagttctaccaactaacagtgaagaaaacggggaggtctacttggctggacaatcctttaatcaaaccacctttgttccttgccactcgcaaacttgttgcctttgatgatagcgcatttgtgatggtctcagaatcagacctcgaagggtataatgcagatgcactggcacttaatatgggcagtagattgtgggagataagcttgatataccgtgtccagtttgcgagcaagacagcatttgctgggttttcgtatctgtggcttcgatgtcgtgcctgcaaggaggctctacctgagaatctggggagagatagctgttctcttgaggttgaccagctaacaactggtcatccatgtctactgcaaggtgtcgtggttaatccatgactgctgagtctgtgtttttgccttgcgcttgtacatattaaagagaagggtatgcaatgtgaatctgtaacgtgggtctgcagcaaccaaagagtgaagttgctcgggtttgtatatatgacatgtaataagttgactgctacgtgtacgatgttcaatgttaaaacacaactctttctgatcaaatgtcagctccagcactcttgtcttaaaaaaaaaaaaaaaaaaaa

SEQ ID NO: 14280 - DNA, 283 bp, Zea mays
  Clone ID: MRT4577_113011C.1
tcagatacttcacatcaagataactataggtggataagacccagcctgcaccataagggatccagcacgcaatcgcagcaagaaacatacctttacaccctaggtaaagaatggtcagccctatctttggtgcagccgttggtacaagccataagggcacaggagcctgagaaattagggcctactgtgagcaaccaaggagctctgggggaccttcatccctactctgaggagcagcaattggttgcattgaggcaactgcctacattggaccgggctgcat

SEQ ID NO: 14281 - DNA, 351 bp, Zea mays
  Clone ID: MRT4577_113012C.1
tattgccgggtcgacgtgtacactaggcggggggcgcccttggaccatgttgtttaggcaaaaaagctaaaagatgatggcagctgatgctatagctcggatcatgagctgcacaacgatttgacgacaggaaccactttcaatcggagacggacctggactaaacttacagggctgaagaatgcaacctttaactgtggggcgggattgtaaaggctattggatgccaaccagaaaaatagaaggacttagcaaaacgagcaagtgacgttgagagaaactcacttgtacaaccgagaggtcttcaacatggcctcgacgaacattgtccaggggacaggggattcaaga

SEQ ID NO: 14282 - DNA, 355 bp, Zea mays
  Clone ID: MRT4577_113013C.1
attcggctcgagggctgacgtcgctacgtttttcaccgtatgaggccggtacacacgcggattgcgatcctttgggacgcgctttgcattgccttaagaccgatctgatgatccaccggaagctcagtcactgaccgacctacgtgtcacaggtcacatcctcgttggatggaagaagaccgtccgatgcgacacgaaccttatagagtgtcataagctatctaactggatgacacatgctgctctgcagtgagggtggcgatttttatagcgtggtactggtcgttagaaaaaaggtaacgcacaaatcgacgccagtcaatgtaacttcctctcctatgcgtggtccatactg

SEQ ID NO: 14283 - DNA, 415 bp, Zea mays
  Clone ID: MRT4577_113014C.1
gagtaggctcctccacagaagtgtttgaaaaaaggaggcaaccgagaaaggaaaaaaaaggggggcaaagggaaacaaaagaagaaggaggggacgggggggaggaccagggaaggggggaacgggggggggagggggaggaggggggcggaggggggggggggggggagcccggcgcaagaaagggcagaggaagcaccggggggaaaaagggagcgggtgagagggggggggaaatacgggcccggaagcataggggggaaaaactggggggccgaaggagagagctaaaccacaggaacggaaaagagaaaacagaccgctaaggagacgggaaagcggacctaccaacagcaataaggaaacggccaacgcgcggcgagaagcgggaagagcaaagggcgccaagggggga

SEQ ID NO: 14284 - DNA, 487 bp, Zea mays
  Clone ID: MRT4577_113015C.1
aatctccaggggtggcttttttttcattagtatacacgtacttgccactccaaaaacacagagctatgcgagagatcgattaggacaggtacagaaagataataagaagaaacagaatgaacaatccaaggatgaggttgatgaatgaaggtctaagcgtgcaagaaagctagcgccaaagctactagctggctagctaccacatcaccatgcatcttatcatccgtgcgaaagcgaagcaagcatgaaaggggggttggagagcaaaaaccttagctatagctaggtcagcgcgcgaagtctatgcattgcttcttgaaaatcatgtgcactggagtagacgccggggggtccctagctctattgttcgccatggccatatgctcctgctccgccggcggccttggagttgtgagcaagtccacgccaaaaagcctcaccggcttcaccgtggcgggggccgccggtgcagccgtggtggtcatcg

SEQ ID NO: 14285 - DNA, 662 bp, Zea mays
  Clone ID: MRT4577_113016C.1
atgtacctagccgtcgccgctcggatccccccatcggcggcaagatgcagatatttagagaatactccgacgaagaacacctgcactttagaggtagaggcctcagacaccattgacaatagtgaaagacaatacccaacacaatgaaggattaccgccggaacaacagcatctctcctcctacggcaaactgctcgaggatatccagcaccactcgacgactacaacattcaaaaggagtccaccctccacctggtgctcctcctacgcgggggcgcaaaaaaggggtagaagatgacgctaacacaagcccaagaataccaagaacaagcacaaaaatgagaagctctccgcgctgcagtcctacaaggcacacttcgccactggatatgggacgcgactcatctaagagtgccccatctgatagagctgagctggcatattgatggtcaaccacttcgaccgccactactgcgagtagtgcggactaacctatacctacaaaatgaatgcgcaactgattgacaagatgtgatccatacgccaatccatcaagcactcagatgaaggatacgcaaattgtatcgcagccaaatctgcctgaagtcgaatattatatggaccagaagtatccataatattggtacccctgttactgagca

SEQ ID NO: 14286 - DNA, 404 bp, Zea mays
  Clone ID: MRT4577_113017C.1
ctgccgggaccggaacggaatagaggggccgacccacgcgtttgattgcgagcggccgccctactactgtcatggttgattattgtttacacatacgccacctaatcaatgtattcggcaaaaaactagtataggtgccacgatgcattcgattagaggccacgagtactctgaacactagaaggaaagacgcagcaatccttgatagagatgtgtgaagatagagcctgtcgttaggagcaacgactgactagtcctttatgactattatcaagggcatggagttacataatgcggagagcaacttaacgcctatttggctgggcaacatgcaccattggccgtccaggatcgaagacgtgcatgctgggtagccggatgttgatgaatggacagtagtaaca

SEQ ID NO: 14287 - DNA, 274 bp, Zea mays
  Clone ID: MRT4577_113018C.1
aaaaccaacatgcttgtaaacccccttacttgaccaaaaagactgcccccaaacttgcagggggggatagcaaactgaaaaattttgtttttttttttttaacacacacaccaaaaaatacctattttgggcacccagctcggcctcgttttttttggttcacccccccccacaggctagatagataataatcatttccggggccgccgatcgatgtaatcagaagttgcgggggtcgaatttgaagccgttaccgaagttgaagccggggggg

SEQ ID NO: 14288 - DNA, 246 bp, Zea mays
  Clone ID: MRT4577_113019C.1
gtgtgcaatgctgccttattgagaaccttcctacatttttggtacacctcatgaaaaatcttaggaaagaaaaaagagtgcagtgaactcctaaattctaatgttccattagtgcattacaacaaggcacaatagaaggcgatacacgagatagtcactcatgttaggcattagactctggcttatgctctcaaggatagattcaatatctgtggtgtccctctccagattgtgctgcatgtgaga

SEQ ID NO: 14289 - DNA, 425 bp, Zea mays
  Clone ID: MRT4577_11301C.1
cccacgcgtaggcgaggagcttgcagagttcgtgcatgaagcaggcgccacagcactggcccccgatccttgctggagcactaggcagactggtcttcaggcagaaccagtcgccccaggcggaggctgtttctccagttggtctcgacgagactccagaggccaaccaagaaggagcttcctgagacgaggctgttgatattcctactccttccgacaatgagaccaccgtggtctagcctgtcaactatgcagaggctgttgcttcctatgagctcaccgcggactagccagcagctactgatctttctacagctggtcaccaagaacctgtcgacgacgcagaggctgatactcatctggagcgggataaggcctgctactgaggccgatcccactcataagctgctggcattgcccaagcc

SEQ ID NO: 14290 - DNA, 410 bp, Zea mays
  Clone ID: MRT4577_113020C.1
attcggctcgagctagttctagatcgcgagtgcccgcccttttttttttttttttttggaggggacctttacttaaagacgcaggtcttagacaaaaccctgactgtgaagactattcaccctcgaggaggagccttgtgacacaatgacaacggggaaggtcaagatccaggacaaggagggcataccctcagaccaggagcggctaagctttgctgacaaacaggttgaggacggacgcacgcttggtgactacaacatccagaaggagagcaccctccaactagcgctacgtatcaggggaggcatgcagatctttgaaaaaaccctgaccggcaagactatcacccgcgggggggaggcctctgacaccatggacaacgccaaggcccatatccaggacaaggagg

SEQ ID NO: 14291 - DNA, 733 bp, Zea mays
  Clone ID: MRT4577_113021C.1
gccggccgggctgcgatcaccccactgggtcttcagaccattacctttatctactccagagcgcagaagaacccgatcgacaccatgagggtgttgctcgctgccctcgatctcctggctctcgctgcgagcgccacctccacgcatacaagcggcggctgcggctgccagccaccgccgccggttcatctaccgccgccggtgcatctgccacctccggttcacctgccacctccggggcatctcccaccgccgggccacctgccgccgccggaccacctgccaccgccggaccatgtgccgccgccgggtcatctgccgccgccaccatgccactaccctactcaaccgccccggcctcagcctcatccccaaccacacccatgcccgtgacaacagccgcatgcaagtccgagccagctgcagggaacctgcggcgatggcagcaccccgatcctgggacacagcgtccaggtcctgaggcatcatggcagtccgacagcgacgccctactgctcgcctcaatgccaaacgatgcgggagcaacgttgccagcagctcacgtaggaggagccgcagcaccggtaccaggcgatcttcggcttggtcctccagtccatcctgcagcagcagacgcaaatagggcaggtcgcggtgctgatggaggggcacatagcgcatcaactgacggcgatgtgcggtctgcagtagccgactcatgcacctacgctgc

SEQ ID NO: 14292 - DNA, 795 bp, Zea mays
  unsure (1)..(795): unsure at all n locations
  Clone ID: MRT4577_113022C.1
gtggcggccgcttcgaggcccggcccgggcctgggatcaccaccactcggatcttcagaccattatctttatctactccacagcgcataagaacccgatcgacaccatgagggtgttgctcgttgccctcgctctcctggctctcgctgcgagcgccacctccacgcatacaagacggcggctgcggctgtcaatcaccgccgccggttcatctaccgccgacggtgcatctgcacacctccggctcacctgcacacctccgatgcatctcccaccgacggtccacctgccgccgccggtccacctgccaccgtcgatccatgtgccgacgccggttcatcgtgccgccgaccaccagtgccactaccctactcaaccgccccggatctcagcctactatcccacaggcacacccatgcccgtgccaacagccgcatccaagcccgtgccaactgcaaggaacctgcgtcgctggcagcaccccgatcctgggccagtgcgtcaagttcctgaggcatcagagcagtctgacggcgacgccctactgctcgcctcagtgccagtcgatgcgacagcaccgttgccagcagctcatgcaagtggagccgcagcaccgggaccaagcgatcttcggattggtcctccagtccatcctgcagcagcagccgcaaagcggacaggtcgcgttgctgatggcggcgcagaagcgcacaactgacggagatgtgcggcctgcaacagtcgactccatgactctacgctgntgaacgcgatgtcccccactgaagaaactat

SEQ ID NO: 14293 - DNA, 397 bp, Zea mays
  Clone ID: MRT4577_113023C.1
gacttcataccattaactttatctactttagagcgcataagaacccgatcgacaccatgggggtgttgctcgttgccctcgctctcctggatctcgctgttagcgccacctacacgcatacaagcggcggctgcggctgccagccaccgccgccggttcatctaccgccgtcggtgcatctgccacctccagatcacctgccaccttcggtgcatctcccaccgtcggtacacctgccgacggctgtccacctgccaccgacgatccatgtgccgccgtcggttcatctgtcgccgccaccatgccactaccctactcaaccgccccggcctcaggctcattcccagccacacccatgcccgtgccaacagtcttatacaagcccgtgccaactgca

SEQ ID NO: 14294 - DNA, 484 bp, Zea mays
  Clone ID: MRT4577_113024C.1
acagaaaacatatatcaattattgtgtaaacctattaaaaggttaaaaccaattttaatttggaacagatggagtactttttttcttttcatttcaattgttcattcaggtcattgctcacactgacactgccacccatggtgatgcgtgacacattattactcaatcatcgccgcttaatgactcaactagcttgcttgccagcggcttttctacagcacattgtttcttcagtgggggacaccgcccgcagcagcgttggggcctggagtcggctgctgcaggccgcacattgccgtcagttgctgcgctttttgcgccgccaacagccccgcgaccttgccgctttgcggctgctgctgcaggatggactggaggaccaagccgaatatcgcctggttccggtgctgcggcttcacctgccttggctgctggcaacacttctgccccaaccactggcccttatgcgagcagttgggcgttg

SEQ ID NO: 14295 - DNA, 802 bp, Zea mays
  unsure (1)..(802): unsure at all n locations
  Clone ID: MRT4577_113025C.1
ttgggtacctcgaggccggccgggccggaccctccaacacaactaatcaaacacataagcaaacacccattacccaaatgcccccttgagagcgagcgcacacacactctctctctcttcttcaacctcctccctccctctctctctctcttccctgcattcttaggcttacatacatggcatacatggctcagcagctcgtcggccggatcacaatggaggtggcgccatcgaagctgccgtcgacgatggccaggtgcgctaggctcccgaggaacctcgacacgatcgcggaggacgacgacgacaaggaggcagcagccatggagtcgacaagggagctgcctctccgcaatgcgagccgcggcgtgcaggtcgtcgtcgtcgacgcccctgtgcactgcgccgacaagctggcctgctacctcgcccccatggcgaagacgaccgagtgcctcaagatcaaagcctaagtttgtcaggacatagagagagacgagggtgaggcaatcgtctcatggagctggatttcttgctctcttgttttagtctgagcatatggcaatccgtttcgttttacgtatactgcagttgctgtcagtgtttgctacctgatgtgcgttggtgcataaaagtgctgtaaccacgaataaaaaacctatactagtaacatgtgtttttaggttgttcacatcgaattaaaatcagttaaattaattgtatctataagacaaaacaccatagaaacaataataannnnnnnnnnnnnnnnnnnnnnaaaaaaaaaaaaaaaaaagcggcc

SEQ ID NO: 14296 - DNA, 347 bp, Zea mays
  Clone ID: MRT4577_113026C.1
attatataaataagataagatccaaatcacatcataaatttgaatgaacgacaaatcatatcatataatcaaccgtctcagccaaatcatcctctaactagaagtgacaataaaatggaacactcactctggagtttgacacgacaatagacaagttaaaaaggcaatatttaaataactaaagaccacatgtgttgtcctgatgattacaacatatgattcaacaactatctttccatcacaaaaggatggccttcatgcaccgtcaggtttggaatgggactgctaagttgcttgctgagttccttgagcctttaagagaaaaccaatcaggttatccatctcat

SEQ ID NO: 14297 - DNA, 413 bp, Zea mays
  Clone ID: MRT4577_113027C.1
ctgggtcttcagaccattatctttatctacttcagagcgcagaagaacccgatcgacaccgtgagggtggtgctcgttgccctcgctctcctggctctctctgcgagcgccaccttcacgcatacaagcggcggctgcggctgccagccaccgccgccggttcatctaccgccggcggtgcatctgccacctgcggttcacctgccacctccggtgcatctcccaccgccggtacacctgccgccgccggtccacctgccaccgccggtccatgtgccgccgccggttcatttgccgccgccaccatgccactaccttactaaaccgccccggcctaagcctcatcccaagccacacccatgccctggccaacagccgattccaacccctggcaagttgaaggaaacctgcgg

SEQ ID NO: 14298 - DNA, 323 bp, Zea mays
  Clone ID: MRT4577_113028C.1
ggtcttcagaccattagctttatctactccagagcgcagaagaacccgatcgacaccatgagggtgttgctcgttgccctcgctctcctggctctcgctgcgagcgccccctccacgcatacaagcggcggctgctgttgtcaaccaccgccgccggtcatctacccgccgcggtgcatctgccaccttcgggtcacctgccaccctccggggcattctccaccgccgggccaccctggcgaccgccggttcacctgccaccgacggtccatgtgcctgcctcgggtcatcttgcggcccgccaccttgccactaaccctact

SEQ ID NO: 14299 - DNA, 784 bp, Zea mays
  unsure (1)..(784): unsure at all n locations
  Clone ID: MRT4577_113029C.1
ggcccgctcgaaggccggcccgggctggcgatcaccaccactcgggtcttcagaccattatctttatctactccagagcgcataagaacccgatcgacaccatgagggtgttgctcgttgccctcgctctcctggctctcgctgcgagcgccacctccacgcatacaagaggcgagtgcggctgccagtcaccgccgccggttcatctaccgccgccggtgcatctgccacctccggttcacctgccacctccggtgcatctcccaccgccggtccacctgccgccgccggtccacctgccaccgtcggtccatgtgccgacgccggttcatctgccgccgccaccatgccactaccctactcaaccgccccggactcagcctcatccccaggcacgcccatgcccgtgccaacagacgcatccaagcccgtgccagctgcaaggaacctgcggcgctggcagcaccccgatcctgggccagcgcgtcaagtttctgaggcatcagtgcagtccgacggcgacgccctactgctcgcctcagtgccagtcgtatgcggcagcagcgttgccagcagctcatgcaggtggagccgcagcaccgtgaccaagcgatcttcggattggtcctccagtccatcctgcagcagcagacgcaaagcggacaagtcgcggtgctgttggcggcgcagatagcgcagcaactgacggagatgtgcgggctgcagcagtcgactccatgactctacgctggntgacggcgatgtcccccactgaagaaactat

SEQ ID NO: 14300 - DNA, 702 bp, Zea mays
  Clone ID: MRT4577_11302C.1
cctgtgcggcgctcgaggcggccgggtgcggaaactcctcttccccaaactccagttgcatccaaccgcaagcgaggaaacgaagacacgcccacccacccgctccggcagacagcggctatgcagcagcagatgcccatgccgccggcgtccgctgccgccgcgccggcggcgcccccggcgtggcgatatcactaccgagcggatccagaagtgttgggacgacaataagtaacttattctgcccatcctggaaaatcgcaagttaagtcagtaggatgacatgtgctcagccatccgttcaccttcaggagaacctcttgcacctggctgcgatagctgatgaccaaccccagccgccgcaaataccctgcacgacgccctcagatgatgctgcctgctatactgcctgttgcggggcgttacatggcacaaccacgatgtcccctccaagaaccccattaaccccacagcatatgcaggagcggcagcaacagcaacagttacttgagccgcagcagcatgtgcgggctcgtacgtttcctggacagatggtcatgagaccctgcgccctcaaccgtatgcagaatcaggagtctatgcagggggaagaataatgccttgtatacaaccaacgcgagaacctaagagtctttgaatgacagctactaccccctaccaggttactgagtgctttagatg

SEQ ID NO: 14301 - DNA, 340 bp, Zea mays
  Clone ID: MRT4577_113030C.1
aattcaccaaattatgttgttaggagttataatgttttttttcatattcttccgaacaaggaccccacaagaaaacacaccttcttttcatgcaaaccggaagaacaaaaagtggcccatatcaggtatgatcaacactaagaccccatttacgctgggcattaacaacaaaaaaaaactcatccttataaaaagggaacctgaatcagatcatgcataaacaccttgtgttggggagtttaacatatctaaaattggcaccacaccaaaaacagcagagcccgttgcttcattggtcttgttgatggcttcattaagaccctgattagggcacacaaaa

SEQ ID NO: 14302 - DNA, 815 bp, Zea mays
  Clone ID: MRT4577_113031C.1
tccggccgggaaataccaccctgggtcttcagaccattagctttatctactccagagcgcaaaagaacccgatcgacaccatgagggtgttgctcgctgccctcgctctcctggctctcgctgcgagcgccacctccacgcatacaagcggtggctgcggctgccagccaccgccgccggttcatctaccgccgccggtgcatctgccacctccggttcacctgccacctccggtgcatctcccaccgccggtccacctgccgccgccggtccacctgccaccgtcggtccatgtgccgccgccggttcatctgccgccgccaccatgccactaccctactcaaccggcccggactcagactcatacccagacacacccatgcccgtgccaacagacgcatccaagcccgtgccagctgcaaggaacctgcggcgttggcagcacccccatcctgggccagtgcgtcgagttcctgatgcatcagtgcagaccgacggcgactccctactgctcgactgagagccagtcgttgcggcagcagtgctgccagcaactcaggcaggtggagccgcagcaccggtaccaggcgatctttggcttggtcctccagtccatcctgcagcagcagccagaaagcggccaggtcgcgttggctgttggcgcgcacagatagcgcaccaactgacgatcgatgtggctgcctgcagcagccgactgcatgcacctacgctgctggcgggggggtgtcccctcactgaacaaactatgtggctgttaatatagcccgctggctagctagctagagtgagtcatt

SEQ ID NO: 14303 - DNA, 901 bp, Zea mays
  Clone ID: MRT4577_113032C.1
cccacgcgtccggcaactcagctgtatctacttccagacgcaccagatcccgtacgacaccgtgtgggtagtgctcgttgccctcgctcttctggctctcaatgagagcgccccatcaacacatacaagcggctggtgaggctgccagccacacgacgacggataatgtacagtcgacgatgcataaacaaactccggatcacctggcacctcaggtgcatgttccaccgtcggtccatctgccggcagggatccacctgtcaccgacggtgcatgtgcaccagaacgttcatttgccgtcgccacatgccagtaccctactcaaccgtgcctgtcttaaccttatccccagccacacccatgcccgtgccaacagccgcatccaagcccgtgccagctgcagggaacctgcggcgttggcagcaccccgatcctgggccagtgcgtcgagtttctgaggcatcagtgcagcccgacggcgacgccctactgctcgcctcagtgccagtcgttgcggcagcagtgttgccagcagctcaggcaggtggaacccgcagcaccgggtcccaggcgatcttcggcttggtcctccaggtcatcctgcagccagcagccccaaaacggcccaggtcccggggctgttggcggcgcagatagcccagcaactgcgggcgatgtgcggcctgcagcacccgactccatgcccctacgctgctgccggcggtgtcccccactgaagaaactatgtgctgtagtatagccgctggctagctagctagttgagtcatttagcggcgatgattgagtaataatgtgtcacgcatcaccatgggtggcagtgtcagtgtgagcaatgacctgaatgaacaattgaaataaaaaaaaaaaaaaaaaagcggcc

SEQ ID NO: 14304 - DNA, 162 bp, Zea mays
  Clone ID: MRT4577_113033C.1
aatctcgcgcattcgattctaccgctcttcgctgctctccgaccccaagctccgaagggcgccgcctccggcgaggtccccctcgtccgagacctgatacctggctgacggatgatgccaccacccattactccaacttcgacatcgttgtcgaacgtctga

SEQ ID NO: 14305 - DNA, 971 bp, Zea mays
  Clone ID: MRT4577_113034C.1
agaccattaactttatctactccagagcgcattataacccgatcgacaccatgagggtgttgggcgttgccctcgatctcctggctctcgctgcgagcgccacctacactcatacaagcggaagctgcggctaacagccaccgactccggttcatctaccgcttccttatcatatatcacatacagttcacctgacacatcaggtgcatctttgaccaatttttcaaattccaagatcggtacacctgccaccgtcggtccatgtgccaacgccggttcatctgccgcctacaccatgccactaccctactcaaccgccccggcctcagcctgatccccagccacacccatgctcgtgccaacagccgtattcaagctcgtgccaactgcagggaacctgcggcgttggcagcaccccgatcctgggccagtgcgtctagttcctgaggcatcagtgaagccccacgacaaacgccctactgctcccctcagtgccagtagttacgccagcagtgttgccagcagctcaggcaggtggacccccagcaccggtaccaggcgatcttcggcttggtcctccagtccatcctgcaccagcagccgcaaagcggccaggtcgcgggcctgttggcggcgcattatagcgcatcaactgacggcgatgtgcggcctgcagcagccgactccatgcctctacgctgctgccggcggtgtcccccactgaagaaactatgtgctgtagtatagccgctggctagctagctagttgagtcatttagcggcgatgattgagtaataatgggtcacgcatcaccatgggtggcaatgccagcgggagcaatggcccgaatgaacaattgaaatgaaaagaaaaaaagtactccttctgttccaaattaaaattggttttaacctttaataggtttatacaataattgatatatgttttctgtaaaaaacccccccacgcc

SEQ ID NO: 14306 - DNA, 221 bp, Zea mays
  Clone ID: MRT4577_113035C.1
gcgtctctgcagggctcgcacatgctcattttccctcctcgacctgaattaacaatcgcgagatcccaggtttgacctttcacccagccttgttgttccaatggggcccactacacccatgtccccttcttcatcgcacacgcaggacactgcacctgagcctctcaagcactcagcacgccaatttgtccacgtgaccgtaatcttgatccacgccctcc

SEQ ID NO: 14307 - DNA, 335 bp, Zea mays
  Clone ID: MRT4577_113036C.1
gaaaactgcagcttccttctcaccttgaagaataatcctagaaaactcacaaaatgtgtgatgcttttgtaggtacctggaaacttgtctccagtgaaaactttgatgattatatgaaagacgtaggagtgggctttgccaccaggaaagtggctggcatggccaaacctaacatgatcatcagtgtgaatggggatgtgatcaccattaaatctgagagtacctttaaaaatactgagatttccttcatactgggccaggaatttgacgaatcactgcagatgacaggaaagtcaagagcaccataaccttagatgggggtgtcctggtacatg

SEQ ID NO: 14308 - DNA, 963 bp, Zea mays
  Clone ID: MRT4577_113037C.1
agcagtggtaacaacgcagaggagcgcgggaagcagtggtaacaagcagagtacgcggggtcgaggccaagcccaaaccttcccaaaacccttttcccgttctggtctctctttcccgtctccgagcgctgccgccgcccgccgccagcgccggcgcgcgagaaacaagaggaagaagaagccaaccgatccagcagcgatggcggtcggtggcctgttggggggcgctttctgggcgacgcgggcgctggaggtggtcaagcggaacgattccccgggcctgctgtggaagcgcatcaagctcaccaccacccgcaagaacaacgccaagaagcgccttaagcggctctggcagaatgaggcggttataagggcttgtggtgaatcagaatccagatcagcgtctaacgtggcttccaccactgagaaacaacagtagcctttgactatttcccccagtttgctgtcatcagattgaaagccaagtgcgtgtataaatcttactttcttcaacatcattcgttgctaccatatgcaaccttgccccctcccgaactccggcgttatttttatttcactgtttccatgttacttctgaaaaaactacttgggattgttttctttcctcaattattctgcatatgctgattgatattgcctgcggtaatgtaatgcattgcacccgttgctgtcgctggcatgagcttgccaccattttttgaagcttgcaatcaattgacatgtggtgtgttgtgtactagttacgtgccgtacgcagcgtactcgcatgtgctgatgttcttcattgtacgttgtaatagttttttttgttatattggctaggtggatgtaaatgtgagtttggaaactatagttcaaattcctatgtgtataatttatttaaatagaaaaaaaaaaaaaaaaaaaaaaaaaaaaaacgtactctgcgttgttaccactgct

SEQ ID NO: 14309 - DNA, 265 bp, Zea mays
  unsure (1)..(265): unsure at all n locations
  Clone ID: MRT4577_113038C.1
ccggccggggacgcgctcgcgggatggcggcccgactcgctctgctgggggtggtggcccgcggcctgcaacgagcagggccgcgtcaccaagctcttcctcgagcgactcaacatcacgtccacgctcccgccggccatcggcgagctcgaccagctggagacgctcagcatcatcgagatgccgggcctgggcgggcgcatcccggactccttctgcaacctccggcacctctcactattcaacctcatggtcacnnctccgt

SEQ ID NO: 14310 - DNA, 395 bp, Zea mays
  unsure (1)..(395): unsure at all n locations
  Clone ID: MRT4577_113039C.1
agcggaggcacgcccaagcccaaacagagggcgcaggaggcgcagaagagggaggaggccacggagaggaccggccgggaccngcggaagcacgagaagccgacaaggangagccccaagaccccgagggccccggcgccgccgccaacgagcgacgagggggggancgggccgccaaacaagagcagcgcggacgaggacagcaggggccgggcaggaanaccaaggaccggaacagccgggcccacagagggagnaaccnccgcnccaaggngaacgngggcacggagccgcacccggagacgaacacggagacccnagagaagaangggagcaggcaccaccaggacggaacagggggagcaaggaacgaaaagnaaacaaaggccgacgac

SEQ ID NO: 14311 - DNA, 194 bp, Zea mays
  Clone ID: MRT4577_11303C.1
cctgcactgaaatgagatcatatagcggattaaaggagctacgaaccatcagggatacggtgcagcatatgatgtagctgctaggccagatgtacactgacctactatggatctcgatgtacgccgaggagatttggatacaggatgagcgtactctgacgaagaaaataacatggaatccagagatgcatagt

SEQ ID NO: 14312 - DNA, 416 bp, Zea mays
  Clone ID: MRT4577_113040C.1
agctagaagtcgttcgtgcgcggtgaataataatggaatatctaaacagcactacagttttgatccatccccaacctggaactaggcgaaaacaggcgggacacttgcgcccatatccacacgcgtggtctgatgacgtaccgaggcctccagaccccttgttgccattcttcaaacccacaccactctgatgcacctaccaacgcttatttaagccggactctcaccacaccgtgttaacctatgagaagccggctgaaagcggagcattgactttatgcgcgagattaacatcctgggcgaaaacacctgccgagggacccacgttggcggtgtaggccctctcaactacttactgaaggatcttatacgtgagtatacacatgacggggccaaaaagctttgatgacacaatt

SEQ ID NO: 14313 - DNA, 347 bp, Zea mays
  Clone ID: MRT4577_113041C.1
gggggggggttttttttttttttttttttaaaaacgaagtccacaacaacaattttactcgatctagaatatacccaaccctttcgccctttagagatcacaacccctgaacggctttggcccccaaaaaaagggggtgcccccactgaagaacgaagctggggggccccacctttaaacgggtgaagggccccatggggacatgggtggggggcgaacccagccggcaaaggggacaaccaacgaaatccgggggacggcaaaatcccggggggacaaaaaggggcaagggttttaccctgcaaaggggggccccccaccaaagcgttgtgtcggggggccccaaa

SEQ ID NO: 14314 - DNA, 386 bp, Zea mays
  Clone ID: MRT4577_113042C.1
ggggcccccttttttaattatggggggcctgcatattccccaacaatgggcacgttgcaccggcttttacccctggaacaggaaaaatgaattccttctttccggccgagctaacgaaaaaagggaaaaaaaccatgggggtctccggacttaataaggcgctgccaacattttattggggaaaaaaaaaaaggaaaaaagggttttaatttttttaaaagtgcccccaataattattttaaaacttcttaaaatggtcataaggggtccccctcacccgatcatcattgagaaccaccctaacacaacagattattgttcataaccaacattttaaggcgcggtgggcccacaaaacctctattattgggccaggcccccaaaaa

SEQ ID NO: 14315 - DNA, 1102 bp, Zea mays
  Clone ID: MRT4577_113043C.1
ccactcgagccctcccgtagcgatcgacctctgaactacgcagcggaaaaatcccatcaaaaaacaaggggaaaaaacaacacagcatgaactgcttgaagaactcgcgttctgtcctctcgcgactccttcgccacaggccccacgtagcagcgccaccgccgccgacgccggcgacggcgccgcagtcaccggcttcacggtactactactacgcctcccgcgtcaagccagccgtctcccgaccgccgccgccgccccagttgccgagatctaggcactactacacatccccgcggcggcagcaggtcgtccacttcaaccgccgccgcggcgggtcccggtggtaccacgaccagcggaagctcacggcggtggtcttaatcagcggcggcggggcggtcgcgttctacttcggccatttggagaccgtgccctacaccaaccgctcccacctcgtcgtcctctcgccgaagttcgagcgccagctcggcgagtcccagtttgcccagctcaagaaggagttcgggcccaagatcctgccaccgctccaccccgacagcatccgtgtccgcctcatcgcctcggagatcgtccgcgccgtccaccgtggcatctccgtccaacagcgccacgacgccttctacggagaggacgcctcgtatgggtatggcggcatcgccgacgacctctccatcaagaaccgcgacgccgacgctgctgcagcgctgcttggtgcttcccccggcaagaacgccagtgctgccgtggccgctcagcgagatgacgagctcctggatgacaggtgggtgaccgagagtcggagccgaggtaaggcacgtggggcgcaaccgcagacgggtcacctggacggggttaactgggaggtgatcgttgtcaaagatgacctcgtcaatgcattttgcctgcctggtggcaagattgtagtcttcactggattgcttagcaacttcagggccgatgctgaggttgccactgttgttgggcatgaggttgggcatgctattgcgaggcactccgctgagcagatcactaagaacctctgggtggcaatcctgcagattgtcatcctgcagtttat

SEQ ID NO: 14316 - DNA, 126 bp, Zea mays
  unsure (1)..(126): unsure at all n locations
  Clone ID: MRT4577_113044C.1
cccagcgtccggcatacggtgntcaggatactcctcgtaaaggtcagcagacgctctagagtacagttgacatgtctttccatcgctgcttgtgcagttcgaagattttgttttgaggcaattact

SEQ ID NO: 14317 - DNA, 464 bp, Zea mays
  Clone ID: MRT4577_113045C.1
ggaaaaaaaagggcccaacgagggcattcaaacaggaaggcaacagacatggcccccaaagggggggtatcccggggcattccaaacattcaagcccccctttttttggaaaccctcactttagcaaatcccacaaacagaagttaaaggggcccccgctttgccgggggggcattttttatggggcagcaaaaaagggtacattccccggtggggggggggattaaacttcctatttcccaggtgggggacgggaaaaccagagatcacccccatgctttaagggcccccccccccccaattgccttgaagaaaggcgggttactggggggcccactggactttttgggctccccccgggattttggggcccccctcgaaccccccctgggaagggggagcttgcttcctgggcattttttcctggaggggggtcacaaaaggcataggcggccccccgcatt

SEQ ID NO: 14318 - DNA, 300 bp, Zea mays
  Clone ID: MRT4577_113046C.1
gctcggaattcggttcgagcacgaattttctggacatccctgtttatcagcccaggaagaggcagcccaacagccaggtcttacatccacggcccgagttgacaggacataccccagctaacttcttccatgaccatcctgatcaaagtggaccgaatatccggaatcatgccgtgatgacgatacacctgctgactcctacatgggcgacaacgttgcagaagatggagccaaaccagctgctccagctaacatattcacataatccaaaggacaggcggatccgcattcaccggcaag

SEQ ID NO: 14319 - DNA, 159 bp, Zea mays
  Clone ID: MRT4577_113048C.1
cccacacctgcggctaatcttaacctgatacatttgcaaacacccatcacgtagcctggggacaccacactagcgagaggggtaccttaattaacatccacctaccgccatctcaccctttaaaatcaccaaaaatgttttactactcaactttcactt

SEQ ID NO: 14320 - DNA, 756 bp, Zea mays
  Clone ID: MRT4577_113049C.1
cccagcgtccgcttcttccagctttgaattttcagttgtttgattggtcacgcgccgcgccgcgcgcactgccggagaaacggtgaccggcaatgcggcggtgttgtggagacggcgagcttcggtttggttccttgtgaggttcgatggcgagagaggacgaaaggagagctcgatcgagaaaatagcgagtgcgactgtgcccacacgatcacgactcagcagacaatgtatagcgcaaggcggtgagcagtgagctccagcgccacccgcccacccgtccacgcacccgggatgggaagcctgaagccgccgcgcaggcgcatcagcagtagacgggtcagcgccggccattctccatggtgctgctgctggttggcggtagctgcagcgtcgcaagcgagcgccatggccgcccatggccatggcccatgcctgccgaaagtggatgtgtacatgcatgccctgtgcgtgaggatggtgaccgaggggtggtttcgtcgtggcaaaactgtaccgcgctttaaccacgtgattcgcttgctcttgctgctgggttgcttgctactagctaggactacttgctattgcaccagcactgcctcttgatctgtacactagcaagttgtaactgtaaccctacatctacatggccctgagaattcaaatgcattgggtagtgggtatcaggcatttcttgtgtacgagtaaacgtggggtttgaatctaacacgtacatagcttgtgggctggtcg

SEQ ID NO: 14321 - DNA, 1171 bp, Zea mays
  unsure (1)..(1171): unsure at all n locations
  Clone ID: MRT4577_11304C.1
gactcctataatgggttgcctcgaggccggccgggccgggactatccgacactagggcacgagccagcgggcgggctccagtcgcaactcgcaacacagtcacagacgccgccgccgcaaagaaagacgtcaactccaggagacaagacagtgagaactgaagagaaggatgggcttcgagaagcagatcctgagatccggcaccggccccaagccgataaagggccagaaggtcaccgttcactgcaccggctacgggaaggatcgtgatctgtccaagaaattttggagcaccaaggaccctgggcagcagccattcagtttcagcattggtcagggttcagtgatcaaaggatgggacgagggagttatgaccatgcaagtgggtgaagttgctcgtatccagtgcacgcctgattatgcttatggagccggcgggttcccagcctggggaattcaaccaaactcagtgcttgtgttcgagattgaagtcctcagtgcccagtaattcgcatctgtcagctatggaaacgttggccatgcttctcaagtaatgaaataattccgttgtcacctcatgctacatacagcagattggtgttacgagttaaatcctgtgaaactttagcattctgtaaccgtggatgtcgagtttatggagttccttgtgtggcgcctcaagtcaagttctcgtcaaagattgtaatctgatggcttccattgtgacttgtaggcggctgcaataaacttacttgatgcaattattgcagtcgaatcctgtgaacctgtgatgttccagtggaaacggtagatggctcgatcgaaaaaaaaaaaaaaaaaatttgcggaaaaaaaaaaaaaaaaaaaaaaaaaaaaaaaaaaaaaaaaaaaaaaaaaaaaaaaaaaaaaaaaaaaaaaaaaaaaaaaaaaaaaaaaaaaaaaaaaaaaaaaaaaaaaaaaaaaaaaaaanactctccccggggggcccttcaaaggggcaaattttccaaattcccttccccttggggggggtttatttttgattttaaaggccccattggccccttttgggggcctttttaaaacccccggcccccctttttaaaacgggttaaagggaaaaccccgggggttcccaaattaaagggcttggaaaaaaccccccttttcc

SEQ ID NO: 14322 - DNA, 325 bp, Zea mays
  Clone ID: MRT4577_113050C.1
accctccaaagaaacaaaaaaaaggggggcccgaaacaccaacgagggagcctaaaccgaacgagaagcatggaaccaagagcccacataccaaagaactgccccatggatcaacaaaaatgggcaagagctctatatgcctctgccaaactatgagtcgcctacacttatagcgaaaggcaacccccactccctttggcagcaccaactaaatacggaacccaatttgaaagccaaatttccgacccggacgcttttgggaagctcctaaaaaccaacgaatggcaaggcgccccacccaggaaagaacccaaaccaaacggaa

SEQ ID NO: 14323 - DNA, 156 bp, Zea mays
  Clone ID: MRT4577_113051C.1
ctcgagccgttttgatggagtgagcccttccattagtttgacgaagaggttgtttctagatgagttgatcagttggagtaaggcgggagcgaagcatttagacagtttgggaattattgtcactttaaatagggtctcgtagggcccatcaggctt

SEQ ID NO: 14324 - DNA, 1459 bp, Zea mays
  unsure (1)..(1459): unsure at all n locations
  Clone ID: MRT4577_113052C.1
cgtccngcaactcatccngctggctaagaccagggcgcggagcgcaaagggcgcanggcgcatcgcgcaggggctgggcggccaagagggcgagcggcggcgccctcaactgctcttcgatctgggcggcgatctcagccgtatctctcgcaagtgtcggttctcctctcctctgctcnggccggggggatgggangtaaatcccctcctttctgggcacaagagacacacgctctctgctcctttctccattgggctactgctcctatgtggcgacggcgaggtgctgctgctcctgtacggcgaggtgctgctgctgctactgtgtggcgaggtgcanctgtgctccattgcctcacttgtgcgcctgcgtggtgctttgtttggtgaaaatataagaaatgaattaaaaaaaagatcttggctgccaactggaccgcttcggactggccgagcagcccagctagcaagccagccagctgtcgtaaggaccgtgggatcgtgcggccaggagggagctgagagatagacccgcacacgcaagttgtgagagagggagagaaggagctgaggctgagcggcggcggcgggctaaacagactccccgagatcttcggcgagattagtctgggctgatgctcatccggttggctcctccccttctcagctccttaaaggcatggcgcgtgtaccagagtcggctcctctcggtttttctttctccagtttgctgttccagtcacaagttgatcgatccgttcggtccctgtgtggtgctgtgttctctgatcgctgtcaaccgtggcctggtgcttgggctccctgctgcgcggtgttcctcttctcgggctggtgccgaggacgtctccctcggctccggcagcggctccagtatctccgtcaacctcccgccgtgcaggtccggacgtgggcggcggaattggttttctgggacagaacctcgtgttcgctgagctggtcttcccacgtagacaatctacgtgctgtgagttacccgttgcctctatttatttattgaataattttgtgcaatctgctagtattatttacttgggcgtgattgcacaatttgtgggcggattatgtgctcgatgatgatagcggtgtagtgagacgacgtgacagtctgggttttagtgtgttgttattttcagcattgatattatttgtgcctagttatttcttactattgtgcaagctgattatttaagttcattattgttccttaatttttatgcacactgttttgatcttaatattcatgcttgatttcaaggctcttaatatttgatctaaaaccctgatttggtaagataggactgtcacgttagtcgaggatctttgatcaccctttagcgttggaggggctgttagtgtggtgctatttcagcttgatattattggcctagtatttctactattgtgcagctgatattta

SEQ ID NO: 14325 - DNA, 1612 bp, Zea mays
  Clone ID: MRT4577_113053C.1
tcagttcggattccaacggcaggaccgtccaaaaaacggccgggttcgctcgtagtcgtagctgtagctggagaggccatagtcttctctttcgcgtgccatgtcattgttccgtccagattcacagacgctgaaaggatccgatgccgactgcccgaggacgaggaacgcgggcgcacgcaaggctgagcggacgagcgcaggctcagccgcgactcgggcggcggcggcgcccaactgccgatccgcttcctccgtgtaactggcgaccgaatcttgcgcccacgatggatcggcctctggtaaaagctcctgctcgtctcctttacatatgtgaggtgattccccttcctcggtataggctagagttccagagactggaaatcttggctcctctctcctgctctctattccaatcacacattcgatcgattcaatcggtcctggcattctgtgcgtctctctggtggcgattgggagagagtggagttggctccgcgcttgtgctgcgtgctctactggtgcactgtttgatctggttattgtccaccgtggcctggtgcttgggctccctgctgcgcggtgttcttcttctcgggctggtgctgtggacgtctccctcggctccggcagcggctctagtatctccgtcaacctcccgctgtgcaggtccggacgtgggcggcggaattggttttctgggacagaacctcgtgttcgctgagctggtcttcccacgtagacaatctacgtgctgtgagttactcgttgcctctatttatttattgagtaattttgtgcaatctgctagtattatttacttgggtgtgattgcacaatttgtgggcggatttattagctcaatgatgatagcggtgtagtgagacaacgtgacagtctgggttttagtgtgttgttgattcagcagcattgatttcagcattgatattatttgtgcctagtcatctcttttactatattgtgcaggctgattatttaagttcattattgttccttaattcctgtgcacactgttttgatcttgatattcatgcttgatttctaggcttataatatttgatctaaaaccctgatttggtaaaataggactgtcacgttagtcgaggatctttgatcaccacttagcgttggagggctgtttagtgcagcaacccgctattttgagagcaatattttgagataaacgatcatgtttattagtttaatctgcctttctcatctgcaagcggacgcgtgggtgcaaatggatttgagtagctatattacatgttttcatgtcctggaattgctactgttcattgctgttataattacatatggcatttatctgagttatatgcttgttttattcggaattagtatatttaatctatctaaatatgtagaaagcatgtcacttattcctctaaatttacaacagtatttgtgtgcagtgcggtgcggtgcacccaagtggcttgcgattcacatattttgtagctacggcagggcagctggctgactaatgaaggggtattagttagtgccagcacattgctacaatttatatatatcatatagatagaacttgcttaaataagatattttattt

SEQ ID NO: 14326 - DNA, 354 bp, Zea mays
  Clone ID: MRT4577_113054C.1
ctttatagggcgttcttctttgtttggtggaatttccattttcataatcaactatatccgtccaacaaataaaccagtgcatgggcgggaaaaaacaaaagagaacatttttttttgggccgccttctccccccttcttgatgggagggagattgacccacacacgggtacaaatagaacggtttcttctatccatcggaggtttacatcctaaacgcccgatttggacctaaagccctgaaccaaaatccgcacatctggtcttactaggaaagcttcttccatccagtacattctagctctgattatcttgaaagtgaatcctgtttcagatcgcaggatggcatacaaaat

SEQ ID NO: 14327 - DNA, 868 bp, Zea mays
  unsure (1)..(868): unsure at all n locations
  Clone ID: MRT4577_113055C.1
ccggtagtagcacaggcaaaaggtttcgatttgatgtatgtgaggcttctttcgtttgcaaaaaaaaaaaaaaaaaaaaattggttactgcgcatgctaatgagtaatgagtttttagtcgcccagcccagctgcgtacacgcgcgccgccggccgggccggtagtagcacaggcaaaaggtttcgatttgatgtatgtgaggcttctttcgtttgcaaaaaaaaaaaaaaaaaattggttactgcgcatgctaatgagtaatgagtttttagtcgcccagcccagctgtgtacacgcgcgccgccggccgggccggtagtagcacaggcaaaaggtttcgatttgatgtatgtgaggcttctttcgtttgcaaaaaaaaaaaaaaaaattggttactgcgcatgctaatgagtaatgagtttttagtcgcccagcccagctgcgtacacgcgcgccgccggccgggccggttgttgcacaggcaaaaggtttcgatttgatgtatgtgaggcttctttcgtttgctnnnnaaaaaaaaaaaaaaattggttcctgcgcgcgcctctgagtaatgagttttttgtcgcccagcccagtttggttcacccgcgccccccggccggccgggtgtttccccggccaaagggttcgttttgatgttttgtggggctttttttttttttgcaaaaacttaaaacaaagtaacaagttttcttcctccccctcccctcctgggcggggcgtttttttctccccccccccccctttttgtgccccccccccccctccccccctcgtctcgtttttctcctcccccgcggtgtcttttctctctttgtgtcggcggtggttttttttttttgcttg

SEQ ID NO: 14328 - DNA, 1075 bp, Zea mays
  Clone ID: MRT4577_113056C.1
ttttttttttggaaaaaaactttttttttttcatttcaattgttcattcaggtcattgctcacactgacactgccacccatggggatgcgtgacacattattactcaatcatcgccgctaaatgactcaactagctagctagccagcggttatactacagcacatagttttttcagggggggacaccgccggcagcagcgtaggggcatggagtcggttgctgcaggccgaacatcgccgtcagttgctgcgctatttgcgccgccaacagccccgcaacctggccgttttgcggctgctgctgcaggatggactggaggaccaacccaaaaatcgcctggtaccggtgctgcggctccacctgcctgagctgctggcaacactgttgccgcaacaactggcactgaggcaagcagtagggcgtcgccgtcgggctgcactgatgcctaaggaactcgacgcactggcccaggatcggggtgctgccaacgccgcaggttccctgcagctggcacgggcttggatgcggctgttggcacgggcatgggtgtggctggggattaggcttaggccggggcggtttagtaaggtagtggcatggtggcggcggcaaattaaccggcggcggcacatggaccggcggtggcaggtggaccggcggcggcaggtggaccggcggtgggaaatgccccggaggtggcaggtgaaccggaggtggcaaatgccccggcggcggtaaattaaccggcggcggtgggtggcaaccgcaacccccgcttgtatgggtggaggtggcgctcccaacgaaaaccaggagaacgagggcaacgagcaaccccctcatggtgtcgatcgggtttttttgcgctttggagtagataaagctaatggttttaagacccagtgggggggaattttttttttttttttttttttttttttttttttttttttttttttttttttttttttttttttttttttaaaatgataggaacaacacaggaacaaccctacctattacattacccatcgctctattatttttcgctattattttgaattaaatttacat

SEQ ID NO: 14329 - DNA, 1102 bp, Zea mays
  unsure (1)..(1102): unsure at all n locations
  Clone ID: MRT4577_113057C.1
gcacgaggcggcggcggcgggctgaacagactctccgagatcttcggcgagattagtctgggctgatgctcatccggttggctcctccccttctcagctccttaaaggcatggcgcgtgtaccagagtcggctcctctcggtttttctttctccagtttgctgttccagtcacaagttgatcgatccgttcggtccctatgtggtgctctgtctgttctgattattgtccaccgtggtctggtgcctgggctccctgctgcgcggtgttcgtcttctcgggctggtgccgtggacgtctccctcggctctggcagcggctctagtatctccgtcaacctcccgccgtgcaggcccggacgtgggcggcggaattggttttctgggacagaaccttgtgttcactgagctggtcttcccacgtagacaatctacgtgctgtgaattattcgttgcctcactttatttactgtttaattttgtgcaatctgctagtatcaaatacttgagtgtgattgcactattgtgggcagatttatgtgctcgatgatgatagcgatatagtgagacagcgtgactgtctgggttttagtgtattatcattttcagcattgatattatttgtgcctaattaaatctctctttgttgaggctgtttacctgtgttaaattctgttattttatttagtacacagctccttactattagtatttatacttgattattaggcttattacatctgatctaaaaccttgatttggtaagataggactgtcacattagtcgaggatctctgatcaccttttagcgttggagggctgtttattacagcaacccgcgattttgagagcaatattttaagataaacaatcatgtttatttgtttaatttgccttcttcatctgcaagccatgtttaattataaaatggacctgagatgctattttacatgtttacatgttctagaattgctactgttcattgctgcaataattatatatggcatttatctgagttatatgcttgttttattcggaattagaatatttaatntagttaaatatcttggaagcatgtcacttatttctctaatattacaacaa

SEQ ID NO: 14330 - DNA, 955 bp, Zea mays
  Clone ID: MRT4577_113058C.1
aaaaagggtaaaaccaattttaatttggaacagagggggaactttttttcttttcatttcaattgttcattcagggcattgctcacactgacactgccacccatggggaggcgggacacattattactcaatcatcgccgctaaatgactcaactagctagctagccagggggtatactacagcacatagtttcttcagggggggacacccccggcagcagcgtaggggcatggagtcggctgctgcaggccgcacatcgccgtcagttgctgcgctatctgcgccgccaacagccccgcgacctggccgttttgcggctgctgctgcaggatggactggaggaccaacccgaaaatcgcctggtaccggtgctgcggctccacctgcctgagctgctggcaacactgctgccgcaacgactggcactgaggcgagcagtagggcgtccccgtcgggctgcactgatgcctcaggaactcgacgcactggcccaggatcggggtgctgccaacgcccgcaggttccctgcagctggcacgggcttggatgcggctgttggcacgggcatgggtgtgtctcgggatgaggctgagcccgggccggttgagtagggtagtggcatggtggcggcgtcagatgaaccgtcggcggcacatggaccggcggtggcaggtggtccggcggcgtcaggtggaccgacggtgggagatgcaccggagttggcacctcacccgcaggtggctgatgcaccgtcggcggtagatgatccgtcggcggtggttggcagccgcagcctccgcttgtatgcgtggaggtgtcgctcgcatgcgagagtcaggagatcgagggcagcgatcagcaccctcatggtgtcgttcgggctcttctgcgctctggagtatatacagactaatggtgctgaagacctgcagtggtggtggatccccggcccgg

SEQ ID NO: 14331 - DNA, 209 bp, Zea mays
  unsure (1)..(209): unsure at all n locations
  Clone ID: MRT4577_113059C.1
cgagcgccgcctacccggcgcaggcgacgccgggggaggcgtgtgtatctgttgtatgtgccactgacccaggtttttgcaggctgcggaactcccctcctttcagacatggtcgcctcgtggttgttgatgttgcctgtgccgcacaggcgccacgggctccatcctgtttttttttttttcccncctttttttgtgggggggggggg

SEQ ID NO: 14332 - DNA, 679 bp, Zea mays
  Clone ID: MRT4577_11305C.1
acgcccacgcgtccggcaaggaagtcgtagaaactagaccctcgtcttcgcagcagagcagactccagagggtagagccatggcagacagctccgatcaagttcctcccgctgcaagaaagctggacggcaaggtagcgctgatcaccggcggcgccagcggcatcggggagtgcacggcgcggctcttcgtgaagcacggcgcgcgcgtcgttgtggcggacatccaggacgagcctggctcccgcctctgcgccgagctgggagccgacgccgccagctacgtgcactgcgacgtcaccgtcgaggacgacgtcgcggcggccgtggaccatgccgtggcccggttcggtgcgctggacatcatgttcaacaacgccggcatcggcggagcggcgtgccacaacatccgagagagcaccaaggaggacttcgagcgcgtgctgtccgtcaacctcgtcggcccgttcctgggcaccaagcacgcggcgcgggtcatggtgcccgccggccgcggtggctgcatcatcggcacgtccagcctggcatccgcggtggccggcgccgcgtcgcacgcgtacacgtgcgccaagcgcgcgctcgtggcgctcacggagaacgccgcggcggagctggggcgccatgggatccgggtcaactgcgtctcacccgccgcggaa

SEQ ID NO: 14333 - DNA, 515 bp, Zea mays
  Clone ID: MRT4577_113060C.1
cattgcaaaattctacttaaccaactatcaatttattttcttacagaaaactgccatacagtaacaaactagctagagtaatgagcattacacgtattacatatcataaacaaattgcgatggacgttcctataaacaagatgaagttttttttttgcgaaatataataaacaagctgagaattgaatgtagtaatcatcgctcttttggttatatagtgtcatgatcttatgttggtacttcttgtgacaacaaacaaaaggatgactattccccttactgagcagcggtcgatgcgttatcaatgaatatgctcatttgtttgcttaatctttcataaggccttctatagatggttaatggatgacctcagtttgtttagtccatgtagtgaataggcttgctaacaaaatcgtagagttgtttttttggctcgctgagcaaggatatagatccataggtgcatcagctaagtttggggtagatcaggcgttatatagtactctcttcttttt

SEQ ID NO: 14334 - DNA, 778 bp, Zea mays
  Clone ID: MRT4577_113061C.1
caggtcattgctcacactgacactgccacccatggtgatgcgtgacacattattactcaatcatcgccgctaaatgactcaactagctatctagccagcggctatactacagcacatagtttcatcagtgcagcccgacggcgacgccctactgctcgcctcagtgccagtcgttgcggcagcagtgttgccagcagctcacgcaggtgtgaccgcatcaccggtaccaggcgatcttcggcttggtcctacagtccattctgcagcagcagccgcaaagcggccaggtcgcggagctgttggcagcgcagatagcgcaacaactgacagcgatgtgcggcctgcatcaaccgactccatgcccctacgctgctgccggcggtgtcccccactgaagaaactatgtgctgtattatagccgctggctagctagctagtttactcatttagcggcgatgattgagtaataatgtgtcacgcatcaccatgggtggcagtgtcagtgtgagcaatgacctgaatgaacaattgaaatgaaaagaaaaaagtattgttccaaaaaaaaaaaaaaaaaaaaaaaaaaataaaaaaaaaaaaaaaaattaaaaaaaaaagtttgtacctgcccggggggttgttcctaaagggggagttctgtaaaaaggcctaatactggggatttccatcaccatggtggacagggcccaatgcatctaaagggcccaattatccctatatagtggccgtaacattacactggccggactggtaaaaccct

SEQ ID NO: 14335 - DNA, 445 bp, Zea mays
  Clone ID: MRT4577_113062C.1
cgggggggaggcacgcataacgccccaataacccttcaaaccctaatatcacattctcctcgtacccatgacccaccatcctcggatggtgagctacacaaataccgtggcctcccttctctctgaactagtcccttcgatgtcgggggcccctcgtccgtcgaccacaaccgtggaatgcttgcagaccgcccgcctctggccgattgcggcgttccgcgtacgccgtcttctgtctgcctctgtgggcagacggcgtattaccacactctttattccacgcggaatgcctcgtggaagaggccatgtctcgcacacttctacatgtgcgggcgccgggcgcctttcaccaacttgcctccgcctcgccggcgtggctgcgtggaagaagactgtcacttgattctcgtcacttctagcctgcactggacaccatgctttatca

SEQ ID NO: 14336 - DNA, 824 bp, Zea mays
  Clone ID: MRT4577_113063C.1
ctcgaggccggccgggccgggcctccgcggtccgtggctccgtgccatcctctcctgggcagcgagcagtggtggccgcgggttcccccgcctcgtcctcccggatccggcgacgaagattaattgaataacttcgataagatgggtcgtggtattagcagtgggggtggtcagagttccttgggctatctctttggcagtgacgaagctccaaaatcatttgagaagcctgcaccagttcaaaagccaactcctccatcctctgcagagagactaaaagatatcgctgctggtattcaaagtagtaaatcaaacaattacaaaagatctgaaggccagaactgtggaagtatcaccaccactgggtcttcagaccattagctttatctactccagagcgcagaagaacccgatcgacaccatgagggtgttgctcgttgccctcgctctcctggctctcgctgcgagcgccacctccacgcatacaagcggcggctgcggctgccagccaccgccgccggttcatctaccgccgccggtgcatctgccacctccggttcacctgccacctccggtgcatctcccaccgccggtccacctgccgccgccggtccacctgccaccgtctgtccatgtgccgacgccggtgcatctggcgccgcctccatgccactaccgtactcaagcacctcggcctcagagctgatgcccatctgcacccatgcccgtgccatcgagccggatccatggaccgggccgggcttccggtccacaccagcagcggctgatcctttggtggctggcggtttgcggacggtcgctcg

SEQ ID NO: 14337 - DNA, 771 bp, Zea mays
  Clone ID: MRT4577_113064C.1
aaaaaaaaaaaaaaaaaaaaaaaaaaaaaatcaccacccactggggtccttcagaccattagctttatctactccagagcgcagaagaacccgatcgacaccatgagggtgttggctcgttgcccctcgctctcctgggctctcgctggcgagcgccacctccacgcatacaagcggcggctgcggctgccagccaccgccgccggttcatctaccgccgccggtgcatctgccacctccggttcacctgccacctccggtgcatctcccaccgccggtccacctgccgacgccggtccacctgccaccgccggtccatgtgccgccgccggttcatctgccgccgccaccatgccactaccctactcaaccgccccggcctcagcctcatccccagccacacccatgcccgtgccaacagccgcatccaagcccgtgccagctacagggaacctgcggcgttggcagcaccccgatcctgggccagtgccgtcgagttcctgaggcatcagtgcagcccgacggcgaccgccctactgctcgccccagtgccaggcgttgcggcagcagtgttgccagcagctcaggcaggtggagcccacagcaccggtaccaggcgatcttcggctttgggtcctccagtccatcctgcagcagcagccgcaaagtggccaggatcacggggattgttggctgacacaaatagcgcagcaactgacggagatgtgcggtctgcagcagccgaactcatgcccctacattgctgccggg

SEQ ID NO: 14338 - DNA, 1352 bp, Zea mays
  Clone ID: MRT4577_113065C.1
cccatttcctcctccctcaaaccattgcagccacaccaccctaaaccctagccgccgccccctctctcaaggtgaagccctcctgcgtggttctccgtcgtgtggcgatctcaattggagtttggagggaggaagaaggaaggagaaagggaagaatccaaggtggtggacttccggatcgtacttagggattttcccaaacttccgctgaaggcacctgatttctgctatgggaaaagagggatgtagcagcacggccactacacctttaataatggaaccactgctttataatgttgttaatcagagagggtcaagtctaggaaattaatatgttctagcttttcatggtggttgagctatttttggggtgggctgagttacctatccttttatttggtcatgaatgtgtttcaccacttttgcatttagattctactacttgaattatctgtcttttatatcctgtatgaactccatgtttcccccctgttatgcttctttcaagggaggtgctgccggattttgcaaaaccaccactgggtcttcagaccattagctttatctactccagagcgcagaagaacccgatcgacaccatgagggtgttgctcgttgccctcgctctcctggctctcgctgcgagcgccacctccacgcatacaagcggcggctgcggctgccagccaccgccgccggttcatctaccgccgccggtgcatctgccacctccggttcacctgccacctccggtgcatctcccaccgccggtccacctgccgccgccggtccacctgccaccgccggtccatgtgccgccgccggttcatctgccgccgccaccatgccactaccctactcaaccgccccggcctcagcctcatccccagccacacccatgcccgtgccaacagccgcatccaagcccgtgccagctgcagggaacctgcggcgttggcagcaccccgatcctgggccagtgcgtcgagtttctgaggcatcagtgcagcccgacggcgacgccctactgctcgcctcagtgccagtcgttgcggcagcagtgttgccagcagctcaggcaggtggagccgcagcaccggtaccaggcgatcttcggcttggtcctccagtccatcctgcagcagccgactccatgcccctacgctgctgccggcgggtgtcccccactgaagaaactatgtgctgtagtatagccgctggctagctagctagttgagtcatttagcggcgatgattgagtaataatgtgtcacgcatcaccatgggtggcagtgtcagtgtgagcaatgacctgaatgaacaattgaaatgaaaagaaaaaagtattgttc

SEQ ID NO: 14339 - DNA, 335 bp, Zea mays
  Clone ID: MRT4577_113067C.1
aaagcaaaaacccttaaaaaacaatatggggctttaacaagcaatccaatttggggacaattttttttaaaacaaacccttttggggtaaattaacccgggacaacttttggttgggatataaaaatagcccatagaagggccccaacagggggaacaaatttcgccccacccctagcacttgatctccttaaaaccctgagaaaaaaaggggaatggcggattaggggcccccttcttgtaagaggggaattccacagacccattatcctttatgggctcaccaacaaaaaatgggggggccttcaccttgttaagggaaaacttggtggcccc

SEQ ID NO: 14340 - DNA, 337 bp, Zea mays
  Clone ID: MRT4577_113068C.1
attcggctcgagctcgaggctaattgtttctagacccgggacatcatctaccacttttgcgatggccaagaacccatccgtttctcaaacgaacagccctattgaccaatctcctgttgcacttaagacaaggggcactgacatgggtaatgaggatgttcaaagattggactgactgaggtttcatatgggcgcactgcagtctaaaatgcaggtctcatctagaggcgacaataatcaataaattgctttgtagcacacagatcacctaaagactgcgaaagcttctatacaagtgttggtatatggatacactcatgcgggacctatgtacact

SEQ ID NO: 14341 - DNA, 395 bp, Zea mays
  unsure (1)..(395): unsure at all n locations
  Clone ID: MRT4577_113069C.1
cgcctgcaggtaccggtccggaattaattcccgggtcgacgagctcactagtcggcggccgccctttntttttttttttttttttttttttttttttttttttttttggggatcaaaacgcatatacatacatatattatatatatcaccgccgggaaagagtccaataaccatgatgatgaccaagctttttctaccaaaactcccaactttttcggtggacttgtaaaatgctcccctcgagggcactgatatctttatatcggtcccttttttttccttacactttacagggaggttccagtgcaacgggggacgccaaaacactactaggacggacgggggcaacaatagatcttttcctcgactggttattggcactggtttaacccatg

SEQ ID NO: 14342 - DNA, 241 bp, Zea mays
  Clone ID: MRT4577_11306C.1
tcggggacacgtgtgtttaaaggtgtacaaatgtccttacaatagcacgaataaaacccaatcttttgctatcgtatcaagaacattaccacctgccattatttatgatgattataatgcttaccccactttttttttttaagacaaaaaaatcgttttactgctcataaaaatcaaaactttcctgtatatgatcctcactttttttgttgtcccctcctttattacaaaatgtatattc

SEQ ID NO: 14343 - DNA, 281 bp, Zea mays
  Clone ID: MRT4577_113070C.1
cgacatatggcatgcactagctgctgcgtgagactcaccaacaagtgttccatgtgattattgcccaatgtggatcaccgacgcacgcctattgagaatgacttccagtgtcttcgaactgcatgctcgaaggcacaacatggctgcaaagagacacttaggtacagccagatctacgatacatgagaaggaatgcatctatctgccatgttcatgcccatgtactggatgacatgtgattgcctcatgcaaggagctattcctccactttagccatagac

SEQ ID NO: 14344 - DNA, 807 bp, Zea mays
  Clone ID: MRT4577_113071C.1
gccggccgcggccgggtaaaggcgctgttcgcctgttcctctctgctccttcccagagagcgaaaggaaaagagggagaaagaagggaggggggagggagaaggagaaaccacccagccatcgtcccaatttttgccgcccaacggccacgccaagcttcggatcatcagatatgcatcagatgaagacgaagcataggtctttcttgtccttcctgtgcttcatcatcgtctcccttgtctttgccttgtccgattgcgcagttagcagtggagaccactttgtctaccatggctttgccggagttaacctcaccctcgacggcaacgccctagtgacaccagacggcctcctcgagctcaccaacgacacggtcaatctaggccacgcgttctaccctactccactgagcttcaacacgcagcagcggcctaacggcactgtgcgatccttctccgtctccttcgtgttcgccatcctctccgtccacgcggacatcagcgccgacggcatggccttcttcgtcgcgccaaccaagaacctctccaacacctgggcgcagtacatcggcctcctcaacagcgggaacgacggcaacacgagcaaccacatgtttgccgtcgagctcgataccacccagaacgacgagttcaaggacatcgacaacaaccacgtcggcatcaacatcgacagcctcacgtccctgcgagcccaccacaccggatactatggaggcgacgacagcggttccttcagcaacctgactctgatcagcgggaaaggcgatgcaggtgtgggcagactacc

SEQ ID NO: 14345 - DNA, 216 bp, Zea mays
  Clone ID: MRT4577_113072C.1
attcggctcgaggcggaggaccacctttttgacggccgcgtcgcctatgtgcctcgcgggcaaggttgccggcgcggtgaccaccccagccggggcgcattccgggttcctccctcgacacctagcccgtggtctgctcccttaaaagagatggagcggggcggaaaggatgggtgccgcgccctaaaggtctatgggcagatgcgacatatctgg

SEQ ID NO: 14346 - DNA, 357 bp, Zea mays
  Clone ID: MRT4577_113073C.1
acgccgtaatggcccttaggtgcgcggccggcggcggcggcggcgcctacctgacgccgcggagaagcagatgctgcggcgtcggctctgcgcgaccctcagccaccaccagggggacacgagggctcagcctcctcctgaggatcccgtcctcgcaatactccaaagctccatgggcgttgcggtgctcgcctgattccccccctctggagggcgaccagcattcagatcgaactggggcgtcgggggcgctgaaggccatggtgtgcgacatgttcaggcccctggtgcggaacatctcggacatccgatcccttcgcactgtctttgacctcgaggattaccaagtcggcatgc

SEQ ID NO: 14347 - DNA, 452 bp, Zea mays
  unsure (1)..(452): unsure at all n locations
  Clone ID: MRT4577_113074C.1
ccgccatgtgaggatttgcaaattcgcccttacgtcccggggcctgatgggcagctaccacaccaacccctgtggcgtctccgctgccattccgccctactactgattcatgatatttgggaaatctcctctatccatctctctctatctatatatgtaataatgcagtaagacgacacacattatggtggggggggggaccttttttttatgcatggtcataataaagttttgggtttaatgaatcaaaaaaacaaacccccccaaaaaaaaaaaggtgccagcgttaggcgcatcgtgctggcttaacggcaacaactgtggttgtatcaagaaggtagctgggctcacaccctcttgctggcttaatggtngtagttgttgctgttgttncttagcccganagttcantgctgccacttggtcgaatggaagaaattgctgggggtagg

SEQ ID NO: 14348 - DNA, 447 bp, Zea mays
  unsure (1)..(447): unsure at all n locations
  Clone ID: MRT4577_113075C.1
aagagngcacacgagggggcagcgagcagcacganggcgagggcagccaaggagaaggacaagaggcggangcgccgcagcagcgacaaccaggaggggggggtgaaagaatcattggcgaggcaatctatgaccctcaagaaaatggacgaggacggctgctccgacaaaggcatcccgctacccaacgtcaccttccacatcctcgccaagggcatcgagtcttgcaacaagcacgccgagccgaccgggccgggcgacgcggccggcaccaccaacaggtccaccgaggatgagctcaacatcttcgacgcagacttcgacactggagagcactccaccctctgggacctcatcctggctgcaaactacccggacataaggggctgccgaacctggcccgccaaaccatgacagacttgaacaaggggaagatgccggaggagg

SEQ ID NO: 14349 - DNA, 333 bp, Zea mays
  Clone ID: MRT4577_113076C.1
gttggttttttttttttcttttttttcttttttttttaggttattattctaggtacccaaggcggggccagataccaaggtcaccagccgcggaaagcaaacgtacaggcgggcgaaagcaacaacaaagccgggggaaagggcccaccaaagacaatgaccagagggggaaaaccccagggaggcccggggaaaaccccggggagccccacccaaccggcgaagggggacaacccccgcaggggaccgccccaaagggccaagacgccggctgcgcagtgggaaccgaacagggggggaccctgaaggacaaaccgtacgcgcggggggagg

SEQ ID NO: 14350 - DNA, 388 bp, Zea mays
  unsure (1)..(388): unsure at all n locations
  Clone ID: MRT4577_113077C.1
ggggggtttaaaaaccgttgcgtcgtgccctctgatgatcctctgacgtggtccactgactccccgtggccctctcttcttatccacgggggagggggaaaactcttcagtgtgctgcnngagccactcccgtgcccggggggggggggtggcatactcttgcctcgccgggtggtcctcctgggggcggtttaccgcggtcccggctggttcccccctgcgaagcctcctgngcttcctgtctttcgcgctgtcgcgggtgcgcccgtgctccctccccgctggtgggctgctcctgtctccttctcttgtcccgntccccctcccttgtcctctttgtcgcgggcgtcctcgtgccccctgccctccctgccctcgcgggtctctt

SEQ ID NO: 14351 - DNA, 1081 bp, Zea mays
  Clone ID: MRT4577_113078C.1
tccgccagccacagatgaagaaagcgcaagccaccaggaggagctagcaaaagaaggaggaacgaagagaagagagaaattaacagctcgagagaaacggagctagatagtagcaggggcgctgctcgctagaggccgttgatatggcgcttcgcgacgtgctgctgtccatagcgcagacgccgcaccggctgcgcaggagggcgctggtgacgtggacgccgacgcaggagctgaacgaggtgcgggaccggtccggggcgcgcatgaagcggcggctggagtggtacgacctcgtggggctcggcgtgggcggcatgctcggcgcgggcgtcttcgtcaccacggggagggtggcgcgcgacaccgcggggcccgccgtcttcgcgtcctacgtcgtcgccggcgtctccgcgctgctgtcgtccttgtgctacgccgagttctccgtgcgcgtccccgtcgccggcggcgccttcagctacctcagagtaacgttcggtaggttaataattacgactctttcatttcctctcgcgccatggtttcacgctgctactgtacgtttaaaaggaaggaggaatcacttgaatcaattaatgaaacgtaacggtcagatatatgtgtaccgtaaattaaaaaaaatgtgttcatgtcctaattaataataaaggacaggtacttaataaaagtggacaatgcaaagcaaaacccctctatgatccttcctagctagctacatcttgtcaggcgagttcgtggggttcttcggcggagcgaacattctgatggagtacgtgctgtcaaacgcggcggtggcgaggagcttcacggactacctggcatcgacgttcggggtcacggagcgcaacgcgtggaggatcgtcgtcgacggcatcgccgacgggtacaatgagctggacgtgccggccgtcgcgctcatccttctcataaccgtatgcctgtgctatagcaccaaggagagctcgatgctgaacatggtgctcacggtgttccacctgctcttcttcgccttcatcgtcgctgccggcctgtggaacggcagcgcgaggaacctcgt

SEQ ID NO: 14352 - DNA, 717 bp, Zea mays
  Clone ID: MRT4577_113079C.1
cccacgcgtccgatcaagaggtcacctttgcaatttgaggcatttcaaaaatgtgctaaagaatgtgatctagacactaagaaagtcctttccttagatgttgctacaagatggaattctacatatattatggttagagatgctatttactataaggatgcttttgatcgtcttgctaaaaaagataaggatagatttggtcatattgctccttcaagtgatgattggttgaatgcaataaatatcaacaagtgtttgaaaaagttctatgatgtcacattacttttttctggcacttcatatcccactgcaaatcatttctttcgcaagttttctgagattaagatggctattgcaagatggtgtgagagcagtgatgtcataatttgtaccatggcattttctatgaaacagaagtttgataaatattgggacatgaataatatggctttagcagtgggggcatttcttgatcctaggtacaaacacaaaatggtggagttgtacatgaataatatggctttagcactgttgcattgaatattgttatgtcatttgatctatgacgtttgtgcttttgtgtgaccatgtcactatgttgtttgcgcttttgtaatgaactattcagccatgttgtgtgtctcttttgctgttggaatgagcttgtgtgaactatctactatctataatatatttgtggacttgtggattatgcct

SEQ ID NO: 14353 - DNA, 651 bp, Zea mays
  Clone ID: MRT4577_11307C.1
gggccgcggctggggccggcgccggggcggccacacgtcttggccacgtgcaccacgagcttcatgccgctgctgcaatggcaccgccacgccgcagatgaagtagggcttggcgggcgacttgagggtcacggtcgtggcgccgccgcctgtagtgctgagcgcgatggtgacagagcaggccacgtacaccgcctatctaaccatatacaccgtgtgcgcacgcccggcggatttgaactatagactgtggtcgagtttaaactatgtgtcggtgtcccatatgatgctattcaccgagaggcatcacatgcggacgcttactctaagccgactgggaatccacatccgcagagacgcatctcactaggagaggaggggtatacagaaggacctaagctcctgcctgagctatgggatgacgagcgagtgccagaatcgactcacgaatagaacatggacgaagacgacacacgagcgggacctgaccagtggatattagaatagcataggctagcgtatagccggcttgtccttgatgccaccgaccggcctgtatgggagtggcatgagcggcgctcactgccgcatcgtttacagcctggacactgagaaaaccatctccttaccgaggtgcatgaagttgatgga

SEQ ID NO: 14354 - DNA, 1171 bp, Zea mays
  Clone ID: MRT4577_113080C.1
tgaagctcaaacaaatcgttcgaacctctcagcccaaatctccaattcgtagtcgtaagctagactagataggaggcaaaatcgttcgaccatgtcgctgatccgccgcagcaacgtgttcgatcccttctccctcgacctctgggacccctttgagggcttccccttcggctccggcgggagcaacagtctcttcccgtcgttcccgcgcaccagctcggagaccgcggccttcgctggcgcgcggatcgactggaaggagactccagaggcgcacgtgttcaaggcggacgtcccggggctgaagaaggaggaggtcaaggtggaggttgaggacggcaacatccttcagatcagcggcgagcgcaacaaggagcaggaggagaagacggacacctggcaccgcgtggagcggagcagcggcaggttcctgcgcaggttccgactgcctgagaacgccaagacggagcagatcagggccgccatggagaacggcgtgcttacagtcactgtgcccaaggaggacgtcaagaagcctgaggtgaagtccattcagatctccggctagacgtcagtccgcacgtcggatcgtcgtgcctgcgtgattggaggaaacggcagttcacctcggtcgttctgtggaataaatttgggttaaaagaattatgagtatgctggtaatgtggtatgatggtggaatgtggtaaaaaaaaactctgcgtctctttggtccggtgatgtatgagccttttttttcagcaagtggtgtttttcttttacaataaatcaattaatagtaattctgtcagatcacggccgccatggagaacggcgtgcttacagtcactgtgccaaaggaggacgccaaaaagcctgaagtgaagtccattcagatctccggctagacctcggtctccggtcgtcgtacctgcgtggtttaaggaacggcagttcgcctcggtcgttctgtgaaataaaattgggttacaaaaattatggcgtttgtcaatatggtcgtaatgtcgtagaatggtggaatgtggtcccaaactttgcgtatgttgggtctactggtggtgtctgaatctatgtatggatgtcatgagtttgtctactaaagtcccagttcctgtggtgttcgtataatgtatatcatgggttaactctatct

SEQ ID NO: 14355 - DNA, 714 bp, Zea mays
  Clone ID: MRT4577_113081C.1
accgtcggagtcggaggcatacgtcccctgccctcttccatatcggtgctcatctcctgggttgaagccgccgcacagccttcatctccccgcccagcccctctctctggcgagcttgacccggcgtcgagctctggcggtcctcctccgctgccactcgttggaccttgcccctgctgcgccgtcgatagctcaccacaccctctcctccctggctcccgagcttcaaccatggagcttgtcccctctctgctcgtcggtgacctacgtcttctccagccaagccgcagccaagctcatctccatagccgacgcccctgccctcctgctcgccatggctggccatcggacgacgcacagcaacctcgccgtttctgagcccgaccccgccatggagctcacggcgcctactgctgctcagccttgggtgccgtcgctgagctcgccctgctccctggtgcttcctgctcgccgtctctggcgagctggctgtcctgcccgtcatggtggcgcgcgctccatctcccatggcgcccggccgcccctctttgctcatcttcgccgtcgggctggggtgatattccttggtgctacaactgggaggtgctcgccgagccctgtatcactggttaagcgtgcctgcccacaccgtcgtctttgatctctcgctccggtctccttgttcttcatcgcttgccaggtggttcggtaaaa

SEQ ID NO: 14356 - DNA, 175 bp, Zea mays
  Clone ID: MRT4577_113082C.1
cttaaatttatggctggtaatgcggccaccgagatcctagtttggcagaaccaaggctgggccattaaaccttccccttctggaaaactgacaaatggcggagatgtaatccgtggccacacttattggattcccggcctgccagatttttgaactattactctttccccgaaca

SEQ ID NO: 14357 - DNA, 1057 bp, Zea mays
  unsure (1)..(1057): unsure at all n locations
  Clone ID: MRT4577_113083C.1
cccacgcgtccgcggacgcgtgggcgcgcgtcatttaacccagcagaaggtccgtcgtctcgtcgccgacgactcggcttctgctcatcaccaccagccactagctgtcgtcgccgacatcgacgcacgcggaggagatcgatcggcccggccgcggccgcaggagaagatgagcttctttggccgcggcagcagaaaccagagaaccttcaggccgaagaagagcgcgccgtccgggaacaaggggatgcagctgaaaaggcacatcgacgccaccctcggcagcggtaacctgcgagaggcggtgcgtctgcccatcggggaggacctcaacgagtggctcgctgtcaacaccgtcgacttcttcaaccaagtgaacattctctacggcaccctgaatggagttctgcacgccagcgacatgcccgaccatgtcagccggaccaagctacgagtacagatgggctgacggagccaagatcaagaggccaatcgaggtgtctgcgcccaagtacgtggagtacctgatggactgggtggaggcccagctcgacgaagagaccatattcccccaaaagctcggggctccgttccctcccaacttccgcgacgtcgtcaagacgatcttcaagcgcctcttcagggtgtacgcgcacatataccactcgcacttccaggtgatcgtcaggctcaaggaagaggcgcatctcaacacctgcttcaagcacttcacgctcttcacactggaattccggctgatcgacagggcagagctggctcccctcaacgagttgatcgagcccataatacttggttattgactggagaggctttgtttaggccgactgtgccgagagaaaatatcccccctcccttttttttttgatcatttcgggtggaatatctccatctgcattttggaagcgtaggctagtggtttcgctactctgtcccggaggtatgtgttcccttccctagcagtagcagccagcggttggtctcaactttttcagtcaaatggagtgnnnnnnnnnnnnnnnnnnnnnnnaaaaaaaaa

SEQ ID NO: 14358 - DNA, 1294 bp, Zea mays
  Clone ID: MRT4577_113084C.1
gtgccgcatacgtccccggccctctccggcccgtacgtcccggcctgccctcttcccataccggtgctcatctccctgggttgaagccgccgcacagccttcatctccccgcccagcccctctctctggcgagcttgacctggcatcgagctctagcggtcctcctccgctgccaatcgttggaccttgcccctgctgcgacgtcggcggctccccacaccctctcctccctggctcctgagcttcaaccttggagcttgtgccctctctgctcgccggcgacctgcgtcttctccagccaagccatagccaagctcctctccatagccgacgcccttgccctcctgctcgccatggctggccatcggatgccgcacagcaacctcgccgtttccgagcccgaccccgccatggagctcacggcgcctcctgctgctcaaccttgggcgccgtcgctgagctcgccctgctcccttgtgcttcctgctcgccgtctctggcgagctggctgtcctacccgtcagggtggcgcgtgctccatatcccatggcgcccggtcgcccctctctgcttgtcttcgccgtcgggccagtctctagctcgctgcgccctcgcctcctttctttgtttatgcttctctcttctccctcatcactggttcactgtgatagcgcaggttgtggtgggacgtccgtagatgtggtttgagccagagtttggtgtgtgcgaccccgagcccgagaaagatcctaggcaccctcgtcggtgcggacgacgattgaatcggagattcccccgtggcggctctcagctctctttctcggttcacggaaaaaaaggtagggagatagaggatgcgtggcgactgagaccccgtgatagcttttatccacccttgcgagatccccgcagcaggacgtgacggcggcttccgccatgcgcgcaatttcgttgaagggagagctgaccagcggaccccacaatgtagtgagtcagcggcgcgcgcaagccacggagcaagcgccgactgcccggtcccacctgtcagggtcagcggccgatatgcgcgcacgcgggcggaggagagggtttgggccgcgcagatgacttcgggaatgggccgagctgaaggactttgggcccaggcgcattcactactttgttttttctttttattttattttctccattttttatttcccaattccattttaaattcagatttaaaattcaaaaaaaaaaaaaaaaaagcggcccattatattgtgaaattagaagtgccaattttggagat

SEQ ID NO: 14359 - DNA, 550 bp, Zea mays
  Clone ID: MRT4577_113085C.1
ctataggggattggtatctcagcggcgggcaccgttctcaaaacgctcctcgggcgcgactttggcaattcactgcctcgggtaagtcttatcggctccaagggctaccgatccaacaacgttgcgcggacatggccgcaaaacctgaactccgacaagtacttcaacgacctctacgactacgggttcgtcgtcctcccgcccgaggacatccatgctcctccccaagaaccgcctcctgtgcgataacgggcgtcaggacgatcgtagagcagtacaggcgcaagtgccggtactacgcgatccaccgctcgcagccgcacatagatgctggtccgtcgcatgatcaactatgcacagcaccaagatgttcgtgccgcgcattatgcgtgaactagtgattccccggaggcctcagcggagaccagcaacgatgaaatgcctaaccccctttccatctataagaagactggctctgatatgctgatcaattcctatatgatgctagtgtgacttcagagcactgaggatttgctggcgtataacttgc

SEQ ID NO: 14360 - DNA, 371 bp, Zea mays
  Clone ID: MRT4577_113086C.1
gtagcttccacctccagaagagcacctgctcctcctgcggctaccccgccgctcgcatccgcaagtataactggagtattaaggccatcaggcgcaagacaactggtactggaaggatgaggtacatgcgacacgtgcctcgccgtttcaagagcaacttcagagaagggactgaggctgccccaaagaagagtgctgctgctgccaactaagtctggattttgccatcaagaacctgaaaagcattgtacttctgaactatttagccctaatgctatggaagtatggtttatagtgctttgaattaaagtcagacgcccctggtggtttgtatctttttttggtgatgagtatggtttatttgttatccc

SEQ ID NO: 14361 - DNA, 355 bp, Zea mays
  Clone ID: MRT4577_113087C.1
attatctttatggctaaaactctaaggaaagggattcatattttttttgggggaaagaaacaagaagggcactttccaatgaaaccacagaaaacacaacatccttttaacacacaaaaacaacaggcttacaggggaacttacctacactatctgtgggcctgccaaacaactaaacatcatgtgggacacagatcaaactaacggcgctcagataagttttatcatccatccagctttgggaaaggccatgactggcccattcacaagggatcaatcatactgagcaaatgcaagagagtgaagcttcaccttgacagaggaactacaaactccttccaacggaatgaaaacc

SEQ ID NO: 14362 - DNA, 746 bp, Zea mays
  Clone ID: MRT4577_113088C.1
ggccctagaggtttttttttttttttttttttttcaattcaaagcacggtaaaccagtacatccagagtattaggctaaatagttcagaagtacaactcaagcaaaaagatccaatgttctagcttatcaggttcttgatggcaacatccagacttagttggcagcagcagcactcttcttgggagcagcctcagtcccttctctgaagttgctcttgaaacggcgaggcacgtgtcgcatgtacctcatccttcccgtaccagttgtcttgcgcctgatggccttcacactccagttatacttgcggatgcgggcggcggggtagccgcaggaggagcaggtgctcttctggaggtggaagctgcggcggccgcagcggatgcacagcggtgcgtcttgttccggcgcttgccgaagctgcccgtacccttccccatttctcccttgccccgctcggctaggtatcgaggcggaggcgcagcgtggtcgggttgggaggagtgacggcgacccggcccggccgatgcggagggggttgtaggcggcaggggggacaggtgctgttctggaggtggaagctgcggcggccgcagcggatgcagagatgtgcgtcttgttccggcgcttgccgaagctgcccgtacccttccccatttccttccttgctccgctcggctaagggtttcaggcggagacgcggcgtggtcgtgagtggcggcgtgagtccccggcccggccggctcga

SEQ ID NO: 14363 - DNA, 350 bp, Zea mays
  Clone ID: MRT4577_113089C.1
ggaaggcggcaggaacccctcccaaaaataaaagccccaaagggtggaggggcccccccattttttccaaaaaggggggggggaacatggggacctataaaagactattaggcccatatgggcctaaaaaaaacccccgaaaaccattcaaaggtctgaaaaataaaaaaaagggggtttcacggggaacccggttaaacctcccccccctccaaggaaaaaacccccccctcgtaccaatggcccgagcaaatagcaaaggaacccccccccgagggaaaaacaaaaacttcactggataaggtgaaaccctaaaaggcccgcccccccccccctgaaaaatcccccca

SEQ ID NO: 14364 - DNA, 482 bp, Zea mays
  Clone ID: MRT4577_11308C.1
agtggtcctatatatcattaggctactggagccataaccaacgcctggcgaaaaacacatctctctcagtatgccttatagaatacatactccatggcattgtgaagacgtgcaggctatacatgggcaagcgcactggttatatggccaggactaagcatgaagctaccaatattccggatggggcgtgacctaccatactcaactgttctaacaaacctaaggatggggattaaggcatactatattggcttacaacagttaccatgcgaagaagcatgctggttcaaaggaatgaatgacgttgaggtgaagaccgagggcaaactagagaggcccttgctgagccaatacagacagcgatgcaaaaatatgggatacctgaaccttcatgagaaagctgaaggaactgacgagaggacaagcagggaccaagaacactgtgcagagctttattaatgacactaaacctacctgacgag

SEQ ID NO: 14365 - DNA, 749 bp, Zea mays
  Clone ID: MRT4577_113090C.1
taggggccctttttttttttttttttccttttttttttttttttttttttttttttttttttttttttttttttttttttttttttttttttttttcctgcaactcggaagatgcagctctctttctcctctaataccgtacagggcgcaaatgtttccatgcgagcatgagcatcatcaaactgtggtaccaaataattaaaagaagaaacatcaaaccaccagggcgtctgactttaattcaaagcactataaaccagtacatccagagtatttgggctaaatagttcagaagtacaactcaagcaaaatgttccaatgttctagcttatcaggttcttgatagcaacatccagacttagttggcagcggcagcactcttcttgggagcagcctcagtcccttctctgaagttgctcttgaaacggcgaggcacgtggcgcatgtacctcatccttccggtaccggttgtcttgcgcctgatggccttcacactccagttatacttgcggatgcgggcggcggggtaaccgcaggaggagcaggtactcttctggaggtggaagctgcggcggccgcagcggatgcagagcgtgtgcgtcttgttccggcgcttgccgaagctgcccgtacccttccccatttctcccttgccccgctcggctgggtatcaaggcggaggcgcagcgtggtcgggttggggggagtggcggcgtgcccggcccggccggcctcgactcgagcatccc

SEQ ID NO: 14366 - DNA, 628 bp, Zea mays
  Clone ID: MRT4577_113091C.1
cccccccccctttttttttttttttttttttttttttttttttttttttcacgagcataaaacgggggtaatatataaatcacgctcccaaagaagatggcgtctggcttcaattcaaaacacggtaaaccagtactgtaatagtattacgggcaaatagttcagaagtacaattcaataaaaagatccaacgtctagcttctgaggttcttgatggcaacatcgacacttagttggcagcagcagcactcttctttggggcagcctcagtcccttctctgaagttgctcttgaaacggcgaggcacgtgtcgcatgtacctcatccttcccgtaccagtggtcttgcgcctgatggccttcacactccaattatacttgcggatgcgggcggcggggtagccgcaggaggagcaggtactcttctggagatggaagctgcggcggccgcaccggatgcacagcgtgtgcgttttgttccggcgcttgccgaagctgcccgtacccttccccatttccctccttaccccgctcggctagggttcgaagcggaggcgcggcgtggtcgggttgagaggagtgacggcgtgcgggcccggcccggccggcccgcacccggcccggccggc

SEQ ID NO: 14367 - DNA, 315 bp, Zea mays
  Clone ID: MRT4577_113092C.1
ccacccaaagaagccgcccaactttaataacacacacaagcctttaaactagggcctgcccggagcaaaaccagtttgtccggggttgcccaacaaaccggaaagaagggggccgaacacggccccccccagttcctaccccagggtttcttttccggcggcttcagttcagatcacaaataacccacggccctgactgatccacacaacaagcttggggcggggagacggtggtcaggtggggggcgtggaggaggacccctgggccttgttaagccgccgaatttgccacccccccatcgcgaggaaggcccc

SEQ ID NO: 14368 - DNA, 422 bp, Zea mays
  Clone ID: MRT4577_113093C.1
gcgtccgggcgcccggggcccttggcggtttccgccgtttaggagccaggaggctccccgaagccggcctggatttcccggggaaatcctttttgggggcgccgttggccgccaccggggcctccgtggggtggccgttccggggcaggccggccacctcaacaacttggttgggggtcgtcgggggggggaggaggggctccaagaggaagacccccaaggggtcggcaaaccggttccggttgccgggggggggcaggatcgggcgggggtgtcccgggaagcataactggtttgccaggaggaccaccaagcccaggaggggcgtctcgaagatgggccaggtcaccaggggggcctccgccatgtgttcggtggcactgcctctccttaaggggaatgggaaggcaacctgagggctt

SEQ ID NO: 14369 - DNA, 313 bp, Zea mays
  Clone ID: MRT4577_113094C.1
tctattcgattttaattaccaagtgatttaattcctctaatccccttcaatcccttcataaccgaacaagcatttactgggtatgctcctgcgtcctgcccgaactctaacccaacttaagttgattggctattcgtatccggttctgatctaatcaatattgaactgtatacatgtgtttttcgtactaactttgatattttttttcctgaacaccattggctatacatttgtacacccatgtactaactttactcggaccgcgtatgaacccgcaatgcttccttgtcaaggtcgctacatcaacatgagg

SEQ ID NO: 14370 - DNA, 443 bp, Zea mays
  Clone ID: MRT4577_113095C.1
cactcctatgggcgattgggtacatcaaggccggccgggccggactgttcaacccgggctccatgggcaagcacacttcctcagacgcgagaattccgcgccgtctccacctagcggtgctacgcgcgctgacccctcttcgcgacgatcagcttccgaactaccgcatgaagtattggggcatctccgaggaccgcgccaacagtctgctctggcacttcttgaggaccctgccgaaggctaataaatgcaactaccagcccctggccaccacgatcatcttgagcgtaacccgacgacaatcaacaactacggcatctggctgcgctaccaccagcacaaccggctaccaccacatgtacacggagtaccgcgactcaaccctgtctggcgctgtcgcgcacatgtccaaccagatgccctcctcgacaccgcgtgtggtc

SEQ ID NO: 14371 - DNA, 1213 bp, Zea mays
  Clone ID: MRT4577_113096C.1
cctcgaggccggccgggttttagttcagtttaccattcgtcgattcgagttccgctcgccttcgtcttcgtctcggcccacggcccacggtccatcagcgctcgtcctcccttcctccctctagcgcctgctgcctctctcactccatggcgtggatctggatggtcctcgcggcgggagccgtgctcctgtgggcgatctctttgggtcgggtcctctcctccgccgcgccgtcctgtgtgcccccgagcccgcagttcatgccccctctcagcggtgacaggaggagccgaaacgtgctgctggtcgtcgcccaccctgacgacgagtccatgttcttcgctccaaccattcttttcctcaagtcgaaaggccacagtattcacattctgtgcatgtctcgaggtaatgctgatggtctgggagatactcgtaaggaagaactgtaccacgcctgtgtcagcctcaagattccacatgaacaagtcaaagtcttggaccacccaaaactgcaggatggttttcatgagaaatgggaacatggactagtagcagaacttaccatggagcttgtccaactgtgggccattgacacgattgttacatttgattcatatggagtatcaggccatccaaaccacaaagatgttcatcacggcatatgcaagtttctccatacgaacaagcaagggaacgtggaagcttgggaactagcaagtctcagtattcttcgcaagtacagtggtccgattgacatttggctttcttcattgacgtccttcgcaaggtcaaaacagccaatctatactctagttaacagtagcccgtccaaaagctatgaggcaatggctgcacacagaagtcagtgggtttggtaagtactataagagttcatatttgcattttcatggagaaagcttagaagattgtttgtcatgttctcgagttatacatacataaatatgctacggagaatttaacatgtgatgtggcgtcataccagagcaagccgccattgtcgtctccaatgttgtacttgtgcatcgtcaattgtacatctatatgtatcaatggattttagttgtacattctctgtaggcagtgctcatagggtgactgtagaatttcttatccccaattcagaattgcactgaatggctgaaatacagttgtctttcaaaagaaactgaaatatagtgatgctcactggctt

SEQ ID NO: 14372 - DNA, 354 bp, Zea mays
  Clone ID: MRT4577_113097C.1
aagctaagccagtgagcatcactatatttcagtttcttttgaaagacaactgtatttcagccattcagtgcaattctgaattggggataagaaattctacagtcaccctatgagcactgcctacagagaatgtacaactaaaatccattgatacatatagatgtacaattgacgatgcacaagtacaacattggagacgacaatggcggcttgctctggtatgacgccacatcacatgttaaattctccgtagcatatttatgtatgtataactcgagaacatgacaaacaattttctaaaccaaacccactgacttctgtgtgcagccattgcctcatagcttttggacgggc

SEQ ID NO: 14373 - DNA, 243 bp, Zea mays
  Clone ID: MRT4577_113098C.1
cctaacttcatttcgtggcaccaatataacgaagcgcactaagaatgcaagaatttttagcaaatatagaaccatttattgtgctagcttgcttattcaaatcaataatatggaggtatctcatcattccaagtacttttgctagttctgtgttaagtttgctgttaatacgaaagcatttttaatttgtgattgcaaggactgttgtaatgtgaatgctgatacttcttacaccattaacac

SEQ ID NO: 14374 - DNA, 796 bp, Zea mays
  Clone ID: MRT4577_113099C.1
ctctctactcatggcgtggatctggatggtcctcgcggcgggagccgtgctcctgtgggcgatctctttggggcgggtcctctcctgcgccgtgccgtcctgtgttcccccgagcccgcagttcatgccccctctcagcggtgacaggaggagccggaacgtgctgctggtcgtcgcccaccccgacgacgagtccatgttcttcgctccaaccattcttttcctcaagtcgaaaggccacagtattcacattctgtgcatgtctcgaggtaatgctgatggtctgggagatactcgtaaggaagaattgtaccacgcctgtgtcagcctcaaggtactcagatccttaattagttcattttacctcaaaaaaaatctttatacagtctgaagcagatcatgtcattacagattccacatgaacaagtcaaagtcttggaccacccaaaattgcaggatggatttcatgagaaatgggaccatggactagtagcagaacttaccatggagcatgtccaactgtgggccattgacacggtagtggctacatctcagagaccttatgagcttcaaaatacattgcagatttagtattctaccggcttctcctctcactcgtattaagttaccttgagtcattgcctcattggtgcttgtttcttcgatcgtccaggttatagtgttgtagtaacatgagtattaaagtatacaaatatgccggtctgcattttgtgtaatatataaaatgacatatttgggggggtgggacgctgcccaaacattatcactttttttt

SEQ ID NO: 14375 - DNA, 327 bp, Zea mays
  Clone ID: MRT4577_11309C.1
aactatccatggtgaaccctaccgcctacctacaacatcaactactgctttcatctagcccactctctatgtccaattcacctacatacctgcaacaagaattgttgcaacagattgtaccatctctaactcatctagctattacaaaccctgtttcctacttgcaacatctgctttcattctaccaactaactatttctaactctagagcgtacctacttcagcgacaacatttacttaatccattggcaatttctaacccattgttcactaccttcctacatcatcatcaattgctgccatacaaccgattctctttgatgaatc

SEQ ID NO: 14376 - DNA, 225 bp, Zea mays
  Clone ID: MRT4577_1130C.1
tgtttttcttcttcgcccccgttccccgtcccgacggcgacccaacccatatgagaggttccgaacgttggagccgctggcgttcccgagagtctttccgtgcgcgaaggctgccgtaaccgaccacaaacagctccatgagccataggccacagattcaccactttgttgattttaaaatgctccaggggcgcccttagagccaatttccaacctggttttaat

SEQ ID NO: 14377 - DNA, 465 bp, Zea mays
  Clone ID: MRT4577_113100C.1
aaaaaacaaagagaagggggatcataacattaaaccccccgggtaaacttgggcggggggccccaacaggagccccccaaatttttctgcccccgccaaattttttatcactggtataaagctgctgcctactggggggccccctgcaccctttgggccccccccgggatgtccccatccccggcgaaggccccctggggctgctggtgccccccccccatttccgttttgatgttcacctaatagggcattgtttcctcgcactcgtccaactccatgtgggggtactggaaccccggtttgggcgggaacacaacctccagggccttgcactgttccgggcttaaggaggccgggaaccccactgaaaagggggtgtacagcttgccctttaaaaacggcctttgggacaagggcatgccttccgcgttgatccccttgaaaaaaaaggcttaaaaacttccc

SEQ ID NO: 14378 - DNA, 284 bp, Zea mays
  Clone ID: MRT4577_113101C.1
aggcattcgtaagcccagtcgactcgtcggtgcactcacaggttatcgtcatacctggatacggttccaacctcaccgactcagttcatcccgttacacgcatactctcaccgatgtaatacgaccgcgcttgggacacacctccagaggtgggagtatagaattatcacttcggaccatcagcaggccgattcgtaactaagtatggcacgtccccagcatcgcaatctgcaatcgaactggacacagccgtggacgtgaaaacccacagtggctgtccaagt

SEQ ID NO: 14379 - DNA, 696 bp, Zea mays
  Clone ID: MRT4577_113102C.1
acccctcactctagagcgcatacgtactcacgccaggtgcgacagcagtattagcacgcgtacggcgaccatctagaatctcacaacgctcgacctgccagaatccggtggaagcagtggcagacgcggaagtggcggcgtagtgggctttcgatcatagggacctatcagcgttagcaattatgcattcgctcgcaggcctagatgggatggaaccacgcgaacacatgcggtcgacgcaactctcaggcgcgaagcatgctgtacaagatgtgctaccgtcgcgagcgcactaaggcggtgcagcagcctccctctgcgcccctacgaattctggaacttcgagcggttcaactcccaggtctcctgctatctccagatcctgcagaccgccggccgcccgaacccctacgaggagctcatcgtctgccactttgggtcgtagccgacttcctggacacccgtgccgatctttgcccagaacggccatcttggacatcatataatatactctttccccttcaaagtgattgtggccgcttcctcttctgcctggaaaatgtctggcccaaactatcctatttcctgttctagtttgcaatgtaagcataagccgcgccactgtctattcgtcaagctgctgcctttggattatgacatgcttccaataatcagtaacttttgatgtatggacgt

SEQ ID NO: 14380 - DNA, 1016 bp, Zea mays
  Clone ID: MRT4577_113103C.1
gcgcgtaacgccgaagacgccctaggggcgactgcctccctggaggccggccgggtcttacggggcctcgaaatctcgcccctcgttgcggtcgtccacatcccttcctctcttcctcgccaggccaaccgctgattgttgttcaaacagaggaaggaaggaaggaaggaggagatcagaagcatcagccatgtcgaactcggcgtcgggaatggccgtttgtgacgaatgcaaactcaagttcctggaactcaaggcgaagaggagcttccgtttcatcgtgttcaagatcaacgagaacgtgcagcaggtggtggtggacaggcttgggggaccaggtgaaagctacgatgcgttcagggcctgctttcccgccaacgagtgccgctacgcggtgtttgattttgactttgtcactgatgagaactgccagaagagcaagatcttcttcatctcttgggccccagatgcatcgagggtgagaagcaagatgctgtacgcaagctccaaggaccggttcaagagggagctcgacggcattcaggtggagctacaagcaactgagccgagcgaaatgagcatggacatcatcaagtcgcgagccctctgaaacagcccggcatcagctcctgcatgcccgtcgattccttcggtgttggtaacggtcatccgttttcgtgtccttgtttttcctggaagcaaaagccttgcgttctgtatgagacttctgtataccatttcccctctctctttttccccaatctctgccgtagtcctgcactcctgctactgctgtaaactagaacttatttgctgttttgtctcgtggcattgtcgagtcgcttatgtgtctatgcaatgctagttgtgagaagcctaatgtaccttagcttaatcaccgaattgctcaagtttgatgtcttcctagtcagatcattcctacaattttctatatataatatgtacggtttctttgtataacataaatcaacatgaactgtagtagttagagacaa

SEQ ID NO: 14381 - DNA, 423 bp, Zea mays
  Clone ID: MRT4577_113104C.1
cgggaatccatacaagcactcacacgtcacacgggcactgcttttttacacaccaagcgaatgaaaccaatcgcggtcgtaccaactaggtggactactcagtcgtaggattctgaagtacatagactcattgctcttcttagacacggcacggtgggatgcatccaacatgacgtacacaaggagaaattcgaggaggttcgacacttatcttacacgccggcactaaccaccaccacacaccatggacaccaccgtgatcacggctataaggtgccctagaccacagtcgaagaggacatcaacacctgcaccgttaaggtccacgatcacacagagagcttcctcaccaaggctaactgagccgcccggctggcggcattcactcccagacctgcttgcctgcgtaccttatgtatgtct

SEQ ID NO: 14382 - DNA, 271 bp, Zea mays
  Clone ID: MRT4577_113105C.1
gcctgcaggacgccgggccggaattaatggccgggtcgccgagtacactagccgggggccgccctttgttagggatattttacaaagaaggtgcggtaggcacgctaggacaaaccaaaaaaaagaactacccgaagactcaatctggagcggaagaaaaacacgcacacaaagggtcggaagagcagcgctaatcggggacacgcagctgagaaggcaaagggcatccacagaaactagcacacgacgacggaccacaatcacacggatc

SEQ ID NO: 14383 - DNA, 376 bp, Zea mays
  Clone ID: MRT4577_113106C.1
gattgtcaccaaccacagaagcggaaaatttttttttgaagagggacaaacacacgcccccgtccccataggatcaacaaggggggcatggggtggcacaggtgctttagataacatcacagtacacataccacaccgggtagatctacagaatggcgaaactggcccgccccttgcgcttgaccaccgactacacatggcccctgggggaggggggctcccagagcctagctagctctaggcgcctctggggctgctccgcgagctcctgcagctcgcggaagcgcgtgcttgtggacgcacatggtgctgatgccggcccccggcttgtgctaacccggcaggcccctatccgcgactgcccactacgcctgcc

SEQ ID NO: 14384 - DNA, 251 bp, Zea mays
  Clone ID: MRT4577_113107C.1
atcacgcgtgctgatagccgttgaagacatctgggaactggacgccatccaacgcgacgacatcaacgacaccggcgacaagcgctgagcactcgtggtgatgcggtaccaccgggcgctcggccacgacagctgcttcgcgtcgctgaggtcggcgtaccaacgcgtcagcaaacgcgtactccgcgaggcgccgtgctcggtctgcatcctggtggagcgcagcctctgcaggcaccgcagatgtcggc

SEQ ID NO: 14385 - DNA, 400 bp, Zea mays
  Clone ID: MRT4577_113108C.1
aataccatgagctaaatttactccaaagggctgaataacttaaccgacacgatcaggttatatcttttggacctttttatattggttataaatggaaggactatcttaacacatacaaacgatgattgtagataaattccactgacgcccaaaaatataccgcttccgggtcatgttccatgtcctgaacaaatgatatgtgcaaattattacctactttccatttcatgtggctgcctctaccatatttacctgaagtaacaaaattcagccattcttctgttgacagtggctttagttcgctattgtagctacagtaagaaaaataaatgtattttgttgacagacgcattcaaaatctaacacatgactcatgaaaagcagcgatctgatacaaaca

SEQ ID NO: 14386 - DNA, 340 bp, Zea mays
  unsure (1)..(340): unsure at all n locations
  Clone ID: MRT4577_113109C.1
aatcnatcttcaaacccgcattaaagctttatcagaggaaacacaccncaggagtttttataactcgggggagcancattctatcaantttcctttactnttaccnattattcnaatccccattacaaacatcttcacctaannacctaaanaacacacttttcccacntcatctataatccaanatcantntnccactttaattcctcctnttcccttaaaaattccacttntccttctaaattacatacatctatccatcattactatcatcacattaantcctatattctttatcatcaatcttatcatcaatatcaacacttcttctacctccttt

SEQ ID NO: 14387 - DNA, 464 bp, Zea mays
  Clone ID: MRT4577_11310C.1
aaaaattgaaacaaaattgaacatatccaaacaaaacaattatgtaaaggctgctaaaaccacaaaaaaaaaaggatcattcatggagaggggggagcctgaaaaacacaggggctgttgcactggcaagcccaattgggggaggccccgaaggaagggggaacaaaaagaatataacaagcaagcggggctgctgatgcctgctaataggccaaggacggaggatggacaacttgcactccccctcctgcaagacagcaatgtgttctgatccacctgctccaatggctggtcgtcttgctgctgatgcttcccccgtctcagctgcgtgtttgagggctatgagaagcgccttgagagcacatactctgaggcacctgtctttgtggaccctcatgggcgtggtttgcgtgccctctttcgggcccagattgactctgttctgcatcttggtcggggcacaa

SEQ ID NO: 14388 - DNA, 323 bp, Zea mays
  unsure (1)..(323): unsure at all n locations
  Clone ID: MRT4577_113110C.1
annnnannnngtgtttttttttattttttggcgggggtaaaaaaataaactttaattgaactgaaagcagccaaagtagcagaagtaagaattccatgcaagacaattcctgatagtacttgaagacaaaatttttaccgaagtaagaagggaacatactggcttatttaggcgcaggggttccaaatggccctgctacttttggcatcatggacttatttgtatttttcgcaaggttgaccaatccaaagtccgaaaccttggcttttaaattttgatcaagcaatatgttggaagggttcaaatcccttttaatgaaaagt

SEQ ID NO: 14389 - DNA, 467 bp, Zea mays
  unsure (1)..(467): unsure at all n locations
  Clone ID: MRT4577_113111C.1
aaaaaacaaaaaaaggggaattggaggggctagggaaacacaagggcaagctttgtttttatcgaaacagggatccgcaggaaacactagaaaaacagagggggaaacttaaattttggggaaacactagaaaaacaggagcaagctttgtccttggggaaacagggatctacaagaaattaaaaaaccttggcgggcatcctaggggtaaaccttaatgggcttctcccagggcccatgggacccttccttccagagggttatggtgtttttgccaggaggtatgaaaaaaatgggggaaggnagggaaaagaaaacctttaaaaaaggggaagggaaggaaaggaggagttttactttaaagtggtataaatattttgcctggggccagaggaaaagattatcaaattgggaaaaagtggcaaggggggattttggaagatggaaaaaagggggggggggagaaa

SEQ ID NO: 14390 - DNA, 351 bp, Zea mays
  Clone ID: MRT4577_113112C.1
cccacgcgtccgcccacgcttacggcttacctgcagccaaaatgacgaatgggtcaccctgctggaattcttagccactgcgcttgcttgctactacctattccatgcataacagcgtgatcggaaccaaaattaaagttcctgaacattgctgtgatgaatgggtgaatcgtcaccttttactatgaaattagcaactgtttgcacgaagaacagctgtgcttgtccaactatctgggtaccgtacttacctatctctattgaacagtattttggttaaagtaatgggggagatactctttccatgctatgaaaaaaggtggaactacctttaattctaagattaagaaa

SEQ ID NO: 14391 - DNA, 388 bp, Zea mays
  Clone ID: MRT4577_113113C.1
gaaaacaaattgtctgtttagtttgttcataagtgtgctagttttcggcaaagcaaaatcctaaacccaaacagcacagcagggggctaaaatacagaacatcaacctggctgccctttttaaaggccacaaaggaggcaaatgaaaacctccagagcggatagttgaaagggaaccataggcagacggctggtcactccccaatcctcctttctacggaaatgaccttcccacttatgatggcatgtaggtcgaggggtcaatttgctcaggcagcccctttatgtctacctgaaacctgaggggcacctgggtaagaacatcacaatccgaagcacaggaaacaaaggtaattgcaagtccctaccggccaaaacgcccagccctg

SEQ ID NO: 14392 - DNA, 197 bp, Zea mays
  Clone ID: MRT4577_113114C.1
tcgctcacgcgcacgggaagaacgagaggggggatttttaaagaagatgccggtttgccaacaacaatgactgtcacttctcttctttcgccagagatgaaacagtgccgaaagacggcgatgtagagaaaactgccaccgcctgacaaacaaatggactcaatcgatgctgtcgcttacacccacgaacttcacaa

SEQ ID NO: 14393 - DNA, 399 bp, Zea mays
  Clone ID: MRT4577_113115C.1
taccgactcggaatcccgacccacacgtacccatacgctcgatacgaaacgcactatcgacgacctaacaccaaggcttaccaagatagtaggggttcttgcacttgctgcccttgtaacgatcgcaacaaatgccttcattattccacaatgctcacttgctcctagtgccattataccacaggtgcttccaccaggtacttcactgggctttgaacattcaaccatgcaagcctacatgctacatctagcgctagctgtaagcgccttacaactaccacttgcccaattgctacaacaatacttgccacatctaaccctactgaccattgccacgcagcaacaacaactacaacagcttctgccatcactgatccaccgtatactgtgagaaccctg

SEQ ID NO: 14394 - DNA, 677 bp, Zea mays
  Clone ID: MRT4577_113116C.1
ccggccgggactgaaaaaatggccgcccgtctctccatcgccctcgccgcccgtcgaatctcttccgtggctgcaaagaggccctcgctaattgtgtgtcagaagtggcagcaggttgctccaaagcaacggctattctcggtatctgccgcactcaaggagaagaggtatactgaggaccatgagtggattgagctgtccgctgatggcaagacatgcactctgggcatctcagaatacgcagccaaagccctcggcgacgttgtctacattgagcttccacaggtcgacatggaagtggccgagggcgacgtcatcggcgctgttgagtctgtaaagtcggcttcggacattctcactcccatcgctggtgttgtttctgaagttaacgaggcattggagtccgcgccaggcagtgtcaacaaggaccccgagggcgatgcctgggtcgcaaagatcgctgtgtcagcggagcccaagggcaagactatgagcaaggaagagtatgccgcctttactgaagagtaaaaactccaaagaaacatagggacaggctagtgtacatgggtggataatacaagatacctgcgcaccatcttcaacagggcgcgccaaatacaacatgaatttcacatcttgatgttcgttgtgccaaaaaaaaaaaaaaaaaagcggcc

SEQ ID NO: 14395 - DNA, 209 bp, Zea mays
  Clone ID: MRT4577_113117C.1
agcacagaccctcacccctcacctcgatgcagccagtagcttggatccttgtgggcatgatccataatcggtttcaaggtaacgatggtgtcgaggtctttggtgggttgaactatgttagaaaaggccattaatttgcctgcaaattgttaacagaagggtattaaaaccacagctaagtagctctattataatacttatccagtgac

SEQ ID NO: 14396 - DNA, 135 bp, Zea mays
  Clone ID: MRT4577_113118C.1
ggaatttgagttatggattgcttttgctgaggggacatgaacagaagagtctcggcccttgctttatagccgttaacgtcctgctctaatccacggaataaactgtagctacctgatcaactctagccctatcaa

SEQ ID NO: 14397 - DNA, 1200 bp, Zea mays
  Clone ID: MRT4577_113119C.1
cggtccgcactccaggtccgaaaaccgtcccgaaaacccaaatccaaacgtcgccgcaaaccgcgcgatccccaggcccaaagcgccgccgttcatgagcttcctcgccggccgcctcgccgccaaggagggcgcgtacttcctccaggagtcaaagactgccgtcggccgcctcgcggagaagctcccgccctccgcttcggcgcccgggggtgcgtcggcgcagccctcccccgacgtgctaccggagatcctccgccactccgtgcccatcaaggggacgccgcccccggccgaagcctccctctccgcgtcctcccgctgggccctcccgccgggcggcggcgaggctgcgggcttgcaccccgacgcgctcaacccgctccgctcctacgtctcgctgccgcaggccaccttcggccccaaaagatggcagcttccgaacgaacaacctaactacttggcgtcaacagcaaatgaaaggcggcgagatcgggccccacctcccttggaccctgagaatttgaaagccgtaattgctggttactcacagattgggaaggcattcattactgcaacttttatggtgtttggaggagcaacagctgtgctgttgtacacagcagataagctacagttgcattcagtagatgatgttaaaactaaaggaaaagatgcactgcagccacgagctgatatgattaaagaacaaatagctccattaagaagttgggctgaagaaatgtcccgaaaatggcatttcgaaggtggtaaagaagctaaggagaagtctggcatcgttagagaactttcaagaattttgggctccaggactccccctggttgatcaacaatgacatacggctgttgtaaatccaccgtccactttgttgtatgcgtccttatcgtttccatatgtttgtgtataggaaacaaaacatcctgacatctagtttggatgtatatattggagtatagaattggaattggaatctgctatagatctttgtattatgataggagtgtggatagcataaagaaatacattgtagcaaagaagactgtaaagtgacctataagtatagcaaatggtagggcgtaagttttataggatgacgattagacctgctatattgtatggtgcagaatattggcctaataaaagacatgttcagtaaaaaaaaaaaaaaaaaagtccac

SEQ ID NO: 14398 - DNA, 626 bp, Zea mays
  Clone ID: MRT4577_11311C.1
tcggtttttttttttttttttttttttttttttttttttttttttttttttttttttttttttttttttttttttttttttttttttttaaccaaaccccccttggaaaggggctccccttctaaaaaaaaaaaccctggccaaactttactggcggatcaaacagggggccctatctaaacataaggggaacccccccggtgggggctttgccttaaaaccaaacgggggaccctttcaaccccgttggggacccaacaacgggggaccccctttatacagggggccccgggaaaaaaaacaaaaccgggataaaaatttgcccaacaaacccccccccggggaggaccaatctggaatgggggatttaaaagccccctgcttgagaaaaaaaaaaatagagcccctgccaaacccaaatttacttgggggacccgggaacctgcccccaaaaaggggccccgggcaaggggagcaaaccctaacttccctttaaaagcttcccaaagcaaaaaaccccgccaaaatcaaatgcttttggcaacagttttcgaaaaagggagggggccaaatacgggaccccacgggggcgaagtttttccaaacccctttgtttgaattctgaa

SEQ ID NO: 14399 - DNA, 521 bp, Zea mays
  Clone ID: MRT4577_113120C.1
agaatgaattacattattatacaaaaaagtgtgggttgaggagcaaagactctttcattgaccgtgttctatttctgtacaactagtaaaatcgatgctatgcactatgaacaacaatctgctgaggcacaggatctgctgataacatcaatagctcaagaaagcatatatatatatatatatatatatatatatatatatatatatatatatatatatatatatatatatatatatatatatatatatatatatatatatatatatatatatctatctatatatatatatatatatatatacatacatatacatagatagatatatatatatatatatatatatagatacatacatatatatacacagagagacagacacctctagaactaaatacacctacatcttttctcacatatagatatttacacactttgggccgcacctagtttgttagcctctttgacaaacttatttacagacacactctgggacgctcccccttcttggttcttcactac

SEQ ID NO: 14400 - DNA, 548 bp, Zea mays
  Clone ID: MRT4577_113121C.1
cttaaatataggtttgttttatatcaaatttttttacatttattttattttttactgtcgtagctgcctaaccccataattgggggacaaacttcatggaaaattattttgaagggttttatccaaaatgagctgatcaaatagttgaaactcactaagcaactctcaaaaattcccaaaaactacatcagataaataccagggacgcggcggggccttaaaaatcagctgactcgccttgttccatacaaggctgagggaaaaaaccacacctagactaaacacttgattgaagaggaaacaacgaatgctatgttggcacgatggggaacaattagaagacgacgatgggcacaaaaatgaatagatgccattgctgccttaaacattcttgttatctcacagactgaatcccataaacaaaggacttaaactaccaaggttcatgttacggccaaacacaacacacaccagtgggttggtataaaaactactgccttagccaataaataattttcggtgaatgacgttagcactaaaagaagggc

SEQ ID NO: 14401 - DNA, 275 bp, Zea mays
  unsure (1)..(275): unsure at all n locations
  Clone ID: MRT4577_113122C.1
cgccagtgagtgaacaccagccgtcttggcccgcttctcccctgctgcggccatggcgacctccgctgcgctctcgaccgccgccaaccccacccagctctgccggtcccgcgctgcgctgggcaagccagtgaaggggcttgggctgggcgatgggcgngagcgcgcaaccagcggacatcacgtgccaggcggcgagtacatccccgccgaccgcgtcgccgacatggagaagcggaactgatgacctcctcctcctgggcgccatatcgctg

SEQ ID NO: 14402 - DNA, 145 bp, Zea mays
  Clone ID: MRT4577_113123C.1
tgatttagtgacacatgtgaagctgccatgtaatctgatagcgctggctccctccttccctcacctccgatccaataaagctaatgtataatttgtatttgcttggctaaaagctcgtagaagttgcgtattggtaacaagacga

SEQ ID NO: 14403 - DNA, 774 bp, Zea mays
  Clone ID: MRT4577_113124C.1
ccggggttcgttttcatccctaccggccgcctcttctctcccctctaatttcccaaactgaatcctcctcctcctccccgcctagggttccgcttcctcaccgtccgagaaccaccgaagcggtggcagctgtcccttctcgtcggccaccgccgcacaactcagttgcttgttcagccgctccgctgccgacccgcctatcgcctgagctccaacggagttacccagaaaccatgattttgaggctctctaattggtctcccaaacaacaacgctccacagcaaattcacaatttatttcattctccatcttttaaaagtgacacgtaacaactttgtaccgctccttacctgtctgtcacatcgcaattgttccccaccagcgtgtatcgtgggtccttccgcttcacccaaccacgaggaagttcttacggtgccacggagttgcaactgcacaaaggccttttgtggtcacaaagggtgctattgtgttacaacaacagttctagttgaagtaataagacattttttaaactgtctgctacattgcttccatggcaaccaatgagaacctcccaccaaatgtcatcaggcaattggctaaagaactgaagaatcttaatgagtcacctgcagaaggaattaatgtgactgtcaatgatgatgacttcactactatttttgctgatattgaaggccctgctggaactccatatgagaatggagtgttccagaatgaagcattaattgtttcatgtttcccccactctctcc

SEQ ID NO: 14404 - DNA, 181 bp, Zea mays
  unsure (1)..(181): unsure at all n locations
  Clone ID: MRT4577_113125C.1
tgcatctttcacatacacgttagacatgggcggtgtcaggctacccatgtgtgcctgtaccgtaagcaatgcaagtccctgcaacacaattcacaacacattccccgaagagagtatttttcactgatcctcanaattgattttgaaacggtttaaataaagtagtcgnatatatttagct

SEQ ID NO: 14405 - DNA, 776 bp, Zea mays
  unsure (1)..(776): unsure at all n locations
  Clone ID: MRT4577_113126C.1
ggttcgttttcatccctaccggccgcctcttctcctctccacctctcaatttcccaaattgaatcctcctcctccccgcctagggttccgattccgcaccgtccgagaaccacccaagcggcggcaactgtcccttctcgtcggccaccgccgcacaactcagttgcttgttcagccgctccgctgccgacccgcctatcgcctgaggttcttacggtgccacggagttgcaactgcacaaaggccttttgtggtcacaaagggtgctattgtgttacaacaacagttctagttgaagtaataagacattttttaaactgtctgctacattgcttccatggtgagcattacaagttctcaatttttaaggacttcttgtgctgtgaaagagaatcattacaacttagcagtactgtatcccatgattgtaatggaatgtctatgacactgaaggcaaccaatgagaacctcccaccaaatgtcatcaggcaattggctaaagaactgaagaatcttaatgagtcacctgcagaaggaattaatgtgactgtcaatgatgatgacttcactactatttttgctgatattgaaggccctgctggaactccantatgagaatggagtgttcaggatgaagctattattgtctcatgatttccctcaatctcccccaaaaggattcttcttgacaaaaattttccatccaaaacatagctactagtggntgagatatgtgtaagcacactgaagaaaggatggaatcctagncctggata

SEQ ID NO: 14406 - DNA, 198 bp, Zea mays
  Clone ID: MRT4577_113127C.1
gcgggcgggccgggaacttacctgcagccatgactcgcaagccagtacccatcagaactacgagcagtcgcacgcaaagtgtcaagaagacaaaacggtccgacatggacatcgcactgcaatcatggccgcgaccgcctctgccgctgggcggcccccagccgcgtgcctgcatgcgcagacggtggacgacgaccc

SEQ ID NO: 14407 - DNA, 334 bp, Zea mays
  unsure (1)..(334): unsure at all n locations
  Clone ID: MRT4577_113128C.1
atcactnatccacctatccttcatcaatcctttcacctacttccaacatcatctactggaagacttttttaaaactgttgctaacccaacttcatactatcaacaacaacaactacaacaatttattccatttctcactcaactaaccatccttaaccattccttctacctacaactactttcatctatccctctcaccaaaatcaattcacctacctacctacaacaacaatttctacaacaaattacaccatctattactcatctatctctttcaaaccctactacctacttacaacattttcttacattcaaccaactttctttatcaaac

SEQ ID NO: 14408 - DNA, 404 bp, Zea mays
  Clone ID: MRT4577_113129C.1
agcttacgccatgccgcgggcgtaagctcggaattcggctcgaggggatgcattgatttgaggagagcaacaactcctgagatgtggggacaggacatcgaggttcccgaatcgatcttgaacttcacagatccaatggctgatgatatggcagcagcaggagtccatgctgccaaaatgttgacacctggagcagcaatgtctggctgcagaagaaggtgcagggttttttcagcctcccaactagaactggaggtttgatcaacactgtagaggtttgatcaactgtcgaactggaggtttttttttaccttcagaacagcgggggacagagaacttggaccccgagatgagaaatatgcaacttctgggcccatcagttctccaagaatcgtttttgctga

SEQ ID NO: 14409 - DNA, 861 bp, Zea mays
  Clone ID: MRT4577_11312C.1
gtgcggcgctgcggccggccccgccgggacaaacacatccatcctccttgcaactccagtgctgctcactgccactgccagcagatcgagctgctccgtctcacaaaccctctagcttgctttgctgctccacctgcaagtctgcaaccgcgtacagagatgtcgacggtgagccgtgcgtccctcgaccagaagctcgccctcgccaagcgctgctcccgagaggcgaccctcgccggagccaaggcggcagccgtggcgactatcgcctccgcgatccccaccctggccagcgtgcggatgctgccatgggccaaggccaacatcaaccccaccggccaggcgctcatcgtctccacggtggctgggatggcctacttcatcgccgccgacaagaagatcctgtcgctggcgaggcgccactcgttcgagcaagcccctgaccacctcaagaacacctccttccagggcaccggccgtccccacccggctttcttcaggccgtgagacgtggccttcgtccagagctagctacctacctctttcagttcgatcgtcgtcagtgcaaagcaccaccaatgcctgaataaatttaactacgaggctagctgctgaacatcgatctgctactgctagtattactacggcgaggctgctgaacagcgctgtagagtagtattggtgctcagttcagaatgtataatgttacttctaccgattaaactgttaaaaaaccctagtacgcttatgtggtcaaataccacttatatctgtgagcagtgtcgcatctctatataaaggaatatgtatcttctcagaaagaggttagagaccccaaaaaaaaaaaaaaaaaggccccta

SEQ ID NO: 14410 - DNA, 562 bp, Zea mays
  unsure (1)..(562): unsure at all n locations
  Clone ID: MRT4577_113130C.1
aattcggcacgaggcgcaccctgacgactatgcatggggaccaaacgctgctgcgtcgtcggcgtccgagcacggggaccggacgcgagcagtagcgacgacatgcgggagcccaggagcgctacgatgttggacgacggcgacgacgacttcaccttcgccgccgcccatccgcctccccgtctactacctgcaggcgccggcggcggattcgtggggccgccgctgctgtacccagtcttcgggcgcccgaggtccccgccgcgggttgctgatccagcggagccggagccggagccggacacggccaccgcgcgggtgccgctaggacggcatctggcggtggacaggaggagggatccggcaccggcaccggcaccaggtgcagctgccgcggacgacgacgacgactcggtgccggcggagacgttctgcccgtggtcgcccgggtggtcggcgggggcggcgtcgccggcgcggtgcaagaagagcggattcacggggtacgggcttcggatggggtcccggntcgccgttgggcggagccagagcgacggcaaag

SEQ ID NO: 14411 - DNA, 597 bp, Zea mays
  Clone ID: MRT4577_113131C.1
cggccgggccgggagatagcaaagactggcgcgaccgctgatagtttgctagcatacttccggtcggctagcacgccatcgtcccatgacgccagtaggcagcgtcgagtgctgcagcctggccggcgcgacagcgctggtcaccgatgtgagcaaggggatcggacaagccgacggagaaggagctggccaggatcggcgcgcgcgagcacacgtgcgcccgcagagcggaggacctgcaggagtgccgcctctgacgcaacgagaatgggctccgcgacaacgtctccgtgtgcgacgtcgccgagcgctgctatcggtagaggctcgtcctgcacacgtgtcagcagaaccttcgacagaaagctcgatatcctgcacaacaacgctgctctgctgctgctcaagacaacgatgaagtgtgcagtgtaggactacgcgcgaatcatgatgaccaacctgatattcccgcttgcacatctcccagctctggaagccgctgctcctcaacgcctccgtctccggaggggaagcatcgaaatgtctcctccataggcagcgtgcttggcttccctcagtaactcatgtacagcctca

SEQ ID NO: 14412 - DNA, 824 bp, Zea mays
  Clone ID: MRT4577_113132C.1
cgaggtccccgccgcgggttgctgatccagcggagccggagccggagccggacacggccaccgcgcgggtgccgctaggacggcatctggcggtggacaggaggagggatccggcaccggcaccgctgccagctcccgcggacgacgacgacgactcggtgccggcggagacgttctgcccgtggtcgcccgggtggtcggcggcggcggcgtcgccggcgcggtgcaagaagagcggctccacggggtccgtgctccggtggcggccccggctcgccgtcgggcggagccagagcgacggcaaggagaagttcgtcttcttgagtgccggcggtggctcttctgggcgccggagccagaatgggcgaggcgtcgccgcgcccggaggtggtgccactgccggtgccccccacgcctggagctgctacgtcaacgacaataagtccggtggcggcgcgcgccgcaggtcgttcctgccgtacaagcgggacctcgtcgggctgttcgccaacgccgccgtgttccgccggagctacctcccgttctgatatgatatatgcactattgtactgtacacccagaggtaatggtttgaccatcatcagtttactggcgtactgcagtgggctcgatggcagcttatacttgtcatagccggtcagccgtgcagtccatccattacccagcacatttccctcctaggttttgcttcatgcatgttttgcttgtagaggaaggtgtggtacatgcatatgtgtgtatatacatttggattatgcatgccagtaggctgttcagaaggaatggaaaaggccgtgtcagac

SEQ ID NO: 14413 - DNA, 274 bp, Zea mays
  Clone ID: MRT4577_113133C.1
cgcgcgcgcgcgtgcgcgggtcctctatagcgggcgcgcccttttttttttttttttgctttagaacaagagatagggatgacacacagaatgtgccggcattggggcatccatagtccccacccgaggcgtgctaaggagaattagacttcgtgccaaacgtggctttctgtcaatactagtgaacccccccagcggaagatcacccaaggatctcccccgctctgatctattcgaccggggctttaaggacagtgatgcccaaaatgggcat

SEQ ID NO: 14414 - DNA, 640 bp, Zea mays
  Clone ID: MRT4577_113134C.1
aggtgacactatagaagagctatgacgtcgcatgcacgcgtacgtaagctcggaattcggctcgagagtgtataccttccgcctagatcacactcctaggtgctagggttttgcagagtctggtgatgcgaagacgaaccggcggcgtatacgggaccggcggcgtatacgggaccggcggcggtacctgtactccaagagcctcgaggcctcccattgggtgctgttggagaaggagcgccgtatccgggcggcgctagaggagggaaagcccattcctaccgagctccgcaacgaggagcacgacctgcggaagcagatcgacctaggagcgtggaggtgcgtgttgttcccgtacccgcgctccagaccatggcttcattttgctcgagcgagcggaatgcagtgttctcgctcatttgttttgtttgcaggggatttccaaaattttgtgtccggttaagaacgttgcccggttgttgtttggatctgtaattgggtgctccagtttcttagagccaaaaaaaaaaaaaaaaaaaaaaaaaaaaaaaaaaaaaaaaaaaaaaaaaaaaaaagggcggccgccgactagtgagctcgtcgacccgggaattaattccggaccggtacctgcaggcgt

SEQ ID NO: 14415 - DNA, 1526 bp, Zea mays
  Clone ID: MRT4577_113135C.1
ggcggcctccgcgcccccccctccccggcgttcccgggcctccggtgctgcttcgtcctgtgcgttgttaaactgacttggtcctgataatcctccgcgttctaatgatgtgctgtcgctgcaccatgcgcgtgttgtcgtcagagcctagggctggtgaagcccctggaggagatgctgatggcggccagcgcgggggctgcaaatccgagccaaggctcgaatccgaacccgccgccgctggcggcgcccctgacggacgcgggtagcaccgagcggcgcgcgcggccgcagaaggagaaggcgctcaactgcccgcggtgcaactccaccaacaccaaattctgctactacaacaactacagcctccagcagccacgctacttctgcaagacgtgccgccgctactggacggagggcggatccctccgcagcgtccccgtgggcggtggctcccgcaagaacaagcgctcctcgtcctcgtcctcgtcctcgtcctcgtcggcggcggcggcgtccgcctccacctcctcctcggccacgagctcgtccatggccagcacaccgggggcggcgtccaagagtccggagctggcgcacgagggcgcgcacgacgacctcaacctagcgttcccgcaccacggtggcctgcacgccgccgagttcgcggcgttcccgagcctggagagcagcaacgacatgtgcgaccagggtggcgggatgacgagcaatggccggggcggcggcgcggggcccgcggtcggcgcgctctcggcaacggagctgttgcggagctccggctgctacatgccgctgcagatgccaggaggagattacacggcggcagggttcgcgctcggggagttccgcacgccgctgctgccgccaccatcgtcacagagcccgctcgggttctctctggacgcgcacgggccggggtcgtccggtgctgccgcagcggcggggtacggttccagcgcggggctgccgcagggcgtgccgggcaacgcgggcaggttgttgttccctttcgaggacttgaagccgccggttagccctggaggtggtggtgtgggcggaggtggtgcaagtgcaaccggtggcgccggcgacggaaatagcagccacgatcagtttgaccacaacaaggagcgaggcggaggcggcggccgcggtgccggtgccgggcacgacacgccggggttctggagcagcatgatcggcggcagtggcgcttcttggtaatggagaatgacgcacacgggggcggcgccatgcatggtttcatgcatgcaaagtgttggtgacttgttctcaaatgctatgagttaagaacaaggcaacatagaaaagtgttaatcgttaaggtccttcgtcctccaaagcattatttcccttaggatataatggtttacggacgaaggttatgaaggacgtaccttcataaatttattaaacaatgacgaaggatggaatataaaggatataaaagacaacattaacaattatatattattattaagtat

SEQ ID NO: 14416 - DNA, 315 bp, Zea mays
  Clone ID: MRT4577_113136C.1
caaaatatgcaccctgatattgtctccacctacactcaatgaaatatcccacgaaaattgggaagccatttttatattaaaccactgcacacctttttcccacaacaaataccctatgtcttctatatacccacttttaattttcacctcacaaatactctctgtgtctgctattctttcaaaaataactccacatttttatacaccacaaccccaaattcaactcaaaatgtacacatatcaaatatcttattcacaactctatataaacacacattctacaatatatatacactcattccagtttcatcccaa

SEQ ID NO: 14417 - DNA, 760 bp, Zea mays
  Clone ID: MRT4577_113137C.1
acggcctacatgctgtcgtggtgtcgagctaccagatgcagcgaccgacggccaatgggatccccggacagcgtcgcggccgctttcgtcaccgtgaacatgcagctcacactgctggaggtgaggaaagcgacgggtgggaatgggaaacacgaccccgacaaccaatctgcgtggatccactgccgccgccgctgttcaagccgtccggacggaacgacgacacctaccgcgtcgtcaacaccgcttacccgccgagcgtactggtggacgccatcaacgaagcaatgaagcagatgcacctggcgttggttcaggcgagcaaactccagcgatgcgatggtgccggcgtcgatgcgatgatgccacgggcagctggcgcattcgcatgatccagacaccggccgacgatccatcagtcattcacctactgctgctgtcctaccatatatatatgttcttgatttcttgtttttttcctaaaaaataaaggagagcatcaatttgcattggcgtaaattttattttctttaattagacgagggagtgtacgaatcactgtcaacactcaatgcaaccccccctcaaagcattgtattgtaaccaagcatgtgataatatatataataagcaatcggtccgcatgcatttatgccctgttattatatattggctaaaagcttttcctttgtccaaaaaaaaaaaaaaaaaaaaaaaaaaaaaaaaaaaaaaaaaaaactcgagaccctcgtgccgaatt

SEQ ID NO: 14418 - DNA, 358 bp, Zea mays
  Clone ID: MRT4577_113138C.1
gcaatgtccgccagtttgagcgaatgaattgggggcttagcgcacagaaggatgaattccgatcaaagctcgacaaatacgcagactacgaggacatcaaaagagaactcggggttatcaaatctatcgaattctttacaggtgatgatgacgataccggcactttgcaggatgaggccactagcactaacagctctgagaaatccaaagagaattcagtggagcagttactgatggctctgaacaagaaactcaagaacgtgcttacagtacttacggtatctcatcgagatcttcagagtcagattgagacgctacaagaggtatcatacgcatcgaacgctgagctagataagtt

SEQ ID NO: 14419 - DNA, 613 bp, Zea mays
  unsure (1)..(613): unsure at all n locations
  Clone ID: MRT4577_113139C.1
ccggccgggaacacgaacatcacgaatctagtatcatcgaacccccacgataccaacaagtttatccacatcaacaatcagtatctacataccaagcagaaccagaatccacaacctccacaaacatggcaccaaagaagaacgctcgcgacaccacctccgcgactgctgccacctcccaggccagtactagcaccactgcgcctatccctcttacacctgagcagaccaagcctgctgttcccaagaagagcgatgctagggccgatgttcagtgggaccgtattcctcagactatctacaatcactacatcaatgaaactccccaacgcatcatgctgcttgacgtctttctggtgtacctggtcgttgtgggtgcaattcagttcgtcaactgtgccatcgccggcactttcgtacgtatcaaagaacacctgcgcaggcttgcggatactgatactcttttagcccttcaacgctttcctgtctggtttctgtgtgacggtagcacagttcgtcttcacagntggcttgcgactccagacaaacgaggcggttcctactgactgcgtagacattacgccctgagaggtcattcgctgaatatgtcact

SEQ ID NO: 14420 - DNA, 469 bp, Zea mays
  Clone ID: MRT4577_11313C.1
gcatttctggcgagggaggcaggaatgttaccgttcacgccgcagaattcctgatcgatggcgatgaatcgacgatcaggagcggcatcaagcaactgagccgtgccctccaaatcttccggtttgtttgggaggccgcgaatactgactgtcatgccgccaatcacaatggtaaagatgttgtgggcaagaagaagaatgaagatgcaaagggtgtgttggagttgcaaggtcatctctggagtttcggtgttgaggagaagactctgacatacagaggagacgtgttccatatgcatcagattcagttaccatgaaatctcctttctccaacatatctttgtgcaaaatctagccatatagacaaaacatataagaggtgcgatctgaactgaaatgctactcttttcactagcgcttctctgaatctgtgcaaaggcgatgcaactgcatcctgggtgaaaaagac

SEQ ID NO: 14421 - DNA, 459 bp, Zea mays
  unsure (1)..(459): unsure at all n locations
  Clone ID: MRT4577_113140C.1
gcgtgggncgacccagcgggggggcacggnccgctcggagagcagaagaaaggttccccaagccctatctcccgatctggaggccgaaccctggcgtgttcttggactatgaccgccctccgcgcccccccgggcccgaccgtgatggagttgtncaccaaccaggggcgcggggggggggagaattttttttcgctgcgcacgggcgacaagggcgtgggcaggtcccggaagccggtcccctacaccggctccacccttcaccgggtggtgcccgactccatgtgccagggcggggacttcccccgcgtcgccggggccggcggcgagttcatcttcggcgagaagttccccgccgagaagttcgtgcgcgagcacaccgcccccggccggctcgttctggccgtcgccggggcgcacagcctccgttgcgcgcgctctatctggaccggcccgacc

SEQ ID NO: 14422 - DNA, 781 bp, Zea mays
  Clone ID: MRT4577_113141C.1
gccttacaggctcacagccgccgcagggtgccagggcgttagggccttagggcaaagcatagcaacggcggctgcgcagcaagcagttcagctcagcacctcgccggacgccggctcacccatccggccatcccctgccggccgactctccctggtccccagcgcagcaagcagttcaccggagccggcgcagcaagtagtcaggttgattaacaaggtttgggtttgggagcacttcacaaggtatgaggtagaggttcaggaagctgatggttctattgttaagcaaaagtgggctaaatgcctaagatgttcacataaagctaaggcatatagttataatggcacaaaggcttttagtaaccatttaaggatgaagcatcaagttttgaaaggtcaacaaatgcttagtcagagtggggatgccatagcaacatataaatatgatgagaatgctagtgtgagacttttatattatgccattatcatgcatgagtatccgtttagtattgctcaacataggtactttgtgaaattcatcaaatcattaagaccatcatttccttcgaagtctcgtgttactgtttgtaaagagatcatggaactttataaggaggaaaagaatctactgtatgcacaattcaataaactatcatgtcgtgttagttttactatggatacttggacatctattcagaacaagtcatatttgtgtgttactgcacattggattgatgatcattggaaaatgcaaaaaaggattatcaactttatgcatgta

SEQ ID NO: 14423 - DNA, 823 bp, Zea mays
  unsure (1)..(823): unsure at all n locations
  Clone ID: MRT4577_113142C.1
ttttccccttttttccccaaatttgggtccagaccgggacccccaaaaaacggcccccaaggggttgaaattcccccctaaacagtggggtccaccccaaggtttttntttttttttttttttttttttttttttttttttttttttttttttttttttttttttttttttttttttttttttttttttttttttttttttttttttttttttgtttttttttttttttttttttgtctatgtgactatgtatttgctgtttctcccagtaaataaatattacagttcttttcagttctgagacacctagatttaaacacatacactgcacaccggcccttttctcgtccttattgctccactatgattcctgtcctctctttcactaaccaaaaactctctttttctttatctttctctcatattaacacttcaaaaaaataattatatggaagcagctagtagtaaattataagcttatgagaaagaaagaaaaaagaaaaaagaattaccccgtccgcctttccataccaccgccgccaccattttttatctacagtccgcctagctcatcgggcgtcgtccctctccggcacccctccggcagcgccgccgtcgcgcgccaggcggtgcagcttggcgaagacggcgaccattggcgcggtgttgtaggtgcaggcctcggtctgcatgtagttctcgcgctcgtcccggaactcgtccctggagttgggcccgccgacgatggcgccggcgagcacgttggggttggggcggccgcggccgaaccagtcgtcgaagccctgcatccggcccggccggc

SEQ ID NO: 14424 - DNA, 605 bp, Zea mays
  Clone ID: MRT4577_113143C.1
ctcacccctgttcctcctagcgtccgggctctgctcgtcctcggccatggcggacgccgtcgccatttttccccttggtgctcaccggtcgagtcccagccccagcgccgtgaaactccctgcgcccccgtcctcttccccagtcgcgagctccttttctcttctccatggcgcgcccaagctccctctgctttcttatcctctttccagcgcgcgtaggcttcctctgggattctttgtttgccgacttaatcttccagccgagcgcagtgcttcttcctcctcagccgtcgcccaagtcttcttcttctacgcgcacagggttctcctctgcgcatcctctgactctcccagcgccgtggcttctctgagttcgtcgctggaaacgcaccgtcctctgctcgttcggtgcccctctctccagcttccatggcgccttggagccccagctcggccgacggccgggaggacgcgctgggtctccctctgctcggtcgtctccctcctcccgctccagctcccctgtgtgccgtggatctcgcgcccctgcccaagtccggctgcctgcgcgctccttcttccttttcccctgtcagccgcatctc

SEQ ID NO: 14425 - DNA, 236 bp, Zea mays
  Clone ID: MRT4577_113144C.1
ttgagtcgtattagactcctctctacggtcatcatggtcgtgggtgtcgtccttgtagcgctcgtccacggcgggtcatgcggggcccccagggtgtcgcccggtcccaacagcagtaccagctacaatctggaaatggttcatcgggaccgccacctgctacggtcagcccaacggtgccggcgctcctgacaccggcggtgcgtgctgtctcaagaacgtcaacctgtcaccct

SEQ ID NO: 14426 - DNA, 207 bp, Zea mays
  unsure (1)..(207): unsure at all n locations
  Clone ID: MRT4577_113145C.1
caagcaaagcatgacggcgcacgccccaacctaagcattcaactcgagcacacttttttttcttccaaaagccaccccctggggttgtgcacacggatttctgacccaacaaatacccnccccaacctaccaacgcacccaaagcacgagcgggcgccccctagcattcgttctcgcgagtgcgtgccccttctcttctctagttct

SEQ ID NO: 14427 - DNA, 266 bp, Zea mays
  Clone ID: MRT4577_113146C.1
tatatttgtctgtattaacttgttttttgggttgggttttttagagatggggggggtttattcagaaaaacaaagcatgtcaacagaccaacgcaccaacggaagactaacccattccctggatacaggggaagcgcaaaaataaaaccgaaggatcgaaaatggaaccaggcccttgacatcatgaagggggggaaaaaaatccgcatgacctcgaggggactaacccaaaagccgtcgcgaagttggaacgcggaattcccgac

SEQ ID NO: 14428 - DNA, 250 bp, Zea mays
  Clone ID: MRT4577_113147C.1
cacgcgtacgcccacacttcctcccacgcgctcgcccacgcttcctttttcttcttagcccatcacacacaaacaaagggcaggggctcacaactctgcctttcctcctatatattccaaatagacttcagagtcattacaattcacctaatttcctcgcccaacacaacaaaaacatctctctactcatcaccctaatccaaacaactactcgtgttaaaaaaaaatactatgacccctctaaaattat

SEQ ID NO: 14429 - DNA, 345 bp, Zea mays
  Clone ID: MRT4577_113148C.1
tttggtttttttttttttttttttttaaggtcctactgagacatgaacccaacagacaaacttcaagcaggaatagaaccaaatccagcaaaacatcatataagccaaaaagggagcaagggagtcgagagctgccaaaaagccgcttgcgcataataaattgcatgaaaaaaaaatgcctcagggaagcctgcatgaaggcaggcaccccggactgctcacctgcgtatagcaagctgcacataacaggaggcatgcaaaaaaccgcctagagaacattcgctccaaccaaaaatcttccacaaaggaaagcaccaacaggatcacggccggtggaggaggagc

SEQ ID NO: 14430 - DNA, 680 bp, Zea mays
  unsure (1)..(680): unsure at all n locations
  Clone ID: MRT4577_113149C.1
gccggccgggtcggatattccttgcttcctccctgccctcctccctcttccgcttccgcttcccgagatccccatccggccacccccatcctcccatgccgcactagctcgcccgcccactcaccacccagcacccgccgcgcagcgagatccagcgccgcccgctccccgcaggtgctcggcggaatgtcccaccgcccgccggcgccaatgccggacaccctctcggacgccttcgccgccgcggtgctcctctcctccaccgacaagccggacacgctgcccccggggaggctctcgcccgtctccccgctcccgcactcctccaagcacgggcaccaccacccgaccccgagctcctcctcgggctcctccggctccgtctcccgggccccgctcgcgcccgcctccggcctcgcctcgcgccggagccactccggcgagatcccgctcccttccgacgcgcccccgcgccaccgccgcacaggctccggcccactcatcttcacatccggcgcgtgctccagctccgccacctcgccgctcaccaacgcgctccccgcgggcaacatctgtccctccggncgcctcgccaaaacactccccctccccctgcccggcgggaccccgcggcccgggcctcccgcaagaagtggtccgttcccggaacgcccaactac

SEQ ID NO: 14431 - DNA, 853 bp, Zea mays
  Clone ID: MRT4577_11314C.1
ctgtgcggcgctcgacgcggccgcgggacccctcgcgggcggcgggaacacatccatcctcgctagctcgctcgctctccttgcaactccagtgctgctcactgccactgccagcagatcgagctgctccgtctcacaaaccctcttgctttgctgctgcacctgcaagtctgcaaccgcgcacacagagatgtcgacgacggtgagccgtgcgtccctcgaccagaagctcgccctcgccaagcgttgctcccgagaggcgaccctcgccggagccaaggcggcagcggtggcgactatcgcctccgcgatccccaccctggccagcgtgcggatgctgccatgggccaaggccaacatcaaccccaccggccaggcgctcatcgtctccacggtggctgggatggcctacttcatcgccgccgacaagaagatcctgtcgctggcgaggcgccactcgttcgagcaagcccctgagcacctcaagaacacctccttccagggcaccggccgtccccacccggccttcttcaggccgtgagacgagacctccgtccagagctagctacctacctctttttccagtttgccaatgcaagcaccaaatgcccaccgatgcatgcctgaataaactactgtaattgcgaggctgctgaacatcgatgcgctagtataactactactactacgaggctagctgcgcgctgaacacagcgctgtaaagtagtgttggtgctagattcagaatgtgtacgtttaatttatgttattaccagttaaccaactttgtgtgtgctaaaaaaaaaaaggagcctcaaaaagtaaaaaaaaacctacgcaactatatcaaacg

SEQ ID NO: 14432 - DNA, 322 bp, Zea mays
  unsure (1)..(322): unsure at all n locations
  Clone ID: MRT4577_113150C.1
cccccattttttttttttttttttttttttttttttaccgnccaaggcctttatataaatatcagtttttacaggggccaggaccacccattaagcccagggggtttgacaaaacatttgaccaaccaggtgttttttacggggagggggtcccacatggagcccccaaatacaaagagggggggggcataatttgaaaaaagaacccgcacctgcaaattggccccaccttttttgaaaaaagaaggggacctaacttgagactaggcaacgatgaggaaattgggaaacctaaaaacactttctgtgaaaaattggcggg

SEQ ID NO: 14433 - DNA, 324 bp, Zea mays
  Clone ID: MRT4577_113151C.1
cacacaaaaaaaaatcattggggagggggacattttatttatgggctgactccatgcccacccacaaaaacgcggacacaaggccacaacaatcaaaatgggccgtgatcctacacaaaaaacctggcacatcagtagaaacagaatgcacagcccaccatgccacgtttgaaactacatatatatcccaccataacattgaccgcacttaaacccctaattacccatgcaatgacccatgcctgcgactatagaaaaggggtggtgacacatcaaacccgcgcagagagggaggcggggacaccaccgtcactgaaaactccc

SEQ ID NO: 14434 - DNA, 1049 bp, Zea mays
  unsure (1)..(1049): unsure at all n locations
  Clone ID: MRT4577_113152C.1
cggncgcgtgggtcgccatctccatttccagcatagaagacgcgatacagctcaaggacagcgctccgcacccgcacgcaagccagaccggaccgaatcgaagcagcagcagcgtacagaagatcacaccctactgccgcgctgcactgcacaatgggcatctgcgtgtcgtgcgacgcggcggacgagggcgccgcgacggcggcgcgggtggtgctccccagcggagagctccgggagtacgcgccaccggccaccgccgcggaggcgctgcaagcggcgggcgagggctcgtcgtggctcctctgcgacgccgacgggatggcgttcgagggccccgtcgcagtcgcggcggtcgcgccggggtccgagctccaggcggggcagatctacttcgtgctccccgccgagatgcagcgccgccgcctcgcccgcgccgaggtcgccgcgctcgcggtccgagccagctcggcgctcgccagggccgcggcgctcgcccagccatcgtcgccctgccgccgccgccgccggcgcggcgcggcggcgcagctcgtgttcccggtccccgaggaggagttcgcggcggcggacccggtcgcgtcgaagcccgcggctgcggtggtggcgcatcggaaacggagggtggcgtaccgcggcgggagcgggagggcgtccaggttctcccccgacctgaccgctatcccggagagcgagtagtagatggagcctgccatgtgtctccggtggcgacggctcgctcggcgctcggtcggacggtgtggccgagctcgcgcgcgccggagatcgatggagcaggaagcgttgtagacgcagagctcggggatgagaaatgtgagtagtgtttttggcgccgttggtttaggaggcaataggatgagtgttgcgttattacgaacgtttaggttttagatgcaagtgtaaatacacgggatctccgtacggtgtgcccagtgagtcacagtttggaactcagcttctaatcagtgctcgtgttcaggctaaaaaattgaaatctctcgctgtttcgg

SEQ ID NO: 14435 - DNA, 291 bp, Zea mays
  Clone ID: MRT4577_113153C.1
tgcagaatcccgcgaaccatcgagtttttgaacgcaagttgcgcccgaagccttctggcggagggcacgtttgcctgggcgtcacgccaaaagacacttccaacacccccccgcggggcgagggacgtggcgtctggccccccgcgccgcacggcgaggtgggccgaatcaggggctgccggcgaaccgtgcctagcgcaaaacgtggtgcgcaacatcaatttgatcgatttcgcacactgaaccgtgactgggacgcgcactctatcgtaacgtcacattcagcgaccg

SEQ ID NO: 14436 - DNA, 188 bp, Zea mays
  unsure (1)..(188): unsure at all n locations
  Clone ID: MRT4577_113154C.1
tgttctgcagccacgcaatagagcatngtacttcatcgttccatttacatcgcttgctcattggttcttccgcgtgatctagttgcgagttgcgcgcaatggaggcctacgtcctgttccgcgcgccaagagcagtaggacgacatctgctgcccgtcctagttgtccgcgacgcgttccacgtactc

SEQ ID NO: 14437 - DNA, 764 bp, Zea mays
  Clone ID: MRT4577_113155C.1
cattgggtacctcgaggccggccgggctcctcttccccatcaccgtcgccatcactacccctctctcctctctctcatcggctccaatggcggacgccgacgccaagtctcagccgcccgacgccgcggcgtctccggatgcctcgatctcctccccctcctccctaggtggcggcggcggcgacgcggccgacgcggacgcgatcgagaagcagctcgccggcctgggcatcgccgtcgccggtgggtcccccgagccgtcgggatgggacgatggccccgtgccagtccccatcccggccgatgtccttgtcggcggtgatgagggtgccggcgagaagccgcgggcgccggcgccggcgccgattggggcggcggatgcgaaggtgcggttcccgcgccggtccggggagccggactgcagctactacctcaagttcggcacctgccgcttcgggatgaagtgcaagttcaaccaccctgcgaggaagaagaagactagtagggtgaggggcgtcgggagcaacggcagcgggagcaacagcagcagcaataaagcatcttctcctgatgatgatcaggctcctaaagaagaatatgaaggtcttgttccagacatttcggattccatggttattgatatgaaaagggggaaactagaggcaaaggaaaaggtttgtgaagaacctgaaaaggcaatttattttacgaagttagaagagacaaatatcgcaacccaaaagggttctaaagataaaagaaag

SEQ ID NO: 14438 - DNA, 1029 bp, Zea mays
  Clone ID: MRT4577_113156C.1
tccccacctgctctctctcactcgtccccatcaccgtcgccatcactacccctctcctctctctcatcggctccaatggcggacgccgacgccaagtcccagccgcccgacgccgcggcatccccggatgcctcgatctcctccccctcctccctaggcggcggcggcggcgacgcggccgacgcggacgcgatcgagaagcagctcgccggcctgggcatcgccgtcgccggtgggttccccgagccatcgggatgggacgatggccccgtaccagtccccatcccggccgatgtccttgtcggcggtgatgagggtgccggcgagaagccgcgggcgccggcgccggcgccgactggggcggtggatgtgaaggtgcggttcccgcgccggcccggggagccggactgcagctactacctcaagttcggcacctgccgcttcgggatgaagtgcaagttcaaccaccctgcgaggaagaagaagactagtagggtgagaggcgtcgggagcaacggcagcgggagcaacagcagcagcaataaagcatcttctcctgatgatgatcaggctcctaaagaagaatacgaaggtcttgttccggacatttcggattccatgggctttgatgacaaggggagcttatctagttcagaaaatcataggaatatgtcatatgaagttattgatatgaaaagggggaaactagagccaaaggaaaaggtttgtgaagaacctgaaaaggcaattcattttacgaagttagacttagtagaaaccctcttcactagtggaggtatcgaccatcactcttcactgtaacccgatggtgatcagcgaccgtgagcttccatgttattgcgttctgataattgagacttttattatgactatgtatgagatattgtctcttattagtactggatgatgagatgtgtcttatttatgactatggatgagacttttgtgatgtaattgatgagactatggatgagacttttgtgatataattgatgagactatggattt

SEQ ID NO: 14439 - DNA, 226 bp, Zea mays
  Clone ID: MRT4577_113157C.1
tttttttttttttttttaaaccaaaacaaccccaaggggcgggggttcatttgcaattacacaaacagcacctccaatcgcagaaacacaccataaacccccctagtccaaaccatggaaaccaagggcacgaccaatcactgtaatcaaccacaaaataaccaccagctcaatcacacctaataatttgaaaaacaaggagctaaactaacccatctaccttgcc

SEQ ID NO: 14440 - DNA, 250 bp, Zea mays
  Clone ID: MRT4577_113158C.1
cccactcgttcgtgtacgcgtgggcggacgcgtgggccctccggctttccagggggaggtgctttttgtttgttcaacattcacttccgagcgtaataccctagaaagccatcaaagttttttccacgcaccaaagtttaacacccggacatgaacaggatcgcgcgctatttgccttaacattgataaagaacattcttgttcctattttaacaatctcaaaggtttactttcctatctgttgggtgtt

SEQ ID NO: 14441 - DNA, 415 bp, Zea mays
  Clone ID: MRT4577_113159C.1
gcagcgcagcaggtacacccagtcactcccgggccgccgatgccgccgcctccgcgcaaaaccctaggaggcttcgccgctatcactccaaggggcgcgaccatggtggccacaaagaagaagaagaaatccacggacagcatcaataacaagctgcagcttgacatgaagagtggtcccgcacacatctcgactacaagaccgtcctcagactctcaggaactctaagtccaagctagggatcatcgataacaactgcccgaccctccgtaagcatgaaatcgagcactatgctctgctgcccaacgtcactgtccaccacttccatggaaacatcggccaccatggaactgcctgtgacaaatacttcaggctctgctccctcagcattattgatcctgccgaccctcatatc

SEQ ID NO: 14442 - DNA, 1016 bp, Zea mays
  Clone ID: MRT4577_11315C.1
ggccggccgggatccatcctcgctagctcgctcgctctccttgcaactccagtgctgctcactgccactgccagcagatcgagctgctccgtctcacaaaccctcttgctttgctgctgcacctgcaagtctgcaaccgcgcacacagagatgtcgacgacggtgagccgtgcgtccctcgaccagaagctcgccctcgccaagcgttgctcccgaggtacgtgcgaggcacactagctctgccctcgaaccaaacaaacaagctagcctgtttattacgcaggcagtacagtagtacactgactaaactgactgatcgatgcttgtctgtatgtcgcatgcatggtctgcagaggcgaccctcgccggagccaaggcggcagcggtggcgactatcgcctccgcgatccccaccgtgagtttcctttcaccgtctctagctttctcccgtagatttaatcaggcgctgccgtacgtacgtacgcgtcgatcgtcgcgaaacggcccgtcgtcggccagcagtctctaataactggtcgtcgcttcttcagctggccagcgtgcggatgctgccatgggccaaggccaacatcaaccccaccggccaggcgctcatcgtctccacggtggctgggatggcctacttcatcgccgccgacaagaagatcctgtcgctggcgaggcgccactcgttcgagcaagcccctgagcacctcaagaacacctccttccagggcaccggccctccccacccggctttcttcaggccatgatgagatcagatatatatatgacacatccgtcgacctcatcagtcatagagcccagccagccagtcagtcagtcagcacaagcacaagcaccagagatgatgccatccatgtctgcatgtatgcatttataaaaaataaactgctaggctgatgacgcgctctaatataagctagccgtcgcgcgcgcgtgctaatcgtcctcgatgtactagtgattgtgctatttaaatatatagtttcacg

SEQ ID NO: 14443 - DNA, 378 bp, Zea mays
  Clone ID: MRT4577_113160C.1
aggaggtgcagcggccggcgcgcgacatccccgccggcgtgtccggctccgtcgtcgtcgtcaccgtgctctactgcctcatggccgcctccatgtccatgctcctcccctacgacgcggacggtactcctctctgctctgctctgctatgctctctgaaacttgactttgaagagatgccgagatcctgccgaatagggctgctatatttagagctcatctttggttgcgtaggttgccaccgcaagctagctgcatctgattccggcacccgcttctgtttgtccgcctcagcttcttcttcttttctgggattgtatgggatgttgatttgggtggggggatgaaatgaatctgccgtacgtcccgatcccaaac

SEQ ID NO: 14444 - DNA, 222 bp, Zea mays
  Clone ID: MRT4577_113161C.1
ggaaccctaaaaaaaacatgggcgggccccaattttttacaaaacggggttggtttccaccaacaacccctttacattgtgctggtttttgaaccgtgcatgtggtaatcccaaaaagttcacaaattatcaacaatgggggggagatcctgggtttaaaacattatttaactttttgccaccaaaatgttttaagacaccccttcgatttccatttgcatg

SEQ ID NO: 14445 - DNA, 678 bp, Zea mays
  Clone ID: MRT4577_113162C.1
cctcgaggggccggccgggctccccaaggcccaagctaccattcaacaccaattcaaaaccttcaccgtcgcaacttctagaagtttctgactgtctaggctccctccctcgccatgggcaacggcctctccccttgtctgtgccccgggtacgcgcgcggcgctgcggcgcggctggtgttctggggcgggtcatcgaggatggccgacgagcggccgtccatcaccgccggggacgtcatggcggagctccctgaccagcacctcgtctgcgccgcggactccttctttatcggcctgccagtcccggccctctctccgtgcgagcggctcgtggccgggcgcacctacttcgtgctccccgcggcacgcttctcctgcagccaggcgctcaccgccgcgacgctctccaagctctcgccgtcctccgccgcgaacgtgcccctcgccggcgcagcagcgtccccgttcgagtacgtcacgggctctgacggtgcgccgctcatcaggatcttgcccgagttcatcgagaaggtgatcacgtcgtgcggcggcggcaagtgcggcgccgtggcggcggagcagctgtgcagcacgccggagctgaggaagcactacatgcagctcgtgcgtgcgcgggcggagaggccgtggtcgccggggctcgagacgatatcc

SEQ ID NO: 14446 - DNA, 532 bp, Zea mays
  Clone ID: MRT4577_113163C.1
gacacacacaccagaccatgtttaccacaatccggagcccgtacttataaccaccttgctagggcggacacgagtagccgtcatgtatgaagcttaccacaagacgttcctgaaccacaacgctagcgacgaccggcactccgcacagcaagaacttggttctctcgagactaatgctgtacacggcgcctgtattggctgactacaatagcgacaaaaagcgtggtaccacgcctcatcattgcacgttactgctacatcagcgaagtgcgaacaccatcatccagccattagcactggtcactctgatagaatcacaggcaaacatgacgcggatcgcacccacctgcgcaagatagagagagagagggataacactgtcaccttcttctgcctgcgcctttttaggaacgctcacctgacatgaggacttgacctaaacgactctttttatgtctgactttagtatacgcacctgcagatctatatatgtccgtagctccaggccttgcgcgaaccagctatgtatact

SEQ ID NO: 14447 - DNA, 514 bp, Zea mays
  Clone ID: MRT4577_113164C.1
gccccggctcctcgagctgcagctcaatggcaacaagtttcattggaagatccctgacctgaaacaggacgagctgacggcagtcaacctcgcaaacaatgagctcgagggggagatcccgccgagcctcaaattcacgccgcctgacatgtttgccggcaacaccaagctttgcggcccaccgcttggtgtcaaatgcgaggcccctccgccgccgtcagcgtcgccgtcgccatcaccgccgccgtcaccgaagacaccgcctccagcctccgtcaaagaaggcaccacgccatcccaaccagcagcagacaccgtggcgtccacaggcgcgtcgtcagctgacgatgcgaagcaagacgagggccataagcccgtcgagggctccacctccacgtcgttcggcgtcctcgccgcattcattggcacgcttgggatcgccggcgtggcgttcgtcgcgctgcggaggcgacggcggtacaagaccaagaacttcggcccgaccgcgtcgtcg

SEQ ID NO: 14448 - DNA, 636 bp, Zea mays
  unsure (1)..(636): unsure at all n locations
  Clone ID: MRT4577_113165C.1
cccttccccgcgccgccttcctctgtcgtctccccgaccctgcattctcctctctgggaagattcaaatcccccacgggccacggcccacgccacgccatctctacccagccacggcgagcgccaccggccccgccgcgccgcaagaactctaccgtaacgtaaccgagaaaccccgccgccggcgcgatggactggtactccgacgactcggaccccgacatcgacgaggacctgcgggaggacctcgacgcgctgcgccgctcctgcatcctctccggggccgacccggacgctgccgtagcgcaggtctcctccggcctcgcgggcccctccaccccagccctcgccgcggcgccgggggcggcggccgaccatcatcatcatgcctcctcttcggacgacgaggaggacgaggacctcgccctcgtccgcagcatacgcgccaacctccaccacctccataatagtaaggcctcngaccgtcctcccggacgccgcccccgcgccccgggaacgacgacgacccgtcctcgcgcccgatctgcacgtggcncgccgtccgacactgacgaggaagaggatgacctcgagacgctccgcgccatccagcgccgcttctcgcattaccagtcaa

SEQ ID NO: 14449 - DNA, 253 bp, Zea mays
  Clone ID: MRT4577_113166C.1
cccacgcgttcgcccacccgtccgccaatccttccgggattccggaaaaattggccaaggggaggaacacacacggccacaaccagttttacaaggcccacaagaccggtataaagaagccaaagcgccaccggcagaccttcaccaagggtatggaccccaagtttctgaggaacctgatgtattcaaggaagggcaacaaaaagagttgtgggtctgaagaattaaaaagaaaacatggttgtttttttta

SEQ ID NO: 14450 - DNA, 352 bp, Zea mays
  unsure (1)..(352): unsure at all n locations
  Clone ID: MRT4577_113167C.1
aatttccggtttgacgagctcacccctccggagcccgccctaaatttatattttttgtgacccctttaacatcttnnncggtttttaaaacnacgcttttcggttcaactcctttttttttatttttggcccatcaccaaaccccacccctgttttcctcaatctcttacatcattaacctccaactttgcacataaaccatttctcaaaaaaattcaaaaccccgttcttatttttgcaaccccttccattccttccccaaaaaaccccaaacaatcctgataataaacacccccacttttaaacccccctgtatggctaatcccccggccatgccccccctcccaaaaac

SEQ ID NO: 14451 - DNA, 411 bp, Zea mays
  Clone ID: MRT4577_113168C.1
gtctctattttattccttgccccctgaagattatgtggctgcaacccttgttcttgcgggagatggccggtacttaaacaaggaggctgctcacgatatcatcaagattggagcacggaaagggatgttaaaaagatcatagtcggcaggaatggactactgtgaacacctgctgaagctgctagaaatacgtaaaagaaaagccaatggcgggtttatcatgagcgcaagccataattcaggcggaccagacaatgactggcgaatctagtttaactacaggagcggacagcccgcaccggaaacgattactgatcaaatttaggggaacacactatgaatagctgaagtgcaaacagccgacattcctgatactgatttgagctttgaaggagttgtgagctatgggga

SEQ ID NO: 14452 - DNA, 304 bp, Zea mays
  Clone ID: MRT4577_113169C.1
agcgtcgttaaacttctaggttaccctggccaggagggctgccagctgtgacagttccaaagtcatctatcattgaacccaccctggggcagataggcactggctatgccccagcgctggactgccacacctcccacattgctgtcaagtttgctgaactcattaccaagatcgacaggcggtctggcaaggagcttgagaaggagcccaagttcctgaagaacggtgatgctggtatggcgaagatgattcccaccaagcccatggtggtggagacattctcgcagtatcctccccttggtag

SEQ ID NO: 14453 - DNA, 414 bp, Zea mays
  Clone ID: MRT4577_11316C.1
caaattcctgtcccgcacatctgctcgtcgcccagcgaacctgatggcgctcgtcggggcgaaggccgccggcgcgtccacctcaaccggggccgttgcccccaaggggggacacctggtggttcctcgtcgtcctcgacggcgtcgagacgcccatccacgaggggacgctgtacggaagcgccgggggcacagtcaccgtcaccggccctggccagctctccgccgacggcctcgagagcgtcctggtgcgcggcggcgggaccgggaccggcgccgtgcggttcacgctctgcgccgacgcggctgccgagggcgtcggcgcggcgtgcttcgagcggtgcggcgcggcccgcgtggagggcgcgcgcgaggtgtccgtgtcctcgtgccgcgccgtggaggtggagcgcg

SEQ ID NO: 14454 - DNA, 255 bp, Zea mays
  unsure (1)..(255): unsure at all n locations
  Clone ID: MRT4577_113170C.1
tccactcttcaagtataacatctctgctaatccaatcgaaactttaacctactctctcaaactctagaggacaatcaccaaagacgacgggatccanancctatctcacaactattatttatataccatggactacactgaccctccttcatcgccactgatcaactcaaacgatctctttcctatcattaacacccctaattccggttatacacacctctttcttacatacattccacacaacattcaacacaa

SEQ ID NO: 14455 - DNA, 128 bp, Zea mays
  unsure (1)..(128): unsure at all n locations
  Clone ID: MRT4577_113171C.1
acatttgtgacccacgccacactactncgctacggcaggatgatccaatgaaaggggtggatcttcctgcttctccctcttaccgtctctctctcacacctggcgcaaacacagcccacctgcgccat

SEQ ID NO: 14456 - DNA, 493 bp, Zea mays
  Clone ID: MRT4577_113172C.1
gggctgggaatcccaaagggtaaacggggcaaaaggataaaaaaaaacttggtttccccccccggggaagaaacagaaggggccaaaaaacaggcccaggttttgggggaaaaaaaaaggccaattggaaccaaaattcggggaacgggccccttttaagggaattaaaaaaggccgggtccaaaaaaaaaaaaacccaggggtttttttcccccccaacccaaaaaaagccctggagcgggccttggtcgctaaggggctttccccggaattaaccctgggagggggttaaccccccaattggggcgggtttccaaaaaaacccaactttttaaacgggcccttgggggggaaaagggaccgggccggaggggggtttaaccctccaaggggtccttttaaaaaaaaattgggcccggcccccccttaagaaccccttttaaaaaaaaattgggggggggagggcgcccaattttaaaagggggttgtcccc

SEQ ID NO: 14457 - DNA, 391 bp, Zea mays
  Clone ID: MRT4577_113173C.1
tagctattgcgcaggctgcgccttttttaacaagtataacagccagactggggtagcacccttgagagatacctcatttgctctacgaggtgctctaggcagttcaagctcatacctggatcaagacaacagctacacgtcttccactgtagcagctctgtgaccaaagatgtatgctactactagaaatcgactcctacactcgagttgccccctgtcatattctgtatcataccgaccgttgtcgacgtaccttcgtacgtagaagccacacatcagcgcgactttcttaatgttgtattgtatattctttgttgcgtagggaagtgccatattatatttttctctcgtcaccaaagtaagtctaaggtttggtgcttgagatcaattt

SEQ ID NO: 14458 - DNA, 235 bp, Zea mays
  Clone ID: MRT4577_113174C.1
gcgtcaggcatcctcctatactatgactgttggttggaatgtgactacgaacgactcgtcagggtccggtagagcgacctgcacttgattacgaacgggacggttgcgccatcgccatcgaccctgaaagcggtacaggaaaccctggaggccaccgcagctgtcgaaaaaatcaccgggttcaccgctacgcggatccccttgtactaccccttctgcctcaacggagtcagca

SEQ ID NO: 14459 - DNA, 1581 bp, Zea mays
  Clone ID: MRT4577_113175C.1
cccacgcgtccgcccacgcgtccgcttctgacaaagaaaaaggaacagttcatgcagatatgtggtctcttgatcctcgtacttgggagtggaataaggttaagaaggctgggatgccgcctggtcccagagctggtttttcaatgtgtgtgcacaagaaaagggctgttctttttggtggtgtggtagatatggaagttgaaggtgatgtcattatgagcatgttcatgaacgagctgtatggtttccaattggataaccaccgatggtacccgctagagctcaggaaagacaagcctgctaaaatcaaggcaaggaatatcaaaagaaaagaatcaacgaatgatgtagaagctaatattattgatgatgagggtgatgaggtcatggtggacgtagaagaagctattgaaggacaacctgaagtcaatggagtttccaatcagttgatcaaaactctgaatatcactaaagatggctcaagcagaagcattgatgttctctctgattcaacagcacaagaatcatttttggaggcggtgaagcccagtggtcgtatcaatgcatgcttggccgtagggaaagatatgctctacttgtatggaggaatgatggaagtgaaagatagagaaattactcgtccggatctatattcacttaaccttagcaaacttgatgagtggaagtgtatcatatcggcctcagaatctgaatggttagaaatttctgaggaagaggatgatgatgatgatgatgatgagactgatgatgatgaaaatgaagagggggatgctagccagacagatgaagatgaagaagagtctgatgaagatgctgcaaagaacgtgtccagtgctgtgtctctgctgaagggtgaaagtaagaccatgcgtagaaaagagaagcgtgctcggatagaacagatcagggtcatccttggcctttctgattctcaaaggactccagtgcctggagaatcactgagagatttctacaagaggacaaatatgtactggcaaatggctgcctatgagcacactcaacacactggaaaggagctccgcaaagacggttttgatcttgccgaaactcgattcaaggaactgaaaccgatacttgacgagctggctgtgctggaggccgagcagaaagctgaggaagaggccagtgcgtcgactagttccaagagggacaccaagaaacccaagcagaagagcgcacgaaggtagctttggttctgaacgagtgtgtaagcggaagccagctttagatgaagttgctccaggaagaggccagtgcgtcagctagtcccaactcccaaggtgtgaagaggggacaccaagaaaatccaagcagaagagtgcagggagatagttttggttctgaacgagtgtttaagcgtaagacggttttaaacgattgctccaaatgctcaagttccttagaggggatttccattttctttttgaacccaagtagacaaaattgatatttgttgttttataatagtgtatgtatatactcgtacgttgaaatttgaattcatgtgcaatcttgacagtatattctcccactagactc

SEQ ID NO: 14460 - DNA, 278 bp, Zea mays
  Clone ID: MRT4577_113176C.1
catcactccactccctccatttccctcaccttccgtagtagctagccgccagccattaaccgaaccaaccattcaattcacaggccacagtgagcgagtaaagcgtctaatggttgtgatggtggccgttcatcagcagtagctgcagcagcgcctgtacgcgtaggctgagctcaacctgcccccgggcatctggttctatccgacggttgatgagctggtcgtgcactacctctgcgcgcttgcctgcgggctgtgcttgccggtgtccatcatcg

SEQ ID NO: 14461 - DNA, 644 bp, Zea mays
  unsure (1)..(644): unsure at all n locations
  Clone ID: MRT4577_113177C.1
naaaacatatcatatttcatatgcgactgcaaggggacaaatcgcgttcacaaaacatacacaactaattattggtacattcacacgtcactgccagaggaaaggaagacggacctcacctcacctgaccatcgcgaacggcggcacatgaggacggtggctctgagctggagctccctgggctcgctcgtggccacggccgtggtggtgcgcacggcggtgcgcgacgtgctcccgccggaggcgcaaggcgcgctgcgggcgctcctggcgtgcgccgcggccgccttcgcccagccgtccgacaccatcgtggtccacgagacggacgccaacggcgtgcccaacgagctctacgacgcggcgcagctctacctcggcgcgcgctgcctcgcgtcggcccccgcgctgcacctccacaaggcgcacggcgcgggcgacgtggtggcgtcgctgccggacgaccacaccgcgcgggacacgttccgcggggtccgcgtcctgtgggcgtcgcggcgcgcggagtcgagcggcggctactccccgtccgggttcggcggcggcgggggcgggagaggaggctggtcgcgtgggttcagctacccggtcggcggcgggcaccagcagcagcggtgcctcgtcct

SEQ ID NO: 14462 - DNA, 219 bp, Zea mays
  unsure (1)..(219): unsure at all n locations
  Clone ID: MRT4577_113178C.1
ggcgggcgttaaaaaaaaaganataaaaatagaattaaataaaacattattatttttatttaatacaagcataagcatcttgcggtgacttatccatgggggacgaggattacaacaaaattgacattgtctatgaggattagcccccacaaccgtagattatgaaataacattaattttaactttataacaactaatatgcccctgatgacgtcatac

SEQ ID NO: 14463 - DNA, 727 bp, Zea mays
  Clone ID: MRT4577_113179C.1
atctcctctttacctggccagccagccagccttctcgggtaagctggctgggactagtagcagcagcagtagtgggagcaggagctgcttggcttgctgcctttcacgtccacctacgcgggcgtgaggcgtggaatccaaacaatggcgctgggatccgcggatctataggcgaggcgaggcgcgggatgggatctgggaccagcaaggccgcttcgccggcgccggcgccggccggcggcgaggccaaggcgcggaatgggaagccgagggggaagagcctgatgcgcctgcccagctactcctgcttccggggcttcacgcccgattgcgacccttcttcttcgctgccggcgccgccgccgccgccgctaggggtcgagtcaagcaagggaggggcgacgcctaaactcactcacattggcatatcagatgaagatgcttcgtcggctcctaaatcgaatccaagtgaagtcagaacgatgcctttgtcagataccgacagagaccaagatgatgatgtattgcagaatgtcactgctaccaggaccgcagtcgacgatgaccaatcaccaaatccttctgaccggccgcgtccatgctttggtgtcaactttgggttgagtagagccgtcagcttgggttcatcagtggcatgctccattatgtcaaacggtctctcctcttcagctaatcctagtattggaatgtggaccatccttccgat

SEQ ID NO: 14464 - DNA, 285 bp, Zea mays
  Clone ID: MRT4577_11317C.1
cagtctgtacatatgagttggaatcaaccaggccaagcatgctttatttatctcatttgtataggatggacataatgcgctcaccttggagagaaactaccccaagattctacccatggatggtagctgccaacatggggaaactaccccagatgaatcatagtgtatcacaaattgagatacaagagccatgcatttgatatcagaagtcgacgagacactggagtctcgtcttcacaaaggcttatgaggtctgtatcgtgtagcttagttttgatgccgata

SEQ ID NO: 14465 - DNA, 425 bp, Zea mays
  Clone ID: MRT4577_113180C.1
catgcggtccctaactaaggtagacgagcgcgcggcccgggccacacaattcttcgaagccctccgcgcgcgaccccaaacacaagaagaggcgacgcacggtaaacccaaccaacaaggcgaacaacacggcgctgcagcacaagcgaggggggagaacgtggtctctgaggggacgaagcacaaggacaccataaccaccaccatatccaatcgattcacgaccaagggctgactgactgggaggactatcaaggacctgacggggcgccgcatgagcccgccagggacatcttactgaagcgagcagagcacaccaggggagcaaacagctaagggcggaacgctgttgccgggcacctcggtaggagcatggccgccggagaagaggcggcatccgtgtacaaagagctctacgacgacga

SEQ ID NO: 14466 - DNA, 343 bp, Zea mays
  Clone ID: MRT4577_113181C.1
aaataagctgaacaggatcaaatagtcactggtctgaataagctgagcaacttcctgtggaagcaggcctagaaccgcttctgtccccttgttatccagtcgctgccgcacaccgcgcttctgctggtagccgctgcggaagccgggcgtttggggcggctacacggattctggcgcccagaagccgtaagaatccgaaccaaacacagccttaagtaggttggcaggttgctaggttagacagctgctcctagaagtcccatatatttctgccgctattgctccaacccagtgccagtttggtagcacgccaaatgtgatgccgttgcgagaagaagagtaa

SEQ ID NO: 14467 - DNA, 489 bp, Zea mays
  unsure (1)..(489): unsure at all n locations
  Clone ID: MRT4577_113182C.1
cgcagnagggaagaagatgatcattggaagcaatcagtttacttcttccccaccacagtggttaaaaggcgtttgtatctgacactatgtgtgtgttttaaaataaacttttggaaacatgaaaaaaaaaaaaaaaaaaaaaaaaaaaaaaaaaaaaaaaaaaaaaaaaaaaaaaaaaaaaaaaaaaaaaaaaaaaaaaaaaaaaaaaaaaaaaaaaaaaaaaaaaaaaaaaaaaaaaaaaaaaaaaaacacaaaaataaataaaaaaaagcaacttaaaaaaaaaaacggggggtggattttaaagaaccgtagttttataaaatcgccttgggaaaaacatttttttttcctggtggaacaaaattaaataacctcccccttttttcacttggcggcatttggaaaaaccccttgccaacccgtcattaaccctgtttggcaaatttcacttttcactggggggcgatttaaaaaagggggtaaagg

SEQ ID NO: 14468 - DNA, 142 bp, Zea mays
  Clone ID: MRT4577_113183C.1
gttattgaaatgagatttctaagttatcaggatcaaaaacatatgctggtgcaacgctctcctcccaatatgattccagtgtaacccaacattaaattgggaggagagcgttggaccaacatatgttattgaaatgagattt

SEQ ID NO: 14469 - DNA, 256 bp, Zea mays
  Clone ID: MRT4577_113184C.1
tttttggtttttttaagattttttttcctagatttgagcccaaaaaaaaacatagcttcttggggagcagagggacctacataccttcaccctaaaggggaaagggattaaaccctttaatctaaacctgtttaacaggtatgtaaaaaatgctcgctggttgagccaaggtaaaaaaaaaagacatttggcccgtgactcaaatgtaagaaaaggcatccagtaatggagctctactttgaaacccgctcgaact

SEQ ID NO: 14470 - DNA, 837 bp, Zea mays
  unsure (1)..(837): unsure at all n locations
  Clone ID: MRT4577_113185C.1
cctcgcctctcctctctcttcccgcagcggcagtcgacggcaaaaccctagatccctctccctcttaaaccctctacgaggtaacgtttcttgcccggagattagagctttggctctagatctctcttctccccgtttcctcgattggttcgggaccttccatacgaccaatttcgtggtgtatattggctgctgcctgtgttacagtgcgggaggatgtcggagccttccaaggtaatccacatccgcaacgtcgggcacgagattgccgagtctgatctccttcagctgctgcagccgttcggcgtggtctccaagatcgtcatgttgcgtgccaagaaccaaactcttctgcagatggaagacatacatgcttccgtgagtgcgctgcaatattacacttccgttcaacctagcataaggggaaggaatgtttacatgcagttctcatctcaccaagagcttaccacagaccagagctcgcatggaaggaattctgatcaggttttcaagctcttattcagtttcactcgcgccaagaagctgtggaagcatttggttctttgcatggaaggaacatatatgatggttgctgccagctagatattcaatattcaaagtatgagctgtagcctatcacattttanatttgttctcactttctacaacttaatttttttcttggtttcctttacccgaaatccagtctcagtgaactggcagtccattacaacaacgaccgatctagagatttccaaatccatcattacctacagaaaacacgccctaggggctctcagcaagcttatccctgatcagctaatctctatgcctttc

SEQ ID NO: 14471 - DNA, 131 bp, Zea mays
  unsure (1)..(131): unsure at all n locations
  Clone ID: MRT4577_113186C.1
agcgcatctatagcaaccggnccaacactttttcgctcagcttcagcaaggggtgccgccaccatggcgaactcctccacggggatggccggcacccccatcatggcgaggtaactatggcaagggccgca

SEQ ID NO: 14472 - DNA, 436 bp, Zea mays
  Clone ID: MRT4577_113187C.1
cggaatgaccgacgcgacccacgcgatcgcgccaaccttacatggccgtcacgccgctacagccgcctcagctccaagggagcccaagcgaaaccactctgcagaccaccatgaactatgccagctagctggttacagtgccgccctcccgcgtgtgcacgaccaccgcgtaagaggtagtcgccttatgaccggccaagaacagcggctcgctcgccgctgcacgccagcgccaaggatcccatcacggagtgagggcagaagtcaatgaatctggaagtgcatagactgttgatgcactctgacgaagctgacatgatctgcttccaagacttgatcgcaacagtgacctttctgagagcacatgacaggctgcagtgactacagcttcgatgagcacgaagtatagagcagatatcactgtagatgatattga

SEQ ID NO: 14473 - DNA, 896 bp, Zea mays
  Clone ID: MRT4577_113188C.1
cctcgaggctctgccgggattttccggccgggccccctactgacctacccctccacttccctaccctactctcccccctccctctctcttccccgcctctcctctctcttcccgcagcggcagtcgacggcaaaaccctagatccctctccctcttaaaccctctacgagtgcgggaggatgtcggagccttccaaggtaatccacatccgcaacgtcgggcacgagattgccgagtctgatctccttcagctgctgcagccgttcggcgtggtctccaagatcgtcatgttgcgtgccaagaaccaagctcttctgcagatggaagacatacatgcttccgtgagtgcgctgcaatattacacttccgttcaacctagcataaggggaaggaatgtttacatgcagttctcatctcaccaagagcttaccacagaccagagctcgcatggaaggaattctgatcaggagtctgaacccaaccgaatcctcttagttactatccaccacatgatctatcctataacggtggaggttctacatcaagtattcaaagcttatggatttgtggagaagattgtcacatttcaaaagtcagctggttttcaagctcttattcagtttcactcgcgccaagaagctgtggaagcatttggttctttgcatggaaggaacatatatgatggttgctgccagctagatattcaatattcaaatctcagtgaactgcaagtccattacaacaacgaccgatctagagatttcacagatccatcattacctacagaacaacgtcctagggcctctcagcaagcttatcctgatccagctaatctctatgccttccacaagctggagttcatatgcacagatggggaaggctgcaatgattgctgc

SEQ ID NO: 14474 - DNA, 2120 bp, Zea mays
  Clone ID: MRT4577_113189C.1
aattttcgtacgatccgatgaccaccatcggcggactcgtccctgcaccacacttgagctatctcgcgcgtgcactctcgcagtcagagagtcaatccacaaattggctacctcgagatcctttgcttggtggggctccacttccctaccctactctcccccctccctctctcttccccgcctctcctctctcttcccgcagcggcagtcgacggcaaaaccctagatccctctccctcttaaaccctctacgaggtaacgtttcttgcccggagattagagctttggctctagatctctcttctccccgtttcctcgattggttcgggaccttccatacgaccaatttcgtggtgtatattggctgctgcctgtgttacagtgcgggaggatgtcggagccttccaaggtaatccacatccgcaacgtcgggcacgagattgccgagtctgatctccttcagctgctgcagccgttcggcgtggtctccaagatcgtcatgttgcgtgccaagaaccaaactcttctgcagatggaagacatacatgcttccgtgagtgcgctgcaatattacacttccgttcaacctagcataaggggaaggaatgtttacatgcagttctcatctcaccaagagcttaccacagaccagagctcgcatggaaggaattctgatcaggagtctgaacccaaccgaatcctcttagttactatccaccacatgatctatcctataacggtggaggttctacatcaagtattcaaagcttatggatttgtggagaagattgtcacatttcaaaagtcagctggttttcaagctcttattcagtttcactcgcgccaagaagctgtggaagcatttggttctttgcatggaaggaacatatatgatggttgctgccagctagatattcaatattcaaatctcagtgaactgcaagtccattacaacaacgaccgatctagagatttcacaaatccatcattacctacagaacaacgccctagggcctctcagcaagcttatcctgatccagctaatctctatgccttccaacaagctggagcttcatatgcacagatggggagggctgcaatgattgctgccgcatttggtggaactttacctcatggagtgactggtaccaatgaacggtgcacactcatagtcagtaatctgaataatgataaaattgatgaggataagctcttcaatctgttttccttgtacggaaacatagttcgtatcaaggtactgcgtaataaaccagatcatgctcttgttgagatggctgacgggttgcaggctgagctagctgtgcattatttgaagggggctatactatttgggaagaagctggaagttaactactcaaagtaccctaacattacacctgccccagacgcccacgactacttgaactcgagcctaaaccgattcaacagcaacatggtaaaaaactaccgacattgctgctctccaacaaagatgatccacatctctgccctcccccaagagatctctgaggaagcaatcctgaaccatttgtctgagcacggtactgttgtcaacaccaagctatttgaggtgaatggcaagaggcaggctctcgttttatttgagactgaagaggcagcgaccgaggccctcgtgtcaaagcatgccagcacacttgagggtaacacgatccggatctctttctcccagatgcagagtatataagccacctcaagggaaagctcatgccgccctcgcttaccacccggcgagcactatttaggaagcatttcagactaagatgtgaatcctctgcgccattctccaagacatgctgtctgagctgtacctccccctgaccttcgggttttcttttcactctacactggccttgcaccaaaaggtttctgtgtttctttccaaatcctgttggctaggttatcaaaggacatttaccccttgtcgtgatattctgagttggaaggcctgttaattgtgtgaatcgtattatccttttgcctggacgctatttgccttgttttatatttttttcggtgtaattgttgcactggacttacttgcaaaaaaaaaaaaaaaaaagcggccaaaaaaaaaaaaa

SEQ ID NO: 14475 - DNA, 271 bp, Zea mays
  Clone ID: MRT4577_11318C.1
tctgctcgagcagaaggtcgccgctgtccccacgtcgtcgcggccatcaaaaccgcctacgtcctcgggtgcgagctgcgcatcctgagcgatgccaacgccttcttcgtcgacaccatcctcgctcaccacggcctcgccgactacttctccggcaccgacactaacccggcccacgtcgacgccgccggctgcctcaggatccgcccctaccacgagttcggcgccgccgcccacggccacggatgcgtcctcccgacctgcccgctca

SEQ ID NO: 14476 - DNA, 2051 bp, Zea mays
  Clone ID: MRT4577_113190C.1
acgaaggtggtctatgcctgcccaatcaagcgctcgcctgactcaggagtcaggagtcggggtacaacaaggcgtcatcactatccttttctgctgaatccagaagacaaatacactactactgccgtgcccccctcccttctctctctctctcgccgcagcgtcagccgacggcaaaaccctagatctctctccctcttaaaccctctcaacaagtgcgggaggatgtcagagccgtccaaggtaatccacatccgcaacgtcgggcacgagattgccgagtctgatctccttcagctgctgcagccgttcggcatggtctccaagatcgtcatgttgcgtgccaagaaccaagctcttctgcagatggaagacctccatgcttccgtgagcgcgctgcaatattacacttctgttcaacctagcataaggggaaggaatgtatacatgcagttctcatctcaccaagagcttaccactgaccagagctctcatggaaggaattctgatcaggggtccgaacccaaccgaatacttttagttactatccaccatatgatctatcctataacagtggagattctacatcaagtattcaaagcttatggatttgtggagaagattgtcacatttcaaaagtcagctggttttcaagctcttattcagtatcactcgcgccaagaagctgtggaagcatttggttctttgcatggaaggaacatatacgatggttgctgccaactagatattcaatattcaaatctcagtgaactgcaagtccactacaacaacgaccgatctagagatttcacaaatccatcgttgcctacagaacaacgtcctagggcctctcagcaaggttatcttgacccagctaatctctatgccttccaacaagctggagcttcatatgcacagatggggagggttgcaatgattgcggctgcatttggtggaactttacctcatggagtgactggtaccaatgaacggtgcacactcatcgtcagtaatctgaatactgataaaattgatgaggataagcttttcaatctgttttccttgtatggaaacatagtacgaatcaagatactgcgtaacaaaccagatcatgcacttgttgagatggctgatgggttgcaggcagagctagctgtgcattatttgaaggggtctatactatttgggaagaaactggaagttaactactcaaagtatcctaacatcacacctgctcctgacgcccacgactacttaaactcaagcataaaccggttcaacagcaacgtggtcaagaactaccgacattgctgctctccaacgaagatgatccacatttctgccctccctcaagatatctctgaggaagcaatcctgaaccatgtgtctgagcacggcactgttctcaacacgaagctattcgaggtgaatggcaagaggcaggctctcattttgttcaagagcgaagaggaggctaccgaggccctcgtgtcaaagcatgccagcacgctcgagggtaacacgatccggatctctttctcccagatgcagagtatataagccacctcaagggaaagcccctgccgtcctcactcgccccacttcgagctctatttaggaagcatttcagactaagatgtgaatcctgtgcaccattctccaagactgatgctgtctgagctgtacctcccctgaccttgtttttttttttcacgcaacactggactttcaccaaaaggtttgtgtttctttccaaatcctgttggttaggatatcatttactccttaatcttcatgtcctgacattctaagttggaaggcctgttaattgcgtgtgaaaaaaaaaaaaaaaatgcctgtttggcatgtttaatgtaccctctagtgcagctgaaacttacctgcaactgcgattgcgattgacttattatgagcaattgcgatggtaggctaggtgttacaagagcctcatgagcgaatattcaagaattaagcctaggtacctgagaccccttatttgagcgaatattcaagaatttgagcgtatattt

SEQ ID NO: 14477 - DNA, 282 bp, Zea mays
  Clone ID: MRT4577_113191C.1
atgtgactgacaccatacatgaaatgctatggatcaacaaacctcaaattgagggggagagatgcggaatccacttatgctaatggtcacatccgagcattgactagcactagctcaaggccgtatgtattttctgtacagagacctgtcaatctcacaaaccatcagccgtggccttcacggcatacaccttcttttcggactgccactggttcgaatacgagatgcagttcttgctgcactcctgcagatggaagctgcggctgtcttgcaggctcctcg

SEQ ID NO: 14478 - DNA, 571 bp, Zea mays
  Clone ID: MRT4577_113192C.1
ggccgctttttttttttttttttttcctttttttttttttttttttttttttttttttttttttttttttttttttttttttcggtttttttttttttttttttttttttttttttttggggagaaacaaaggtttgttttttgccaacaaataacacacatgatgggatttccacacccacccgggcgatatgacaataatccccctttttattagccccagttttttataaaaacccatggtggggggcgggcctaccaagcacccgaaaccgaggaaccaaaaaaaaattcatgggttggcaaaaacatgacttggggggagccactttgttacccccccttccaccaacgcagggaaaaagtttggaataaaaatggaatcgcccccccctgatgaaaaaaaaaaagggcaacgccgcaagaacagaaaacccttccacccccttgaaaggggccccgaaaatcttttttttgggggggggaacaggggaaaccctgggcttggggttctggaaccacttgacccccccgagggcgtgggagaaaaaaaacccttgggggaacgggg

SEQ ID NO: 14479 - DNA, 194 bp, Zea mays
  Clone ID: MRT4577_113193C.1
ccagcgccgagatggcgctcaaggcgccttccgatggcaatgcgaagaaacggaaggctagcgggaaggggaaaggcaaggacggccccgggtccaccgccgccaccaaggaggagtccagtgggaaacggtgcaaatcggcggaggagagcagtggcgcggaggagaactccggcagaggtagggccgccgcg

SEQ ID NO: 14480 - DNA, 473 bp, Zea mays
  Clone ID: MRT4577_113194C.1
caaatttatattattttattaagtatcttaataatctcaaacataaacattcaaaactacaaagtaaactattattgagagctaaaagtatcttcattgataacataagaatattgtaatatgacaggctttagtacataattgttatattgctaaaattttatattgttgttttaaacatcttaactttcttaaataaaaaacttaaaactagaaagttgcagatatcttcgagatctataggtttcatataaaaatcatctgtagccaatgttgtatcaaagagttataatttttttaagattttgccttgtcacatcacttctggtggtgcggttaggtctgttcatttccctctgctaatttaacacctatcacatcgaatatttagacgttagttagaagtgttaagtatacaaaactaattatatagataaaaattaaatgacaagacgaatctatctagatcgcga

SEQ ID NO: 14481 - DNA, 981 bp, Zea mays
  Clone ID: MRT4577_113195C.1
aaatccattcaagataaattttattgcttactgaagccctttcatacaactgtaactgtgttgagtatctcctttaattttgtactacgctataagatagtgaagtatgatgtaaactgtttttcttttggaatctaatctctaatccttttccagcaatattgtacaaatagattgcttattttctatcctttgctatgtccgtccctaaatgtttttgtggcctgctccaaattgccttttgctctccaaagctgccaataggagcagattgcttatggttaaccaaagaatttgccaggtggtcgtaatatgctccagtattcaaactatacaatacatccactggctttgcgctcttcttgaccaaaataagcccatttatgctttcggttgtgttggcaacaatgcatattgacttcacttccacagagggctccaagttagatccttggaccatgtaaactgcgccaagaacttctccaagaaatatgtccatgtggtgatagaatttccgttgttccctctggagctgctggagcagcaacagcaaacggcggacaagctttgactcgggagtatgctgggtgtgttgcttcagagctccgaggacgccctcaaatgaagcaaccttccgctgcacgttgagagggatgagcgtgatattcagaccagattctagcaccgtctttgcggccagcggatccaggaacatgttgaactccgcgtatctgttggagggaacggtgaacacgtttcccctgtcatcacctccatctctaaccactccaccgacaacataaactctctctatgacagagccggcgtccatgtcagacagtgaaataatgctggctagattggtaagaggtccgctggtaagagccgtgatcttctggcctggaccgagctgcttcctaactgaccgccaaacatcgaaagcgctcgggtgccggcgctcgggatggtctacccggccgg

SEQ ID NO: 14482 - DNA, 428 bp, Zea mays
  Clone ID: MRT4577_113196C.1
gtgtccaaaatccgtgcgcgggtttagagccgctttgttgtattggggcggaaaacaaaaagggggggagaagaaaacccaaaggggacacaaggcccgggtgtctccaaacaagccgggggggaaaagaagtgccccccgggcaaaggggttagtgggaggcgtgggggtgggggacgggggggggctggggcccctgggaagaggggggggaccgacccttaaggctgggggggtttgcctttcaccggcacgcccggccgtagctggcaaggggcctggacctttaccaggcggccggcgccggccgggggctccaccttggggggcgggctccccctttgggggggaagccccctgccggcgggcgcggggagggggtcctggccctgggagggggcccgggccaggaacccggggccctcccc

SEQ ID NO: 14483 - DNA, 795 bp, Zea mays
  Clone ID: MRT4577_113197C.1
ctgtctgcatcgcatccatccatccatccagggctggccaccgtacgcctccttctctcccgtctccggcaacgaccaactccggcggatcctcctcgctcctccgccccgccgcgcattcttcagtacagggagaagctaagcaggagatcagcaggggactaaggaggagacttgatcctaccgacatcaggactgggaagatgggtttcctgtcactgctcgtcgtggcttccatgcccatcgtccaggtcctgctcatcggcgtcatcggagccttcctcgcctcggggtacagcaaggttctcaccgccagcgctcgcagggacatgaacaaggttgtttttacagtcttcaccccgtctctcatcttcgccaacctcgccaagacggtcacactgtccgacgtcatctcctggtggttcatgccggtgaacatagcaatcacattcctggttggcagtgctctaggctggctagcgtgcaagatcctgaaaccgccgccgcatttccgtggcctcatcatggccttctgctcagcaggaaacctcggcaacctgctgctgatcgtcgtcccggccgtctgcgacgaagacggcaacccgtttgggaacgaccggagccagtgccgctcgcgcggcctctcctactcgtcgctgtccatggctctcggtggcctcttcatatggacgtacacctacagctttgatgcagaagtccggcaaactgtaccacaagatgcagtccaagagcgtccagtgccccgccgacagcgacgaggagcatctccaggga

SEQ ID NO: 14484 - DNA, 321 bp, Zea mays
  Clone ID: MRT4577_113198C.1
tccggacgatcacactcgcatccgatctattgaagatgcaatgcactccttcacgtatagggagcctctctacctaacgaatagcatcaagctaactacaaacctaccttcagcatgtgtctactagctaatcatatcgtgtgtacgagtatgaaagatgatgtactgtcaccaactcacttgtgtatgataaaggatacatgataagactatcactactaaaaaaaacatataaagaaagagcataaccaacttaaaatgtaaaaagctaaagtagaagaaaaacctaagatcaatatgaataaaaaggacgtcctcatc

SEQ ID NO: 14485 - DNA, 906 bp, Zea mays
  Clone ID: MRT4577_113199C.1
atgaacatatttattttgtgtctttcctttccaaatagggaatgcctcctagaatttagggaagctgtgtcaaccctgatatttgctgccatttggtatcctgatttacctaaactttgtgacctaaggcacatattcgcagagagatatggaaattttgttgagcattttgttggccaggaggtctttgcaaaaaagacagtaaagttctctgtgttggacgcgatggggctctcatccaaacctctccacagaggggtgaaacatgacatctcttgtctgtctcaagattcgtatggtccatacattgctgcgtcatgtatggataacattttgagacatgacttcaagttcttgaaggtagagaacttgggaaatcaattggttcaacaaaaaggaaagcccaagatagaagtgtatgaaaaggacaggaagaagggtgctggggctttaacaactcatgctagggcggtcggacttgggtacaaatctgtagcacactttctaattgccaagcataataacaaacaagtgcccactgatatagtgcgagagccagagcagcacgcctttgcacagattgttagcttcttagtggatttgtgggaagatggtggctcagatgatggatatgtacttgttaagcaggaggatgttgttgatgagatgacttcatttatggctgcatgcttggtgtcaattaaaaagaccaaggacctgccccctgatcaacttcaaaaagcgcttaggaagacgttttcagctgaaaagaagaaaagtaaaatccggaaggcattggatggaactaaagtcatttataatgttgcttcatggggcgccactgctgttggctgcgttttgcttgagaccatttgtttagtctatgcagatgagttcgactgctaa

SEQ ID NO: 14486 - DNA, 400 bp, Zea mays
  Clone ID: MRT4577_11319C.1
agggggggggaggggggcgcgtgacgctgctctggtgtgcacgcaatggagggccgtccggccgtctagcaagcaggaggcggagttttttctgcttctattgctagtaacggggaaggattcaacaacacgagactcgtactccgccctggaggccaagcccgcagggggggagccctgtacctgctgtggcggggagcaattagcgtagaggtgcgccgggagcctaggctccgtgacggcgacgcgcggaacctttcggcgcgtggaaaggccattagttgcttcatgctcacatccctcggcgccttaccggcccggaggcgcctcgcgaacccgcgccaccagctcggcccgcccgcggccacccaggtttatcgtgaggccgtgcgccgggcac

SEQ ID NO: 14487 - DNA, 611 bp, Zea mays
  Clone ID: MRT4577_1131C.1
ccccggcccttcgggaccgaattatctcctgtcaccgaattgatcggtgagtttatcaagtgtttttcatctcctacagtccacgaaaccatattagatttcaggttagaccttatcccagcacccttttgagcctcacactttctttcaataatctgcattgttgaatttaagtgctgtcgcgtcatttgttgctggttacattgtgttttagttcggattccttctttcttccacttgtcaaaccctagcgtgtcgtcacaatcttccgtttgatcatgtcacccaccgagtcaacaccgtgtccttgtttttcttctttggttacaaaaaaacagaaaaaagcagaaagaaaaaagaaaaaaggaaaataaaaagaaaaaagaaaaggaaaggatagagctagagaacaactgaaaaagggggattggatacaaagcggttgcctaatctcgatcgttttcttttgaaaactgcaacggattcggatgtcctgtactaaaacggccataacttttcgctcgaaactccgattgcagtgctctttttttgtcggaaagctctcgaaaaattctatacaggtcacctggcgtagtgcccggtgattgctt

SEQ ID NO: 14488 - DNA, 205 bp, Zea mays
  Clone ID: MRT4577_113200C.1
agggggaccccccgggccgcaggaagccggcacgaggcacaagcacagcactgcagctcgatctgacaaagcgctagtggagtaggagcgggctctctgtctatcagcaggacacgtatcctaggttttttcgttgttgtccggctcattggggaggcagtgaggcatgctacagctcagccatgaccttgagctctatatcctg

SEQ ID NO: 14489 - DNA, 249 bp, Zea mays
  Clone ID: MRT4577_113201C.1
ggggggtgttatttttttttttttttttttttttttttttagacccacagcccaaaaatgtattggataaaagatgggggacaaattatagactcacagggctctaaccctaaaataccgacagcccaaaagtaaagggtgggtggcccacacacattgtccaacactaatgggaggtgtgtcgtaccgttttaatatgagccaaccctttgggctttaattggtaggcacccttttttatggggtcaa

SEQ ID NO: 14490 - DNA, 774 bp, Zea mays
  unsure (1)..(774): unsure at all n locations
  Clone ID: MRT4577_113202C.1
tatattgctagaatctgaaagcatgtaatccgagcatagaatttcatatcatagttctatcaccattctacacattgaatcatgtaagttctatttctcatacagcacaggtcttgcataaccaaattttcttagaagttgcgtggggccacggataattctggcacacatccaataaaagccgaaacgccagtgaggattcttttctcctggatcctttttgctcattctcacaggattagaatataaatgagtctagcagacactgaactatatgctaatcaacaggtgaatagcaaaagccaagatatgatagattcttgaatcatgacgttgttaagagcggagcatcttcactttgggtccagacttcttcatttgccgagccctttccttttcttctttcttccggagtgactcagcgcttagtttggcatctgcctcctcgatgagtttcttcttttcagcctttttcctttgcagggcctcctgccgggcactctgtagttccctgaaagcctcctgagcagcctttgttctagctccatcagttttagagcgagcatgagagctgagcttataacggccaaccaaatcaatgtagtatggcacaagagcaactaatcttgtcatctctgacatgttgcttgcatctggcaatacaaacttgaatgcaaggaccttcttgtaagaacctgccaactggtctgaaaaacgaagcgagatgaaccacttcccaaatttcccggccggttctcancaagaactgatcag

SEQ ID NO: 14491 - DNA, 323 bp, Zea mays
  unsure (1)..(323): unsure at all n locations
  Clone ID: MRT4577_113203C.1
aacataacttttgaagacggncancgnnctcgcggggggcctggctgtgggaggggccagcgcctatgcaatgcaaatgccctgccccagcgcggggctgcagggcttgtacggcgctggcgccggcctgactacgatgatgggcgccggcgggctggacccctacgcggagtacctgaggcagccggagagcaacccgctggcagatgagccctactacgccgggggtgggcaagcctaacgccatgtttcaacctatccttgaacagtgctgccagcagcagatgaggatgatggacgttcagtccgattatacaacagct

SEQ ID NO: 14492 - DNA, 1957 bp, Zea mays
  Clone ID: MRT4577_113204C.1
gttgctgtgctgcgcggttgctcggtaatccgagcatagaatttcatatcatagttctatcaccattcttcacagttaatcatgcaagttctatttctcatacagcaaagcttatgcataacaattttttcgaagttacgtgggcgaatgtgactacagatatttcgggcacacatccaataaaagccaaaacgccagtgaggattcttttctcctcgatcctttttgctcattctcaagggaaacatcgtggcccaaaattggaatgtaaatgagtctagcagacactcaaaaggtgaatagcaaaagccaacccgtggtagattcaagagcggagcatcttcactttgggcccagatttcttcagttgcctagccctttccttttcatctttcctccggagtgcctcagcgcttagtttggcatctgcctcctccatgagtttcttcttttcagcctttttcctttgcagggcctcctgccgggcactctgtagttccctgaaagcttcctgagcagcctttgttctagctccatcagttttagagcgagcatgagagctgagcttataacggccaaccaaatcaatgtagtatggcacaagagcaactaatcttgtcatctctgacatgttgcttgcatctggcaatacaaacttgaatgcaaggaccttcttgtaagatcctgccaactggtctgaaaaacgaagcgagatgaaccacttcccaaatttctcaaatgccttctcaccaagaacctgatcaagcacagcctcagtgatcatatccccagcaacctccttcgactcagccaccacagcaagctcatccgacacccacttcctcccagcaggcgccgaagtgagaacgttggcaaacctctgcagatccctttcctctttctgcagcgtcttggctgccttcttccgggccacggccagaaccacatggtccatggcctcttcgttcattaccacctcgaacgtaatggtgtccttcccagggaagaccagctcgacgaaccttgacagcaggtcgtgccgcgcccgcatctccatggtggcgagcatgccctggcagaagcgtctcccactggcgtagaatttgaacacgtcctgcccttccttgagcaggagtggcgtgtccttgccgtcgcctgtgccaagaaggctgaagttcttgtcgaagatggagtccctcgtggcgaacttggtggcccaggccagcgcgatgttctcgttttgccgcttccccgtaaagtagttgagcacgaagcagatcaggaagctgacacacgcgatctcgacggagaacgcgcggaggagctcagctgggctcctcttcgcggccggaatcgtctcggcaggagcctcggcggagggatctgactggtcggcctcggccggggcggcggagtcgtcggaggggatcgcttccggcacggggatgccctcgaactcgtcctcgtcccagaggtcgagcgccggggtggggtcccgaggcgtacgcgtagcggggttagggttcggcgcggatgtcgtcgtgacgggaggtgatggcgcagaggtggagagggagatgggcggagggggcgggaggtcgacgccgtcgagaccttcctcgtcatcgtcagcatcgaggccaccggccgcggagggaaggtcgtcggagtcgaagccctcgaagttggcggcggaggaaagggagatgttgagggcgatgagcagcaggatgaggagggttgcacgcgactgccggagccggatccagctcggcgctgccatagctgaggcagcggaggaagggtgtgtgtgtgctgggggacgacgaaggggatgactagcgcggtggtgctgtgctggggcctaggaggaggggggggggggtaccattcttttttttttttttttttttggaaggatgcgaccactgcggaagaggtgtatacgttgggatct

SEQ ID NO: 14493 - DNA, 292 bp, Zea mays
  Clone ID: MRT4577_113205C.1
caccggtgcgttctgtcatgacaataccttcccgagagagatgaggctgtgatagaatggcggcgctctacgatacgcagtcagagacatacactaagaagcgttcacagtaccccaaggagtggctctccatgctggccagcctcaccgttttggcccagggcgggtgagacgctgggtgtggcacccgtcaggctcggcataagatggcggagcactactagagcgtcgtgggcaaggacgaaagcgaggggcagcttctgcacgcccccgatcacccgaaagtgcagga

SEQ ID NO: 14494 - DNA, 868 bp, Zea mays
  Clone ID: MRT4577_113207C.1
cattgggtacctcgaggccggccgggaaggagattcctgctgctagatcttccttgactcaagggctgatcgtgaggtgatgcgaacaacagtgaagagcaaggcaccaacaagtcaacctgcacgggtgtcaaatggatatggatctaagaacaaaatgtcaactcaaaggcatgccgaaggtagggtagataccatgagaaaggaggctttcttgaacagagaaagggttgtctcacgtgacaatgaaaggatgcatgaaagggttgtttcacgtggcaatgagaggatgcatggtagtgcaataaatgggtccaaccaggcaagtactagcaaaaccacaatccaaaagcttacaagcagaggttccattgctaataagcaagcttccacggatctgaatgatgctgctctgaggaagagcagtgtagccccaaagcaccatttctcagaggttgacagatcaaaatccttgcaaagccagaagatgcagtcagctggtcagagactgcagcattcttcccatggtcagaggccacatcaatccatgcagcataggccgcagcagtcattgcagagtcggaggccacagcaaatgactcaggatcagaagccacaacagtctttgcagagtcaaagtactcaacagtccttgcagaataaaaggcaacagcagtcctcacatattcagaaattgcagtcctcacatactcagaaatcgcagtcctcacaagcacacagaccacagtcgctaagtaacaggtcccaggagttacgaggacaaaggcctctttcttcacaggggacatacttggagcaaaagagagtacaggcaaatgatagagtcaaacagctgaaagcacattcg

SEQ ID NO: 14495 - DNA, 576 bp, Zea mays
  Clone ID: MRT4577_113208C.1
ctcttttttttttttttttttttttttttttttttttttttttttttttttttttttttttttttttttttttttttttttttttttttttggaaaaaaaacaatttttttttaaaatttgtttttggccctacaaaaattttaatagttggggcttgaaaggctcaaaaattaaaaagtcctcgttggggccaaaatgggttcttttgaaggaccccgatcccccctaacccgaagggggggaaagaggtttttgattttgagctgaacgggggcttggggtgttaaaaaaaagtctccccaaagagggggtttataaaaacaacccccccttttttgggggccactaaaattaagtttttttgacaatattgccttgggggaggaaaaagctttccaaccattttattaggaaagacccctaaggacctgttttttgggggtttcaccttgtttttgccccctttccagtttgaagttgaaaaggcctcccccaagttttaaagttttttttttttggtgccaatttccatttctggaacacgggattaccttggggggttttcctttttttgg

SEQ ID NO: 14496 - DNA, 300 bp, Zea mays
  Clone ID: MRT4577_113209C.1
ggctgctctcacgtgctcattaccagatccatggactcgttgggtccgcaaatgcgcatgatcatatgcgaaggtgcggtaagaaacaggcgcacaaaatgattcgacatgaactcctagctcgactacctgatgaaactaatggttattggtgattccggcgtggggaaataatgcaaggttgtcagatacagagacgattcttatctgaacagatatatcatcacaatcttaggggagttgaaaactcgcacaggctagctagatgggatgacgactaacatctaaatttgatatact

SEQ ID NO: 14497 - DNA, 318 bp, Zea mays
  Clone ID: MRT4577_11320C.1
attcggctcgaggtggaacaaacagattgtcatgggaggcccactgaccgccggggaagggtactgacatgaatacggttagcctccacgcacctaggccttccactgggaatttcctcatgccgacgagagacaacctcttgcctatacgcgttgacttggaggtggacggccagcgctacagggacgcctacacctggaacccgagagataccgactaggagataatcagctactctaagcggactgccaaagacctcaagctggcggcacaattacgaactccagatgctccaatgcatgcactaggcaacttgc

SEQ ID NO: 14498 - DNA, 229 bp, Zea mays
  Clone ID: MRT4577_113210C.1
aactgatgataccatatctgagggaaggattgttcaagttactgttcgcaatatacaagataacaaaataatttgcacctttgattcgggtttgaaagccatagttatggcagacaactattctgatgagggttttgatccagaatcatcacagttacgtgaaggcgatgtattaactggcaatattcgaaacgtgaatactaatagattcatggtttacctaacatgc

SEQ ID NO: 14499 - DNA, 416 bp, Zea mays
  Clone ID: MRT4577_113211C.1
aaaaccggaccggggggtgttctcttttttttaaataaaaatacggtccccccccccaaagaagggacacacgggcacccccacgggacaaaaacaccaatttttggggggggggggggaacctcttttggagggggtggaggggggggaaaagggccatccccgaatacaaggaccgatttgggtggttgggcgggtccccccaccaccttttttttataaaaagggggggtcgggcgcggggggccccttggtggcgaaaaagttcttgtcgtttgggacccacggggccccgtagggctccctgccgctttttagggtctgggggggggaaaattggctaaaccttttaatctccttttatggggcccctggggaggattttagaaaaatttggtctgggggagggccggaaa

SEQ ID NO: 14500 - DNA, 422 bp, Zea mays
  Clone ID: MRT4577_113212C.1
gtcgcaaggagccgtataatttctagtactactatagtactataatggcgcacgattgatcgatggtggtatgctaagcatgcatcctggttcctggcaaataaaatttttgactgcacgaaccacaaccgcaccaacggcaatgcaagacgtttttttcccccttcactcatgagtcatgactctgcgctgccgtggatattgaggacttcgaggcggaagcctcggccgctgcaggtatcctctccatggcctgcagcgcgtccttgatggacggcctcttgctcggcgccatggcgcagcaggcggcgctcagccggaggcagctcgccaccgtcttcttccgccctttcatctcgccgcgcagcgcgggatccaccacccggagcgcctgcgccatatcctccgctgcgcactggcat

SEQ ID NO: 14501 - DNA, 636 bp, Zea mays
  Clone ID: MRT4577_113213C.1
cctcagcggcggacacatccccacactcgcgctagctgaggacggtgagtggacagagcgacgacgacgacacaggcggcacacatggcatcccatgctctccgccgccgtgccccggttccacgggctccggggctacgccgcgcccaggaccgcggaggcggcgctgccgtccgtgagggagggcaggaacagccgacgtcgcatgtcatccgctgcgactacatcggatccgccaccaacctgatcatggtgacgacgaccacgctgatgctgatcgcgtgacggttctgactggcgccgtcggcgaaccgcaaggcgacagcggagctgaagctggagagacgcgactccggactgcagacgggtgaccccgccggattcaccctcgtgcgacacgttgggctgcggcgccgtcggccacatcctcagagtcggaatcgagctccggatcaaaaacaccgtgcgccctcgaccagatcatcttgtagatgcctacgtggacgctgttatgatcagactcagtgacctcgatcgggcctgcgttgctgatgtgactgcaggggcagagtttctaatctgcgtgacatcgtacatgtacatagcatccatcttggatacaatggagatataccg

SEQ ID NO: 14502 - DNA, 762 bp, Zea mays
  unsure (1)..(762): unsure at all n locations
  Clone ID: MRT4577_113214C.1
cattgggtacctcgaggccggccgggaaacaagagagagctgcttgaggctggtttatcttgctttgttgttttccatccctagtgttgtcacgttcgcatcatgcaccttgatctcagtatctaatcttcgcaaaacttcgcacagtaaccatggcgccagtcgagactgacgctgccacaaggagcaactcactgcccattgcactctttggcgggcaggtcttgctcgttacagtcctcacggctcgcgttctgctcactactcgacgcgctgccagatcccaaccaccatcaacccacacgcgctcccaagaccccgcgcgccgacgtcatgcctttgtcttctccaccattgcgctcatttcactgctctcagtggggagcttcgccttcctttggcgcgccatctcctacgtacgatgggctgagcacaacaagcaggagatcccagggagcttatggagtggttggtatggcactggtgagcaagggcaatggcatctgggcgattggattgccgatatagatcttgtgcgcgagtttgatgctgtagggatcatgaagcccgagggattcctctacaccagccagtactttgtggggctgatagcaagctccatctttataggtgctgaaggacgcaggcgcaatctctccaataccacccatgcgtctttcgtactattgagctccattggaaagctanngatatccctgagcttgnntctcatcaccatcttgtacacacctctaactctgc

SEQ ID NO: 14503 - DNA, 382 bp, Zea mays
  Clone ID: MRT4577_113215C.1
aaaaaaaaaaaaaaaaaaaaaaaaaaaacaaacaaaaaaaaaaaaaacaaaaggacatgggcaaacatgcggaaagaataactcttatataaaaaaaacctaaattaaattaaactaaaccaaaaatatacgggccgcccgtcttaaaaatcccatgttttttcccacctgaatcccctttcaaaactttttttttttggccccaaattttatttccttggccgccctttcccaacgcctttcctgaaaaaccccctgccttcccaacttatatgactttccataaattccccctttacccacttgggtttttatgaaaaagccccgcacgaatcctcctttcaaaaatttcccaaccctaattggtaattgttacccccct

SEQ ID NO: 14504 - DNA, 278 bp, Zea mays
  Clone ID: MRT4577_113216C.1
agcgcctggtgaacgaagtattgcaggagtatcctcaaggtgctcttatcaaggttatggcaagcggaaactcagtagagagacgtctcagtgtttcatattggagggaccattctaacatctcttgggtcgctacatcaaatgtgactttccaaatcaaagcatgaatagcatgtggcttcctatattcagagaaaatcccctcgaagcacaggaaggaatatgtacacccaatattatgctatacgaaccttattgctgtcaaaggattacttggg

SEQ ID NO: 14505 - DNA, 609 bp, Zea mays
  Clone ID: MRT4577_113217C.1
agacagcatccccatatttgcaggggaaggcttctaccctgaggtgcataagcacaacactagtcaggtagctctgcctaatccaccaatctccaataggtgatcagacaggccgcttgattaggactttatgtgatgcctaggcaggctaggtgacaccttgggcaatgaattccttagcgaagtaatagtttcattagttaaacacaatttatctagatgtttgtttttcctgataaactcaagttcataacagaacagtgatttatgtgatttatctcacttatgtgagctgtacgtcgttgagatttttattaggaaaattttctttggatacataacaagtacacggaagtgttaaaataggatcacaagagtctctctttggcgaaagggcctctagcctagtggttaaaggctttcaagaagcacctccaagatctgagttcgattcccctcgggggcaaattttctggattggttaaaaaaatctcctcgttttgccttatccgctctcgggttatgatgtcccgtgcgccaccctttggttgggctgttgtagagtggagtggacggttgatgctgactcgctagtgataggggagtgta

SEQ ID NO: 14506 - DNA, 359 bp, Zea mays
  Clone ID: MRT4577_113218C.1
cattgggaccctcgaggccggccgggcaactatgtatactgatgtccaagcttgcaggattttcctttgtaagccctactagtgatttcacgagagagctatcatactgatgatgacccggacaacttcgccacaatagactttaaacctttttcctttctttatttgtcaccctttctagtgatgtctgccattatataccccctttcaaccaatatctggaagctcatacacgtacaggaggaatgtgccatccctcccttctcttggagacttcatgccaacctccatgtcctcctatggattgctttagagaacatcatttgctcgcttgctgtaatcactcgatattatatgga

SEQ ID NO: 14507 - DNA, 237 bp, Zea mays
  Clone ID: MRT4577_113219C.1
aaaaaaaaaaaaaacaaaaaaaaaaaatttataaaaaaaaaaaaaaagacaaaaagagtaggtacaaacataaaaacatgggcgattattgcaaatcctcccattctttctggctactgacttcgacttaatatgtcttttcatacaccacaatccattcaatttactcgccttggtacaccaacctgtttggtcagaacacggtgttgctcaccaacttggtctgcttgctcttcc

SEQ ID NO: 14508 - DNA, 813 bp, Zea mays
  unsure (1)..(813): unsure at all n locations
  Clone ID: MRT4577_11321C.1
gccggccgggctggggacgactagaaaattgacctcatagttctatcatggaacttctaaaacttataactctgaatgttcatcccaaaagttttacccgctggcactccccaccacgcattctctctccccacccccaacgcagcgattgcaggaaccatttcacttatctgggagaattcagagaggtacatttcacttatttgggagaattcagagaggtacagagaaattcaatccctttcctcatgattatgtcagtgcatttctctcttgctgctttgatttgattagcctagtttggtaatcggagtaaagcagatagccatgtttgggaaaataagtttctgcagagagtgcgcccttgttaatttgttgatcctgtctgtaatagcatcaagatgtttgtcagctcccacagaaagattaggcagtatttttcagaaccaatcaatttcagatgggcagacactagtgtccatgagtagaattttcgtgctcggtttctttagccctggagcttcgagcaagcgatatgttggtatatggcacaacgatgtttcagaaagaagagctgttgtatgggttgccaacaggaacgatccattacaagatacttctggcatacttaaatttgataacagtagcaatctgatcattttagatgggcggggcaactcattcacagtggcttatggacgnggagtgcaagatgtggaggctgcgatgctggagaacggcaattttgtcttaaggagcatcacgaaccaagctaagatcatatggcagagctttgactctcctactgataca

SEQ ID NO: 14509 - DNA, 474 bp, Zea mays
  Clone ID: MRT4577_113220C.1
gggtggtggcggccgacatgccgcccgcgctgcagcgccgcgcgttccgctgcgcccgcgacgagctcgccgcgatgccgcacttcccgcgccggctcgagcccaagcgcctcgcgctcgcgctcaagaaggagttcgatgctgcttacgggccagcttggcactgcatcgtggggacgagtttcggttcatatgtcacgcacgcccggggtggattcttgtatttttccgtcgataaggtctacatcctgctcttcaggacatccgtggagccctagccgcattgacggccaccagcctaccagcaatggacaaatggttcataaaaatgcccagttcttgggatagctcacaccaaattcagttgttcagtcagctaggctgaggccttgtaacttgtaaattgcattgtttcttcgaaggcaaatggaaactccttgtttttctgataaaatttctgatttgttcgggatc

SEQ ID NO: 14510 - DNA, 175 bp, Zea mays
  Clone ID: MRT4577_113221C.1
tgccaaccacagcgagcactctggtggggggggccttttaaacaacaacggccctttcaaaacatgctataatgaaaactatacttaccacagatgcaaataacatgtgctaccaaaaaacaatacgatccaaagagattggaaagacatcctataaaaaaccaagatgatgctc

SEQ ID NO: 14511 - DNA, 927 bp, Zea mays
  Clone ID: MRT4577_113222C.1
gcaaaaatagtgataaaagggtctgtattttaagtccatgattacctcgagcggggagggacaattttagtgctgttcgtggcttcgaatctccgtcaattcgctccactcctccaaactgatccgcacaggttgtgccgctgaaaatccaaactttgggattgatgcgactgtagtaacttgttgctcagtggatggtcttgagcttttctgttccagccaggagtcaagatcaaccgagtactgtgctgaagatgaaggtgggtgcagacccaagtacccaagatgtgatggaggaggcagccctcaaagcaaagcatgtagcagagcgcaagttccacgcacgtaacaccaagggtgcccggaggtcagcgctcaaggctcatagcttgtgcccatcacttgagggcatatctcagatgatctccacacttgatgttcaccttgcactgaatcgaagatcgatggggagagtgactggtacaggatactgtctctcaatgccatggctgatgaagaggaggtgaagaaacagtacaggaagctaactctccagttgcacccagacaagaacaagtcggttggtgcagaggttgccttcagacttatctcggaggcatggagtgtattgtctgacaagagtagaaagatgctttatgatcagaagaggagagaccattgtgtggcgagtgtgtccaacggtttgtatgcttatgattatgatacaaagctcagtaagcgagcacgaaaaaatgccgttgcctctgcctcagcagctgttgaggctactactcgtcttgcaggggctgacacattctggacatcatgcaacagctgcaggatgcagtatgagtacttgagagtttatctgaaccacaaccttctgtgcccaaactgtcaccatgcattcatggctggtgaaactgg

SEQ ID NO: 14512 - DNA, 343 bp, Zea mays
  Clone ID: MRT4577_113223C.1
aaaacctccggagggaaaaagggggggggggcctttggttttaagtcttaaaaaaccccaaccaaggtgttttcttccaaaagggaagggaacctcccagtttgtttttaaaacaaaaaaccaaactacttttcccctgggttgggggccctacaaggtttgttcggacccccaatgtgaagctggcaaaaaccctcaaaaatttctttggccttttaaggggccccctggggggcaatttaaccccaaagggtccggttggccataaggggcacccccacctaaaaaacctgggggccccaaaactttttaaacttttggggggggtaggcccgggccaatt

SEQ ID NO: 14513 - DNA, 543 bp, Zea mays
  unsure (1)..(543): unsure at all n locations
  Clone ID: MRT4577_113224C.1
tgttttcactctaatgaaatacttggtaaaaaaaaaaaaaaaaaaaaaaaaaaaaaaaaaaaaaaaaaaaaaaaaaaaaaaaaaaaaaaaaaaaaaaaaaaaaaaaaaaaaaaaaaaaaaaaaaaaaaaaaaaaaaaaaaaaaaggggcgggcctgcggaattagaaactggcccggacccgnggggttcacacccgggaaattccgggcacgggtccctggggggcggtccacatttttcctttatgaggagggggtttataaagcttgggcggaaatacaggggccaataggtggttccctgggggagaaaatggttatccccgntcaaaatttccacacaaaaaaacgaacccggaaagcataaaggggaaaagcccgggggggccctaaggggggggctaactcactttattgggggggggctcactgcccgttttccaatgggaaaacctggggggccagttgatttaataaatcgcccaacccccggggggagggggtttgcttattgggccccaggggggttttttttttccccag

SEQ ID NO: 14514 - DNA, 1028 bp, Zea mays
  Clone ID: MRT4577_113225C.1
aattcggcacgaggcctgcagggcagcaaaacggaccaggatttttttcctctacctcgctgcaagtcagctaattttttttttccctacaagtacaagtacccccagtaccaaaattttttttgactgaaagtttgagcaaaaatagtgataaaagggtctgtattttaagtccatgattaaattttcgggggaaatacaattttagtgctgttcgtggcttcgaatctccgtcaattcgctccactcctccaaactgatccgcacagatcgagggtctagggtttggggtgccgccactgggataagcttgtgctgcttgcccgcccggagctgctcttcctccgccacgctcgccgtcggccgccagatctcgcccgcaccgacggagatcctcttcctccaccacgctggctcgcttccgccgtagttctcagtattcctcttgcggatggctccatccgcactcccatgacacgcggttgtgccgctgaaaatccaaactttgggattgatgcgactgtagtaacttgttgctcagtggatggtcttgagcttttctgttccagccaggagtcaagatcaaccgagtactgtgctgaagatgaaggtgggtgcagacccaagtccccaagatgtgatggaggaggcagccctcaaagcaaagcatgtagcagagcgcaagttccacgcacgtaacaccaagggtgcccggaggtcagcgctcaaggctcatagcttgtgcccatcacttgagggcatatctcagatgatctccacacttgatgttcaccttgcactgaatcgaagattgatggggagagtgactggtacaggatactgtctctcaatgccatggctgatgaagaggaggtgaagaaacagtacaggaagctaactctccagttgcacccagacaagaacaagtcggttggtgcagaggttgccttcagacttatctcggaggcatggagtgtattgtctgacaagagtagaaagatgctttatgatcaggagaggagagacat

SEQ ID NO: 14515 - DNA, 425 bp, Zea mays
  unsure (1)..(425): unsure at all n locations
  Clone ID: MRT4577_113226C.1
tggttctcttttgcagggcgagtnncatcgtcgttggccttcccctttggtcctcttcccaagcgcccagagatnntagtcgcctctttnttcttggtgtaacctcgaaaattttgggggtagaagaaggggcgcgtttagttttcttcagacccagtatgacccagtggattgggggtggtttgggcttctcttttgtcaagtagccaattgggagggcgaaccaggaaagaccactgtagaaggcacctcttcgcgccgccttgttcaacgtaagtggcaagcaagagggtgggcatcaaaggggcacccgatgggcggcaaccatgctatcgcaagcgtgtgtgcgggagagaccagaggtcaagacctggcaaacaaggacaggggaaaggggacccgtgatctccatgcaaggagaacat

SEQ ID NO: 14516 - DNA, 102 bp, Zea mays
  Clone ID: MRT4577_113227C.1
ggttggggcaagtttatgcataagaacgcaacacgttttgccctaggatcaacatccccatgcacgaccaccggccatcgccaacccaagaaaccgaaaagg

SEQ ID NO: 14517 - DNA, 280 bp, Zea mays
  Clone ID: MRT4577_113228C.1
tctttgacgcgtgcggccacactgacgctcacgcgttcattttccatgggtgcactcggacatgaacgcgctcttaggcgcggacactatcggggtgacgcactgtgacaagtttttgcgggggatctacacgttcaagcagcgggtggcgtggaatccgccgatgaacctggactttctgagctcgctgcggcgggtgtgccctctcagctacagtcacacggcgttcgacatgctcgactgcaccacgcccatggtcttcgacaacgcctacttcaac

SEQ ID NO: 14518 - DNA, 795 bp, Zea mays
  unsure (1)..(795): unsure at all n locations
  Clone ID: MRT4577_113229C.1
aattcggcacgaggaggcacacaggcacacagcacacagctcactcaactcccctcccgcttcgtcagctcaccatcataaaccaaacagagagctctctccctctcggtcgttccatcccaggatgctgcttaacccggcgtccatgctggacaccatccggcagcacctcctggaggagccaccagcggcggccgacgagagcttcgggatcctggtggcggaccagtggagcgactcgctcccgttccgcaccgacgacgccgacgacatggtggtgttcggggcgctgcaggacgccttcgcctacggctggctgcccgacggctccttcgcgcacgtgaagcccgagccggtgcggtcccccgactcctactactcctcctcctacgacggctcctgcttcggcggcctcccgtacccggagcagccactgacgcccggcaatcgtgggacgaattctccagcgatttgccggggcatgtcctggcnacgtacgtgagcggcaggcaagcttatccatcacaaatagcagttgtgtaagtgttggagaccaaaaagagcagcgcggacagtccggccctgaggccggaaggccggacgatccgcggtccggacagtccgcggtgatggcgcggacggtctgcgcgtgcgcagagtcagttaggatttctagtttctcgcgggatttgttacctaaaaccgcgggattaactcggaaatctgttggaagcggatccagacctcccctttatatcgatgaagggctacggccgattgtactccctaacaaaa

SEQ ID NO: 14519 - DNA, 189 bp, Zea mays
  unsure (1)..(189): unsure at all n locations
  Clone ID: MRT4577_11322C.1
tntnttnntttttttccattgggtacctttagggcgggcggggccttcatcctatcctgcgctcgagctcccctccatccagcgggtacgaactctgcgggtacctccgatgcggggccatactaaggcacggggtataaggcgcgggtcctgatcaggcgggaggcgaggagaaggcgaatcgcgtgg

SEQ ID NO: 14520 - DNA, 220 bp, Zea mays
  Clone ID: MRT4577_113230C.1
aaacacaaatttgttaggcagacacggacaaaattttttttttggagccaattcaaacatacaaaactttggtttttaaaagagggcttgattcaacaacgttaacattattcagcaaaatgaaagggggtttaatcaaaaaattaatggaagagggcagcttagcagctcaatagctcactaatttttacaagtttagcttgtccatgctgaaagggca

SEQ ID NO: 14521 - DNA, 595 bp, Zea mays
  unsure (1)..(595): unsure at all n locations
  Clone ID: MRT4577_113231C.1
gtccggtgtctgtgtcctgcttgcacggcgtgtgcgccgggggctcgcccaacagctgacctactactagcatcctgaccaaacacgttcatggctgtgcacagggcacgggcccggtgataccagtgcctgaccatcgacggcggcgtggagttgttcccgttcaagtgccgcccgtaccagatgaacaagctgagcctggacccgacctccttcaccgtcaaggcggagggcatcgccaagaacgccccgcccgagttccagaagaccaagctcatgacccgcctaacgtacacgctggtacgagatcgagggcccgctcgaggtcggttccgacggcacgctcaagttcgaggagaaggacggcatctactacgccgccgtcaccgtgcagctccccgggggcgagcgcgtgccggtcctcttcaccgtcaagtagtctcgtccccaccggcatggcccgaggagcttctgcgggccctttcttgtgcccagctacccgnggttcctccttccttgaccccnagggtccggggtggctccacctgctacgacaacgcccgtcgctccttccccgctgggggcagtaggtgac

SEQ ID NO: 14522 - DNA, 695 bp, Zea mays
  Clone ID: MRT4577_113232C.1
cgaggccggccgggcccctctcctccgggcctcccctcccacctcacgtcccttcttgcttctcggctcgccacccttcatccacccgccgctccgtcagccgcaagatccgtcagatatgtcacgcttcggtcgatgcgggccgccgccacccatccgcgacacatattcactcctcgaccacaagatcaccttccgcactactgctgatgacctcttcacgatcttcaacgatgacggggagatctgtccacactctacatcccaaggtaccgcatgactggagactcccgcctactcgcggtcgagaggtactagtactaggacgacgaacagaaggcaatggataggctcgatgctacattggtagacacgagggacatcatagttgcagtttgcacaagctacagaccaaatgctgaacgcattaataaagggagaataatggagccagctccaaggtccacgggtccgtgacacgaagccgcaatccaagacggaggacaccgacgatgattatcgagaggactaccagtatagagattatagaaggcgaagccgaacccagagcacagatagatacgcccgagacaggtacagagataggcgattaccgccatcgtagactgagtcgcaatatgtctcctgcactaagaagacctagtcatagacgcagccgcagatacactcctgat

SEQ ID NO: 14523 - DNA, 698 bp, Zea mays
  Clone ID: MRT4577_113233C.1
cattggtacctcgagccggccggaaaaaggtgcgttcgtttagcccacacgtgtatgtgaacctggcctaatccttgtgtaaaccttcgaacccggcctggaatcgatccacaaatacatagcagtggaactcatcccatcccatatcttgtcgcgagcgtcatgacgcaagtggccaggccagatcaagcgatggtgacggcgcgattcacgacggattcacagggcttcttccgccgtcggctgcctccatcttcaccagcaagcttttctatagacaaggaagtggtgttagtggtgctagtacaaagaaggcacaaaagctcaagctctaaatgcagaagaggaagctgctttaaactagctatttaaatcatagctgttttagcaaatctagacggttgttgacatgttgaacagtcttatgttcaccctttagatatctgccctttgccagaatggcaacaaattaacaaccttatgtttcatttggtcgatttttgccctttgtttctgcaggtagtaaaacaaatatggactacatttggcacatttgcaaaaaaacatggactttactgtatagtgtgtaagtgaatagttcacagttggcacatttatatccatgtggtgtaatcaaacagtgaaaaatgagccatgtattaaattccagaaaaaataaaaaaaaaagcgtttagatg

SEQ ID NO: 14524 - DNA, 295 bp, Zea mays
  Clone ID: MRT4577_113234C.1
gcgacccacgcgtgcgaacgcgttcgtggtcggaatagggactccggccttttttggcgcgctcctggcgcatgccgccggctcctgcgaggccaacggcttctacacccgagacgcctttctcgacgacggcgggtactacccggcgttcggacgcaccggcaccgtggacgactgcaagcgcgagatcgccgacttgttcggcatacgccaaccacgagaccataaagatctgcttcatcaacgcgatcgacgggccgcgcacgaactactgcgaccggaacaacacgcagtg

SEQ ID NO: 14525 - DNA, 591 bp, Zea mays
  Clone ID: MRT4577_113235C.1
ttccgggttcttttcaaaaaaaaaccctgccgccctgcgatcttgttgtgtaccaccagccacaaaagacacttatgtcacttgtgcgcgatgttgggtgcaagtttgagtttataagccctccgcccatataaaaaagctggagtcatctgctgagcatgtgattgctacattgcgaggggggcacccacagacaactcactactttcttggagcacctgagaaattaacacaaaaactatgacctcatgcccttgcttttgcactgtgacatatgagaggattttctcagacaccttcttcacgttctctgatcagatatgagcacggatgggggacattgcaactaactatagaaccgcgatatgggagaggctttttttctcctatatctgtgactgggtttctatctgatgtgtgttcacctgctgcagatgaaattggcaaaatatacatatcaccagatgagaatgtgcaacgagcacacttctatttacctgaggaaattgcgaaggacctgcttactatggtaggtccccccggggaaacacattatccacaatttctaaactgcctgcgctgcaagatgat

SEQ ID NO: 14526 - DNA, 763 bp, Zea mays
  Clone ID: MRT4577_113236C.1
tcgcgatacggtctgatccatgggtatttttctggtgtggattaaataccagtgcggcaaaaaagcagcgttcgtttagcccacacgtgtatgtgaacctggcctaatccttgtgtaaaccttcgaacccggcctggaatcgatccacaaatacatagcagtggaactcatcccatcccatatcttgtcgcgagcgtcatgacgcaagtggccaggccggatcaagcgatggtgacggcgcgattaacgacggattcacagggcttcttccgccgtcggttgcctccatcttcaccagcaagcttttctataatgcagacgagagcgcttcatcctgcgattaaatcagcactagtgttgcacaatggtacctattgcgtttgtcgtatcagctttattgggcatatcaggatatgcaggacaaggaagtggtgttagtggtgctagtacaaagaaggcacaaaagctcaagctctaaatgcagaagaggaagctgctttaaactagctatttaaatcatagctgttttagcaaatctagacggttgttgacatgttgaacagtcttatgttcaccctttagatatctgccctttgccagaatggcaacaaattaacaaccttatgtttcatttggtcgatttttgccctttgtttctgcaggtagtaaaacaaatatggactacatttggcacatttgcaaaaaacatggactttactgtgtagtgtgtaagtgaatagttcacagttggcacatttatatc

SEQ ID NO: 14527 - DNA, 196 bp, Zea mays
  Clone ID: MRT4577_113237C.1
cccacgcttccaaggaccacgacgctaccttcgtgtgctttcgttccagctttccttggccggcatctttacttcctacggaagccgtcgtgccagtcgccgcccgtcgcgatgggtaacacggtggcactggcgctgatccggcggtgcaagtacctggcatcctccctgatgacgcctcttctgcctagaagcg

SEQ ID NO: 14528 - DNA, 411 bp, Zea mays
  Clone ID: MRT4577_113238C.1
atgcaagcgtacgcttaccaacttcaacctcgccgtcatgatgctgaagctgctcagacagaggtaggccgacgccggaggagtgatgcttgtcagcagtgaccatacatgcttccgacatggtctaagcctaatcttattgtcgagggtatcgtcgtggatctaggctctaacttctactttgtggtcctgcaccaaatgccatggactggccatagatttcacgaactgtcttgacgtggtctttctaagggtctgcgtctcacattattgagatcggtgaggaacaactagctcttatcgtcagtgatgggctatagtttggtttagaattatctcaaagagaactttggtctgcgcgttggatgtgatccaagccattatctcgtcctagctattattgtcttgttt

SEQ ID NO: 14529 - DNA, 329 bp, Zea mays
  Clone ID: MRT4577_113239C.1
ggaaacatgaattttttcaaacttggtgggctggcctggggtcttttttttacggggcacccaacaacaaatttgcaaataacgaagccaacaaaaacccccccccccggaaaaaaaagacccttttaacaatttggccccaaaaaagaaacatttgggggctgggattcactggggaatttcttccccaaattgggaacctaaaaaaactggttaaaaaaacccccttccgggtaccgggggaaattttgttttggggaaaaaaacaggggttggacaaaactggggccccttaggagggggtggggggggctgcttgggttgttttc

SEQ ID NO: 14530 - DNA, 626 bp, Zea mays
  unsure (1)..(626): unsure at all n locations
  Clone ID: MRT4577_11323C.1
taattcggcacgaggctgctaaagagtaaagacccaagcagacatagatcagtgggtcctcgtcaagcagcacggtgatccacgcttccacgggcgcacagggctttttgccggccattacagaggagaggaggccgacaaaggcgtggcagaggtcccatccatgggagaggaagcggccgcggccacggccacggccaccgtggcggcagggaacgcacctccgcacctgctcctggtatgcttcccggggcagggtcacgtgaacccgatggtccgcctggccaagcgcatcgcggccaagggcccccttgtgaccttctcctcgctctccagcatcggggcgaagctcaccgcgtccgcgggcgtatcggccggcggcgacggcgtgccggtgggccggggccgcgtccggttcgagttcatggacgacgaggaccccgggcctgacctggacgacctcatgcgccacatcgccaaggacggcccgccggcgctggccgagctgctggggcggcaggcacgggccgggcggcccgtggcgtgcgtggtggtgaacccgttcatgccgtgggcggncgacgtgggcgccgacgccgggatcccttggcggtgctgtgggtgca

SEQ ID NO: 14531 - DNA, 354 bp, Zea mays
  unsure (1)..(354): unsure at all n locations
  Clone ID: MRT4577_113240C.1
gcttggagtcctctagaggcggtcgccccttaattctccacccaatacttatcccaccccacccgcgggaccacatgggtttttttttggggntcttttttttttttttgggaaaaccccaccccctttattaacccccaaaaacccccgggtggcccccccccgaaaagggcggaaccgggtattccaaagggcccaaagggggtgaaaccttgtagaaaaaacaaggtaccctcccccaaaacgggaactggttcaaggggggggggggggccctaaaacccccccaaaaggaanataagctctttcttgggtaaaaaaccccaaggggaccccccccccccccgttttttt

SEQ ID NO: 14532 - DNA, 624 bp, Zea mays
  Clone ID: MRT4577_113241C.1
cacgcctgcggtaccgggatcctataccagggtcgcccagctttcgtgccactttctcatattaagcacaatattgtccaatagtggcatcccaaatatcagcctaattatgctccccgccctttctgcagtgctgctacacacagcttttttccgcaatgctcgacaagctcctatggcttaccttcttcccccatacctgggaccaaccatgtctcccatatgtcaaaatccacttcttctaccctacatgatccaacaaggaatcgcagctcacatcttaccttgtcacccttgttcctccaacagtcatcagccctatacagaaattaccttctgtgcatttattgacacaaaacattagggcacaacaactacaacatctcttgctaacaaaccttgctggctactcttagcaacaacagttacctttggtgcatttggtggctcaaacatcagagcacatcaactacaacaactcgtgctagcaaaccttgctcgctactctcagcaacaacagcctctgccattcaaccaactaactgcattgaactctgctgcttatttgcagcaacaacaactactaccattcagccagctagctgctgcctaccccccgcaatt

SEQ ID NO: 14533 - DNA, 481 bp, Zea mays
  unsure (1)..(481): unsure at all n locations
  Clone ID: MRT4577_113242C.1
ggccgggaanagaatacaaaaaagggaaagaaaaaaaaaaaaaaaataaaaaaaaaaaaaaaaaaaaaaaaaaaaaaaaaaaaaaaaaacccccttgaaaggccaaaggagcttttgaaacgggaaaaaggaacttccccgggaccccgtttcctccagtttccaaccttcctctcgtcccatcagccgaaagccaaaaccctagcaagaaaaccaccgaagaagcggcgctcgcgcgggggaacccatgggggacgacaataacaacaaaatcaacatgggctatgaggatgaccccccaaaacctgaaattgaggaagggcccaaaaaaaagcttgaaaacaacaaaaatgcccctgatgacgccataggggaaaagggggaaaacaaggaacaggaaaaaaccaagggggagcgcaaaaaaacaaaatatatgacgaagaatgaccgggcccgaattcttggaacacaagccttgaaa

SEQ ID NO: 14534 - DNA, 2047 bp, Zea mays
  Clone ID: MRT4577_113243C.1
cattggatccctcgctccgggccgggcgagtttggcatctactcggagtcccgctggcgccacgcgttcgttcctgccctctctctgtattgggagctagacgaggaccgagccatccaagagcttggccacggggacgggggaagctctcgaggctcgagggaaagagacagccccccaaaggcccaaaccctctcctcttcttcttcccttccattcgggtcgcgtccagttgctggcagccatctctcgcggtcgcggcctcgcgggcaacctcctgtcttctccccatcggatccagtgctgcggatccgcatttccgcaaggtagtcaatggcggcttccccggcggaggcgggggcacaggcgctgcccgaggcgacggaggcgaaggagaagggcaagcggggcggggtgctgaggagggtgtggcgggcgctcttcggtggccgcgaggacttcgagaagcggctgcagtacctatccaaggaggaggccgccgtgcacgcgcggatgcgccggcggacgcagttctcgcgccgcaccgtgcgaaacctcatcgtactctccgtcctcgccgaggtgttagctgttgtttatgccatcatgatgacaagaaatgaggatctaacttggcaaatgagggcaatacgggtgctacctatgttcgttcttcctgctgtatcctctgtcatatattcaacagttgttaacttcacaagaatgtttgagcagaaagatcagaagacccttgaaaaattgagggctgagagaaaagccaagattgatgagcttaaagagagaacaaattattatcttacccaacagcttattcagaaatatgatcttgatcctgccgcaaaggctgcagcagcttcagttttggcatctaagcttggggaggacactggcttaaaagttcatgttggagaagaaccaaagctggatgctgcagtggctagaagcaatgatgttgagatagtaccatcagatggtttgagaaacaggaagcaacccaatgcaagaggaagcaggaccgggagccctacttctgataccccagcacggggaactgaatccagtctaactgctggtgcagacctggaaactgcaccagctcctttggtggtagaacatcatcaaggcttaggggctagtgatggtggtggatggattgcaaagattgctgccttacttgtggcagaggacccatcacagtcatatgctttgatatgtggcaactgccatatgcataatggcttggcccgaaaggaagattatccgcatgttacctactactgcccacattgtcatgcattaaacacatcaaagcagtccatgtggcaatactcgggctccaactcagggcggtcatcccctgttgttctggatgatggtctatccacttccagttcagtacaagagactgaattgagtaacctgacacacactgcaggagctacctgaggaaggaaatgcagagaagcaaggaaaggcaagttgatggttcacagaacttctattgatgtgtgtggaactacttaatctttagacgtatatcgtcatgtgttctggtggagccacagatttagcactgttgtaaattggaaatagtgactgatatgatccctcagatacttagcacacacccaaaagaagaaactagccatggtgacatccttgagtggatgattttttgttgtcaatagagcgcgaagacttcctactgcgtgacaagagtcacaagatggtgctgaaaagctatatatgataaatgaggcaatctaacaggtcagatgtgtaacgttcatacaagatggtgtaggatataacataatatcattgcttcgttttctatttctatcatttttatatgcacacgcttgttcagagaccagaaacgtggataatttttgcgtttattttgaccttcgatctttcctattatgtttgttacttcactgattccaaattgtgtaagtttgttcagattttgatacagctaaatatgcattatgtttagataatctagggacgctatttgccg

SEQ ID NO: 14535 - DNA, 169 bp, Zea mays
  Clone ID: MRT4577_113244C.1
cccacgcgtgcgctgacgcgtggtgctatctgagagcctgcacctcagtgtgctagctagccagagcaagagacgggctgtcagcgacgagatcgatcgaaatggctgtcgtcaacatggaccagaaaagctgggccttcaccttctgatatcctaggcaccatagtct

SEQ ID NO: 14536 - DNA, 750 bp, Zea mays
  unsure (1)..(750): unsure at all n locations
  Clone ID: MRT4577_113245C.1
gggcacaccatctcttgggtgtgcaagacttcggctatttcagtttacatggtaacagagccagtcagcaacgaaaataattttcagcgaccagaaatcgtcgaaaataaagcctatagcgtcgaaaataacggtatagactttattttcggtggtttatgtccgtctaaaaagtttagccgaaaatggtaaagataaaacatggtccacaaaatctttggtcttgactacccactcatcagaataacatccatttctactacatccattgtacatccatgcataatctttagtcatgactgagactgttaaagtgaaccatatcataaaagcatattcaacttactcaagtgtattggtcgtacatttatagacaacgataggtcctaaacctacccaagagtgaccgacagaatgcggatttatgacaacctagcaggattcgaaggaaatttcggtaggaaaatcttgatgttctctatctgcacgctaaatatggtgcaatggagaacagcaatgtcatgctgccgaaatttccttcggattctcctagcttgttattccgagggtgtctaaaatagagacaattctagacgatggactcgataaaggctttgccgagtgacttagtcacttgacaaagaatgaaaggactctgtttcgntagcgtggaatcttactagatatttttcttttctagtatccatgggtttccttttacctgcatatcttggtcgtccagcatacgat

SEQ ID NO: 14537 - DNA, 1778 bp, Zea mays
  Clone ID: MRT4577_113246C.1
ttgggaccctcgaggccggccggggaacccctctcttcttcctccttccaatgcggcacggtccaacaagaggttggccagccatcccgcgcgagccacttcctctctcctccccatcggatccagcgccacgcggatccgcaaggcaatccatggcctctacccaggcggaagcggaggcgggggcaccggccccgcccgaggcggcggaggcgaaggagaagggcaagcagggcggggtgctggggagggtgtggcgggcgctcttcggtggccgcgaggacttcgagaagcggctgcagtacctgtccaaggaggaggcagccgtgcacgcgcggatgcgccggcggacgcagttctcgcgccgcgccgtgcggaacctcatcgtactctccgtcctcgccgaggtgttagctgttgtttatgccatcatgacgacaagaaatgaggatctaacttggcaaatgagggcaatacgagtgctacctatgttcattcttcctgctgtatcctctgtcatatattcaacagttgttaacttcacaaggatgtttgagcagaaagaccagaagacccttgaaaaattgagggctgagaggaaagccaagattgatgagcttaaagagagaacaaattattatctaacacagcagcttattcagaaatatgatcttgatccagccgcaaaggctgcagcagcttcagttttggcatctaagcttggggaggagactggcttaaaagttcatgttggagaagaaccaaagctggatgctgcagtggccagaagcaatgatgttgagatagtaccttcagatggtttgagaaacaggaagcaacccaatgcaagaggaagcaggactgggagccccacttctcataccccagcacagggaactgaaactaatctacctcctgctcctgctagtgctggcctggaaactgcaccagctccagtggtggtagagcatcatcaagggtcaggggctagtgatggtggtggatggattgcaaagattgctgccttacttgtgggggaggacccatcacagtcgtatgctttgatatgtgggagctgccatatgcataacggcttgtcccgaaaggaagattacccacatgttacttactactgcccgcattgtcatgcattaaacacatcaaaacagtccatggggcaatactcaggctccaactcaggccggtcgacccctgttgttctggctgatggattatctacttccagttcagtacaagagactgaattgagtaacctgacgacattgcaggagctacccgaggaaggaaagacagacaagcaacaagtggaggcaagttgatggttcttatgacttgtactgttgatgtgtgtggaactagtttatctttagacttatatcgtcatgtgttcaactggtggagccacaaatttagcactgttgtaaattggaaatagtgagtgatatgatcctcggaagcatagcacgcaaaaacaagaaatgggacatggtgtacatccttgagtggatgattttttgttgtcatatagagcgcgaagtcttcttcctgcgagacaaaaagctatatgacgttcagacaagatggtggtgcaggatataacataagatcattgcttgttcagagaacagcgacatgtagaattttttgcgtttgtcttgaccttcggtcttttctttgttgtttgttatattaccaccttacagcatttcgtacacagtttccttatgatgttgaaacggtacttttcatttggcgtt

SEQ ID NO: 14538 - DNA, 390 bp, Zea mays
  Clone ID: MRT4577_113247C.1
ggggaaaaattaccaatttccgaagcaaaccctttttttaataaattttatggatacaagaattctttctgaaaggggggagcccagaactccaaccaacgggaaaaagccgctgcataacatttgtttgggtggggacttcaacccacggcaaagagcagctgcagaacacttgtttggttggagacttcaaacttttccttggaaaggggagcttatgggggccccggggcttcttgcaacaagtggccagaggcccttgccctggtgggcccttgaaccaggacacacagtttggggtgtgacgtgaccaccgattccgggcagggtcagccggttttaggaccccagggtgggtggacctgatgtcaattcttctgcctagctttt

SEQ ID NO: 14539 - DNA, 679 bp, Zea mays
  Clone ID: MRT4577_113248C.1
cctcaggcggcgggatgatatatggtagcagtaccatacagccacaagattttcttgagctccactatttccattgtggcgcgcacgcgtataatgtagatgtgtactccgatcaactgcaagtctcacacacgaccacctgcaattgctgcgaaacaacgagtcctcgaaccgcctacgcgtccgcgtgccttgttggcctgctcctgctcgccagccttagaccgcccagcgcgcgactgctccggccgccgatggggagcgacgacgcaatcgatgtgaatatggaggtgaaggacgccgccgtcaacaagtacgcgccgctcctccttgccatgcatgccgagagagagcggcgccaccgtccgccccgagcggcggcaccaatgatatcccccggaattataaggaaccgtggagcgtagataccttgcacgcgcatcggaccccatgtcatatgccacaggaagtagataatacatgtctgacttttgatggcatgatgttattggatttaaccataacgcataacaagattttgatgtacaaaattcatcagattgaggtataccagactctacatgagtatagcataggcgtgaagtctaatagcttctttctttgtatgcttggttattttaagctaactgatatatctacagtattatatactgtgaaa

SEQ ID NO: 14540 - DNA, 504 bp, Zea mays
  Clone ID: MRT4577_113249C.1
ggcgactcgtccggtatctcagcagagtgcgtgggagcgagcattggaggtgaaccctgctgcgagccctgcgctagaggacttctctagagaccgctgcgcccgccgtggcaccggctttgaccaagctgaccttccatctcctgttcattcgcctgaccagtccaggcacacgggcaatgactggggacaggacggcggatgaccagctgggacaacagttggggagacagtttcccatatactatggcctatgctacggcccccacttcggcgctcacttgcagggtggctctgagcaaatcactggctaaaaccagctattcaacctcctattcaaggtcgagtggcttaacggctggatgctggtcaccaacctggtgatcaccggtgggataaacgagggggccatctactgtggcatctacgggggcaccatggtgaccggcgtgataccaagaatgatactaagaaggagcatcgacggtaactctgatgagctca

SEQ ID NO: 14541 - DNA, 300 bp, Zea mays
  Clone ID: MRT4577_11324C.1
cttgtgtgttttctattgttgactctatggatttttttacaaccaatttttccccgccgaaaagctgcccacgcccccgaagaggaggagactcaggccattgcggccggagggcttgtaaacccccccaaaacccaaaacgcccccgttctggggagggcaatagtggaccccatcccttcgcaaagccttggactgcaagggggacccccacccatccccggaccccggggcactcccctgatcccggccgccccaaaaaccacggggccccctacaagtctgacctgtataaacccc

SEQ ID NO: 14542 - DNA, 393 bp, Zea mays
  Clone ID: MRT4577_113250C.1
ccccggcactgccacaccggcagacaggccgcccaagctcaaccccccgcacgggggggaggtgttacaacctgccaccggacccgacgagagcgacaaacccgtctgctggcccccaagatcaggcccgatcagtctatacacaaagaagatcagacaggacaacgccaaggagacgggcacggactggaagggccttcgaatcaccggcaagctcaccgaccagaacccgcaggccaaagtctccgtcgacccctccgccgcggcgctcgtaatcaaggcgctcaaggagccagagagggaccgcaagaaggtcaagaacatcaagcacagcggcaacatcagcctcgacaacgtcatcgagatcgccaggaccatgaggcacaggtccat

SEQ ID NO: 14543 - DNA, 797 bp, Zea mays
  unsure (1)..(797): unsure at all n locations
  Clone ID: MRT4577_113251C.1
ggccgggnacatgagttatgactggcctagccacccccgaaccagaaccaagcgcggggcaatagaactatagaagtcctcaccccctccgacgacagcgccgatcgttacgccgccggttagtccggcacgtgaactaaccacgatctcccccgatggcgtcgtcgttcaagccgcacgccgcaccgaagaggcgcgccctcgccacgttcaacatcggggctctgcccctggacctcctcgtgtacgagattctgctgcgcctccccgccaagctcctctgccgactgcgcacggtgtgccggttgtggcggtccatcctctctgacccgcacttcgccgcggcccacgccatgcggcacccggggccgctcatcatcgccgccatcgatgagagacccgacgtgcacgtcaacatcatggatctgtcagggcaaatcttaaagcaggtgcgcggcgtgccgggtcagagagtcgtgagcacggcccttgacctcgtctttgtcaagaaaaccgatagcagcagcagcagctaccgattctgcaacccgtttagcggagacgtgcattacttaccagatcaattgctcaacccagcaactggagctgtgtatcaaataccaaacagcttcgccgaagaacacatagatttcacatcgagctttatttcacagtccagatatctgtttggtcaggttagcagcacaggggaatacaaggtgttccggaagctttaccatctttccgttcagtttggaggcaggcagctgctcgagatctgcacagtcaacggtagc

SEQ ID NO: 14544 - DNA, 971 bp, Zea mays
  unsure (1)..(971): unsure at all n locations
  Clone ID: MRT4577_113252C.1
aattcggcacgaggcttgtcgtcgtccccgactcaccgccgccgtcatcatgagttcatgactggcctaccgatcgccgcaccaggccctcgcgcggggcaatagaactatagaagtcctcaccgcctccgacgacagcgccgatcgttacgccgccggttagttccggcacgtgaactaaccacgatctccccgtaagccgtttgcgtcttctccgatcgcggagataacttttctcctcgatgtgattgctcctcacgaagatccccttttcctccctgtcccagcgatggcgtcgtcgttcaagccgcacgccgcaccgaagaggcgcgccctcgccacgttcaacatcggggctctgcccctggacctcctcgtgtacgagattctgctgcgcctccccgccaagctcctctgccgactgcgcacggtgtgccggttgtggcggtccatcctctctgacccgcacttcgccgcggcccacgccatgcggcacccggggccgctcatcatcgccgccatcgatgagagacccgacgtgcacgtcaacatcatggatctgtcagggcaaatcttaaagcaggtgcgcggcgcgccgggtcagagagtcgtgagcacggcccttgacctcgtctttgtcaagaaaaccgatagcagcagcagcagctaccgattctgcaacccgtttagcggagacgtgcattacttaccagatcaattgctcaacccagcaactggagctgtgtatcaaataccaaacagcttcgccgaagaacacatagatttcacatcgagctttatttcacagtccagatatctgtttggtcaggttagcagcacaggggaatacaaggtgttccggaagctttaccatctttccgttcagtttggaggcaggcagctgctcgagatctgcacagtcaacggtagcaacacccagggntggagggcagtcacgccccctcgaaaaa

SEQ ID NO: 14545 - DNA, 455 bp, Zea mays
  Clone ID: MRT4577_113253C.1
ctacagatcttgcccgtgcatgggtggatgaaacaaacaaaactatgtgaccggcactgcgcacacaaacagtgtgagggctggggccatatctagaaaactgacccctggactgatgatatcttgactaaaccctgacgacacgaatggaacccttaatactggctgtctctgatgctgacagaacaatctcacatgtaaacaacacacatcgcttactcacctagggtaagagtcacctaactaaggggtatgtagatgccatactgagcgccacaaaacgatgaccaagaagaaaatgctgaaacactgaggcatcttaaactaaatgaccgtgtgcctgaatgatacaactgaggtgcgttcaggttacgcggatcttctatagagcatgataggcagaggctaaactcagtcagcctagagctatggacagtaagaggtcttcctggtcc

SEQ ID NO: 14546 - DNA, 427 bp, Zea mays
  Clone ID: MRT4577_113254C.1
aataactcaagggacaggtcgccacacacggagactttttaacaacgcaagcgggttcctacaaagctagctcgtaaggaagctacctccaagacgctgcgatctccaccccaccctgcagaacctagctcactacaagaaaacagaactgctcctggccctccccgacgctgcacaccggctgcagcttttctaggctgacatgtacgacccctacacctctcagcccgccatcaaccgatgccacttcgtcttactcgtagacacaccccttacgcacgacccccccagcaccaactacaaaaacacaactgaaccaccgcttgactcggcgcacattattctcctgcagaactcgctatccttaacccttaagcacctactccacacagactaagtcacggcctcattgcctctcaaagaagac

SEQ ID NO: 14547 - DNA, 508 bp, Zea mays
  Clone ID: MRT4577_113255C.1
gccccacccgcggcccaggggaccacaggtgatgactagaaaaaaccgatgctgctctgctcttgattgagaaccacctaggttctatcatcacaagttttgattgtggcaggatgtgcaatcgcgccaactggggagcgatggcaagccacagcgactggcatactacagtatgtacacctctctttgtggtactcttctacacttgtggctgtactacgaatcgcatgatcagaactagtatcccatcctcggggctgttcgcctggccattattcagacagctgctaatgatcttcgaagagctcggtgatgaccgaggtctacgcgggggccgatctagaggaccagagtaaccctactaagaaaggaacaggatgaggatgtctatattgtgaagctatactaactcactggtggcttttgttacactgcttgaatgggaaaaccatagtggtgcccaacttagctcgatagctactcatgcgattttggccaggtagcacca

SEQ ID NO: 14548 - DNA, 633 bp, Zea mays
  Clone ID: MRT4577_113256C.1
tattcggcacgaggcagcagtgaacacaaaggaagctgaccatgccggggctcatgacgatgatggcgttggtgccatcgccgcccatgtcggtgaagcaatgcttctggagcagcagcaagaagacgagcggttgtacggtgttgctggtcaagaagcgttcttcttcgcaagcacatctcctcggccgcagctgggctccggcagcgacggcggccaccgcagccgcaactgcctttcgttgtgatgagcaggagctgatgatgatgcaccgcctggcggacgacgggtgggtggacgagcatatgctgccgttgctcacccccgtggaggaggcctggcagccagccgacctgctgccctccttctccgtctctgccgacgagcagcggagccaggtggcagacctccaggcccgcgcggccgccgtacccgacgacctcctcgtctgcctcgtgggcaacatggtcacggaggagggcctgcccacctacatgaccatgggcaaccgcgtgaccggcgccagcgacgccaccggctgcgacgaccatggctgggcgcgctggctgcgcggctggaccgctgaggagaaccgccacggcgacctgctcaaccgctacctctacctgtgcg

SEQ ID NO: 14549 - DNA, 287 bp, Zea mays
  Clone ID: MRT4577_113257C.1
ctcactctttctgcaactcctgctaccgcaaccatttttccacaatgctggcaagctcctatagcttcctatcttcccccatacctttaaccatccgtgtcttaatattgtaaaaacccaattcttcaaccttacaatatccaacaagcaatcgcagcaagcatcttacctttatcaccctcgttcctccaacaaccgtcagccctattacacacatttacctttggtgcatctgtttgcacaaatcataaaggtacaacaactacaacaacttgagctaggaaacc

SEQ ID NO: 14550 - DNA, 207 bp, Zea mays
  Clone ID: MRT4577_113258C.1
cccacgcgtccgctcttggatgccccttcttttccatcttcttcctcctcaaacctgggcgggcgctcaccatacaaaaccctagccacccccctacccatttctccccctcctccaaggtgcaaccctcccgcgtggttctccgacgtgtggctgcgatctcaattggagtttggagggaggaacgacgaagggaacaacccaagg

SEQ ID NO: 14551 - DNA, 439 bp, Zea mays
  Clone ID: MRT4577_113259C.1
ttgcgctgcgcggagcgagagtaaacatgccggaccaccgaaaaccgagccgtgcgggggctcgggactggaacggcacaggaccctaaaatctcaaatcctttctgcccgcccgtccgagcgcgttgacgctgttatttttgtacggccgcgcacgcacctatcgcttctccttctgcagggggatcgggtacaccacaagctgcacgatggtgctgttggtctttagataaccgctcctaatatggaaccccgggttctactttgacgacaaaatcctctgttttatcaagggcgtcaagcgcacctttaatcttgcttgattgaccacaaaagcacaacggagcattcggcgaggacctgcccgcttgaaacccacgacgagggcatatgctgaggaattgtatattgtgtccagggtggtacacacaaagagcta

SEQ ID NO: 14552 - DNA, 365 bp, Zea mays
  unsure (1)..(365): unsure at all n locations
  Clone ID: MRT4577_11325C.1
acgcgacgaaacctgggttcctttaaagtcgttccactcgtcttttattttccaccccgcgcctcccagatcgggcggggttgtgtattaacctcggccgtctacttcgcagctaaggggaggggaaagtttaaggcgaaacccacaagcctccgaaacttcttgacacataacgagatcgctgctggtacataaggtcggccacacaactttaagaagaactgcgataatgaagatgaggaaaaagacaaagagaagagtctgactaaaaatgtgaagagcattctcacgttaagactaaacataaacgcactgatggtatgatatatattgaaaatacaaactcngtgaatgctaccaatata

SEQ ID NO: 14553 - DNA, 205 bp, Zea mays
  Clone ID: MRT4577_113260C.1
aattctctcgtggcagttccaagtgagcagattctcatctcccgacgaggtgccgtcagctccgtcattggtgccctccatggatagtctcgtcgacgctgccatccttggctttctactgattgcgcagagtacgaagacatgcacctgcgtgtctccaggaaccatactagaaactctgcctcttcccaacacacctatgaca

SEQ ID NO: 14554 - DNA, 2158 bp, Zea mays
  Clone ID: MRT4577_113261C.1
attgggacctcgaggcggcgggacccggaggccggccgggaacggctgggacgtggcttcacttcacgttgagcatcctctctttccttttttccccaaactccaaaatccaatccaagcaactcctccccatgctcctcccgctcctcctcgccgccttcctccatggcttggcggaggcgcagggcggcctcccgtcgctgccgatcggggtgaactacggcgcgaacgcagacaacctaccctcgcccgccgccgtggcggcgttcctggccaagagcacgaccatcgaccgcgtgaagctgttcgacgcgaacccggccttcctcgacgcgttcgccgccaacgcgccctccatcgccctcgccgtctccatccccaactccgccctcccgtccttcgccgacagatccacgggcctggacgcggcgcgcgggtgggtccgcgacaacctgtccccgcacgtgtccgcgggcgccaacatcaccctcctcatggcggggaacgaggtgctgggccccaccgtggtgcccgacctcgtcgtggcgctgctcccggccatgcgccgcctgtaccaggcgctgcagctggagggcctgcccaaggtccgcgtcaccacgccgcactacctcggcatcctggcgccctcggacgggatcccctccaacgcgagcttccgcccggggctggacgccaaggtgctggcgcccatgctcaggttccacaacgacaccggctcccccttcatggtgaacgcctacccctacttcagctacaacgccgccacgctggactacgcggtgttccgcccgaacgccggcgtgtacgacccggcgacgcggctcaactacaccagcatgttcgacgcgcagatggacgccatccacacggcgatgaagaagctcgggtacggcggcgtgcagatcgcggtgggcgaggccgggtggcccaccaaggcggaggccgggcaggtcggcgtaggccccgaggaggccagggatttcaacgccggcatgatccgggtgtgcagcggcgggaagggcacgccgctgatgcctgggaggacgttcgagacgtacgtcttctcgctgttcgacgagaaccagaagcccgggccggtcgcggagcggaacttcggcatcttcaacacggatctcacacccaaatacgacctggggctgctccgccaaggaccgcagtctggatctccaaccccatctccggagccctcgccgtcggtcggcggaggcaagtggtgcgtggccaagtccggcgcgagcgcaaccgacctgcagaacaacattaactacgcctgtgcctacgtcgactgtaggccgatccagagcggcggcgcgtgcttggaccccaacaacatccactcacatgcctcgtacgtcatgaacgcgtactaccaggccaatggcatgcacgactatgactgcgacttcaagggcaccggcgtggtcacctccagtgaccccagttacgggagctgcaaatacaacgcctcctcctgacggcgcgcagcaagtccagctggcactactgcaccagcctccagtccacatcgtcctccagctccaggctccagccatggccacgctggggacgggaggaggtccgtactgccgccgggcttgcgccacatacttgtatactcatgtctcacacccatgcttcttgttgctctcaaccactactagcactactatttgtctagttccataattacaagtccctctcccctcatgttaacttgatcattgtccgtgtgtagtggactagtggtggtgaataaaatagcttccattccatgtagacaaacaaacaaattgtaacatctgttatccttgggttatttgatatatttatttttcatataaaaaaaaaaaaaaaaaccgctctatagccacaaaaaggttgacttttttttgcacgcgcagaagaggacaagttaactcaaggagtagctaaaggacgagctgtacggcacacagcggtgactgtgggcgtacatcgattctagaggcaacgtgctgcaggtcatcacgcagctctagatcccctaccgcaagcagaatcctacagagtgtcttacactccttaacgacacgtgccccctcgagtaagcttcgttttcccaactacttccactatt

SEQ ID NO: 14555 - DNA, 728 bp, Zea mays
  Clone ID: MRT4577_113262C.1
ttttttttttttttttttttctttttttttttttttttttttttgagaagaaattgcattggatagttttcctttttctttccgatcattaccactgacactacaaacctgaaactcgtcctttattgttgggggaccacaccgtttgaaagagtggaaaaaagatctactagcaattcagatcaaagagcaaacgagttattaaaacgaaagaaaaaaaaagaccccccagcagaagcaaatgcaagcattagtattggggcatgcccgatcaaatcgaccagaggagaacaacaaatcctctcggccttcattgcgatcatgcatgcccagcgctgatagacggggcctgatcatcagtggcgtcgggcgagcgcgagggcagataggaagatgagggctatgagcaggaccatggcggcgaaggagccgatgagtgagcccgagatgcgctcgcagaaggagtcgaactgctggcagatggcgaaccagttggcgcgcacgttgcccttgtgcgccaggtacacgatcgccgccgccgccgacgcgccggccgtcagcagggccagcatcgcctagtaataatccgaacagcaggcgttaagcaagttcttcctcgcctaataaatatgcaagcgacgtgaatgaaatgaacgaattaccgcgttaaagaagacgaggatcagacggctgtagtgagccctgggcctgacgatgtgcacgatgga

SEQ ID NO: 14556 - DNA, 1053 bp, Zea mays
  Clone ID: MRT4577_113263C.1
gcagtgcaccttagtaggtgggtacctttacggtacctgcagggaagcaaagcagatgtgcatgctccagattctcaaggaatgaaatgacatgaatgaatgttacccctaaaagctttgctatgctatgctttccgtgtgcttccatccaaacgaggatgctgatgccctggcaaagtagtgcaccacaccaccaccatgatgttgctttagggactgcttgtttgtttgtatatataatatatctcgtcacatgctaaatctgcagcagtctggatctccaaccccatctccggagccctcgccgtcggtcggcggaggcaagtggtgcgtggccaagtccggcgcgagcgcaaccgacctgcagaacaacattaactacgcctgtgcctacgtcgactgtaggccgatccagagcggcggcgcgtgcttggaccccaacaacatccactcacatgcctcgtacgtcatgaacgcgtactaccaggccaatggcatgcacgactatgactgcgacttcaagggcaccggcgtggtcacctccagtgaccccagtaagcagctgtgaattatctctctctctgtactgtgtacaactgcagctgcaactcatatttctcgctcgtgtgtcgacgacgacggcggcggttgcaggttacgggagctgcaaatacaacgcctcctcctgacggcgcgcagcaagtccagctggcactactgcaccagcctccagtccacatcgtcctccagctccaggctccagccatggccacgctggggacgggaggaggtccgtactgccgccgggcttgcgccacatacttgtatactcatgtctcacacccatgcttcttgttgctctcaaccactactagcactactatttgtctagttccataattacaagtccctctcccctcatgttaacttgatcattgtccgtgtgtagtggactagtggtggtgaataaaatagcttccattccatgtagacaaacaaacaaattgtaacatctgttatccttgggttatttgatatatttatttttcatat

SEQ ID NO: 14557 - DNA, 248 bp, Zea mays
  Clone ID: MRT4577_113264C.1
gttgaaaaaaacaacagatgggaacccgcaccagtgcatccactatatgtatgtgcaacaactatcgccatgatttagtgcaaaatggtgcatatcaccactctatttccatatacctgccgaggactaactttcgcggtcgggctggaaacatagaagatgctacagggctacatacaacacgcagatcaatatctcctattctctgcgacactcaaactatcccacagatcagatcgcggtgactg

SEQ ID NO: 14558 - DNA, 154 bp, Zea mays
  Clone ID: MRT4577_113265C.1
cggacgcgtgcgcgaaggcgtaggcgacagcgtgacccccattttcatttaccaaggctcgcacggctggctggtgaaggtgtcacattacaagggcaaggacctctgcctcacgagagaaaggatccctgtgcacttagtctcagtttgtgca

SEQ ID NO: 14559 - DNA, 816 bp, Zea mays
  Clone ID: MRT4577_113266C.1
actctctcactccacttcctccgatccaagctccacccatggcgctctccatttccgcacccacctcgtctcccttcctccccgccccccgccaggtcggcaggtggagctcgtcaccaagctcggctaagcccgcggtttttagcctacggaggccggttgtggtggcacgggccgccgccggcaacgcgccctcttcccccgcaggcgcggtcgtaactgagttcgacgtggtctccagcttcagcgagatcgtgccggacacagtcgtgttcgatgattttgagaagtttgcaccgacggcggccaccgtgagctcttcactgttgcttgggatcgcagggctcccggataccaagttcaagagtgccatagataccgcattggtagatggtgaatgtaacacaatggagaagcccggggaccggatgtcctgttaccttaccaaggccctggggaatgttggagctgagctggctcatcaagttcctggaagagtgtccacggaaatagatgctcgattggcttacaatacccaaggaatcgtccagagggtgcatgaactgttgcagatatacaatgaacatgatatcccatcagaacgtctgttattcaaaattcctgctacatggcaaggtatagaagcgtcaagattacttgaatctgaaggaactcaaacacatctaacattcgtttacagttttgcacaagcagcagctgcagcgcaagctggtgcatccgtcgtacaaatatttggtgaggtcgtattcggtgatgcgcaaagaatcactctggtgagccagagattgatgaagc

SEQ ID NO: 14560 - DNA, 416 bp, Zea mays
  Clone ID: MRT4577_113267C.1
ggagaagccagttttttttgggaagggggaaaaagggggacccatgaagcgggggttgatacaagcagattttttggtacttttttaaacgggcatttattacattataacacggggacacatttttaaaaattttttggacacaaacaatgatttttacaggttaaaaaaaaaggtgtgcccaaacattaatttgttgggcgctgtattggtccagggagaattttcattgcgattagcctcaacccaaaaaagggagaaaagctttcactggtgaccgggaataaaataatgtgggtgggacttttttttcaaggtggcacacccaggagttcattttttcaagggcacaatagaatgacaccctttttaaaggtaggaagggggagccttttgccgaatacatgatgggggaa

SEQ ID NO: 14561 - DNA, 337 bp, Zea mays
  Clone ID: MRT4577_113268C.1
cgggttgccaggcaagacacagacagcgctaggcgcgagcgcgacatctccaatctggcgatcaaactcgaggagctgcaagagtacaagcgctactcccgggagctgatgtgacaacaaggacgtttcatgcagacgtgctcacgccaaaggcaagctacaatctctgtgtggaggtgtggaaccagctaaagctcatggatgtggtgataacactgatgctacagttataagctgaattgcaaacaggtaataaattgctagatagctggggaatattctgcaaatgactgagatgtacatgaatgatactatcatggatcatgaaggctactat

SEQ ID NO: 14562 - DNA, 156 bp, Zea mays
  Clone ID: MRT4577_113269C.1
tttgttcgcgcgggcgcccacgcacagcgccacggcggcagtgatcaagacaacgcccctagcccacccggcacgcaagggaatcggcaggcaaccagaaggccacgccgaaactagatgaaccacaggggacccacaaagcccgcgacaagcgcg

SEQ ID NO: 14563 - DNA, 460 bp, Zea mays
  Clone ID: MRT4577_11326C.1
gttgttgtgtttttttgttttgtttgggtgtgttggtttgtgagggtcaaatcatatcatggggggccaattaatatagggggacaggagacgcaatcgggtcaaccaacatgcatggggacacacgtacatgagcacaaagactgggggggagcatgcagagggggggaaagcaaactgaagaactcggggggtctctgtgtctgacacaccaaaaaatacctatggatgggagccaggtggggctggcttattgtgggggaaccaccaccacaaggtagaggggataaaaatgatatgcatgggcggcgatcgatgggatcagcagggggagggggggcacttggaggtggtaccggaagcggaggggggggggggctagccggagtccggcgggggctaggagaaatggggggcgggcttgttgtgcggggccacaccgaggacgacgggggcctgg

SEQ ID NO: 14564 - DNA, 1980 bp, Zea mays
  Clone ID: MRT4577_113270C.1
cgggcggtcggcgcgtgcccgcccccagcccccgccccctgccggccggcctcccccctacgccgccgccgcacacggcctggccccccggggcgcccgccgcgccccgcccgctgcgcccgcgcaatcgctggtggagtccttctgcggcgtgacctccgcgaccccccaggaggcggccttctatctcgagagccacaactgggccctcgaatccgccgttcgctcctactacgactccgtggacggtgaagccgacgccgtcgcggccgatccagtgcccccaccaccagctgcaccagccggaggcggggaggataccgaggatgaggattgcgtggtcggcggtggcggtggcggcgacgacgacgaggatgatgaggactacgtcgatggcgacggcagcgatgatgaggacgctgcgctcgcggctgaggccgcggaggaagaggagaggaggaggcctttcaagaggctgaagagaacccacgacgcgcggggtgggagcggtagcagtgccaaggcgcgggggaatgtgaggacgctcgccgatctcgatagtggcaagggaaccgcgggttccgacgagaactccgaagacgatgatgaatggacaccaccgcccgagtacgagacgagagatcgatcaagacgtaaaaacaacacagatgagatcttcaagcaagctaaaaagaagggggctaagcaaggtccgtttgaggctcgtccgcgatctagttcgaggaactttactgggactggtagacttctgacaggtgaaactgtagagcgtaatgcatcacagccaccagaagaaattacccataacatccacttctggaggaatggcttcacagtaaacgatggtccacttagaagttttgatgatccagcaaatgcaccctttttaaagagcatcaaggattctgactgcccaactgagcttgtgccggctgatgagaaatctatagtgaatgtgaatcttgtccggacggaagaagaatttactgagccagtcaagcgtgctgctccttttgaaggggaacgaagaaacctcatggaaccttctgataataatacttccaatgctgctgctgctgctgctgcttccagtagtgcaactgcttctcggacaatcacagtggacgattctttgccatcaacctccctccaaatcaggttcgcagacggcagtcgcttggttgcccgtttcaacacaagccacaggattagtgacgtgcgggcatttatcgacgcgacaaggccaggagccagtgattacacgctgcaggccgggttccccccaaagccgcttgaagacacggccaagaccatcgaggaagccggcgtggccaactcggtaatcattcagtcagtctagcttggcagaacaggtgccgcaaccctattccatcgaacacgctaggcatctgaagctaccaccttccttgatcttccttcattttgtttctcaaacctggcttttaaccttttatcttcatccagtagctacttctggtattgcgagtgtaaaacagtgaggtctgggtgtcctacatcttattcatctatagcatatatagtactacttgttgcatacagtactaaaaaaaaatgaaaagggcgccgctcgccaggttaagcatgttcacaagttacgttggcgttctttcttggtgctgcataatgaacgggtctcgtcgatcgctagtcttttttcaatgctaaagataccattcatgttctacttttgtttgaccattacttgcgctcccattccagttgtgcgttgctatctggtgaccgcccattccgttaaagtgtggaatgtagaacgggtctcgtcgatcgctagtcttttttcaatgctaaagataccattcatgttctacttttgtttgaccattacttgcgctcccattccagttgtgcgttgctatctggtgaccgcccattccgttaaagtgtggaatgtagatg

SEQ ID NO: 14565 - DNA, 455 bp, Zea mays
  unsure (1)..(455): unsure at all n locations
  Clone ID: MRT4577_113271C.1
ngaattttaagaattattattaaaagaaagttgcaatggagttcctagaaaattttcctagataccggatcaagattcaccctatgggaagctatccaagagtcacagacatccagaataacacatatgaactgtttggtcccgtgaatttgttctggagcacccgatttgacaaagccatgacatggtttcttacttgcctgcaagagtttgctgagtttgccataagtttggataagcagaacaatgttccccctgaaaaatcactgaagcttccctacaagtaagagtttttgcaaatctattggtctcataatcctcatgtttatgtgccctggctagtcttgtcattcatgccatagttattgagactaaactggacatttaactggggaggttcttggttcagtagctatgttacaggcatttgaattacatgtttatgcttctgacct

SEQ ID NO: 14566 - DNA, 508 bp, Zea mays
  unsure (1)..(508): unsure at all n locations
  Clone ID: MRT4577_113272C.1
gcgcgaggtcctggnacgattaagcattcaccgtggcctagacagactagacgacctcatgtaggagtaccagaagtaccaggacacgactgtcgactaggatgactacaaggacaaggaggaggtgcaggccaatgacatgtgaagggagggctgttatgacttgaatccttgtggagcctatggacacagcggtcctttatgtagttggttgttgccttttatgatagtgacatgtttctactgatagggttcacacccttgtggacgatttcgtacctaagtgtacgaatgtatttttattgtgctatcgaaccttgcttttgatacggtactatcctgatagtatactctgcgtatgaggttcctgacgataatttaagccttgcatatgcaatgattgaagttgaacaccggctgctcagtacaggcgatacaattgtaagcaacatactatacactcatgttctccttctcatacacaaaatgccattttccgccgtcgcac

SEQ ID NO: 14567 - DNA, 490 bp, Zea mays
  Clone ID: MRT4577_113273C.1
tggcttggaacctttgggctgatttatgtgcttgtaggccgtcccctccaaactaagaaaacgccccgctaagacagtcacatagctcggacgcttcccagctttagcccctcgtcccgggtagagtcacgtacataagcggcggaggttcggcggcaaaccgcccactaagactgtcagagtagccaaacccatcttcaccactcctcgggacagacccggtatattaccttttcctttaaaatttacgtacgcggctgcgggcaaattaaccgaagctaacaagaccttttacttcataaccgatgagataaccgtaatagcacgtacgcctccggtgggaaaagccgaagaaatatttagattctcgaaggacgctacaatctccctacacgagactaccttataaaaaggacttcgtcgtagcctaatgaaccacatagaatgaagcccacgaataataaagggaatcaaccccatctggggaatg

SEQ ID NO: 14568 - DNA, 570 bp, Zea mays
  Clone ID: MRT4577_113274C.1
ggcagagagtagtttttctacaaaggtcacaactatacaattcaatttcatgttcaaataaaagtttttataccaaaaatcagaacaaaaagagaaagggctgaaaatgaatggctcgaatctggtaaaactggaggggcaaagtaaatggcaacacaacacaaagactctgttccattaactggaaaattatggctcttcgttggtatttgcaggttttctcggggagcaaaaacggaaatcgaatagcatttgaaggctttccccgggaaaccggactcggtttactttttttctcgaggtttcgactggtgggtttatgcaattaatcagagctggaatcataaaattcgctgggacaaggagtcatgacctctgattcaagtaactggacaacccgatgcatcgttggacgctcttctggactcggagacacacactgtgttgctattgatagtagagcgtcaaggctctccatctgcattccttcacagtttggatcaacaatatcccttggccgttttttgctgattaagaactttagctgtaaatcatgagtcaaaaagcttt

SEQ ID NO: 14569 - DNA, 669 bp, Zea mays
  unsure (1)..(669): unsure at all n locations
  Clone ID: MRT4577_113276C.1
gtacctcgagccggccgggaaaagaaaaataacttgctcgctgcggcgccgcctccgacatcgtcccttcgtccccacgagcaaccgataatccgacggcgttgagatgttggtttatcgggatctcctatctgacgaccagctcctgtcggattctttcacctacaatgatctcgagaacggcgtcctgtgcgaggtcaaggaaaaggggcgcacccaaggccctgttgatgtggacattgatgccattccatccaccgaggatggggaggaccaaagctgtgatgacacggttgtgaaggtggttgatattgttgacacattccgcctacaggagcaacctccttttgacaagatatcatttcgtgtcttacatcaaaaaatacatacacgaatctcactgctgtgttgtgatcacagaaagcggatgacttcaaaaaggatgtcggagggtgcaaccaagtttctccttagcaaggtgagggacctccaattttttgttggatgagcccatgaaggatgatgcgactgtgctattcgcctattacaacgatggagacattaatccgagattactctatttctctcatggncttatggagatcgagtgctaggcgtgcggagaaattagttacccatgctgcgtactatctatgtactattattata

SEQ ID NO: 14570 - DNA, 864 bp, Zea mays
  Clone ID: MRT4577_113277C.1
ggccggccgggagttggcatctcctagccacctcgaaagctcgaggccgaggatcccatatatagaatctgtcttttatactaataggttttagtttatgggagaatctacacggcgcagaagctaggtagctttcttaataatctgggtccagtccagcgagcttccctgcttccccttgccctcgatcgaccagctgcgggcccagagacatccatccatccatccttccttcctggctgtaagaagaggagatggtctcatggccgtgatctcacatcgcggagcgctcgtcgcggccgtgtccctctgcctcctcctcggcgccgccaccagcatccgcaccgcgacgttttccccttctcaggcgcaggagaacctggcggaggacaagtcgcggctggggtcgacgccgccgatctgccgcaaccggtgcagcgcctgcaacccctgcatgcccgtgcaggtgacgaccgcgcccgcggggctcgggcgcgcggcccgcgtcaccgacgccgacgccgacgccgacgcggtggccggcttctcccgctactccgactacaagccgctggggtggaaatgcggctgcgacggccgcctgtacgacccctagccgagcgtgcaacgccagtgcactctgctccggtccggtagggtgggggagactggaggccatccaggttcttcgtgtcatctgttcttggtttttgcccatgggccatggcggcttgcttgcattgcagcttgtaccgcccgtagccgtagccattttttttttgctctctgctgaaacaatttattactcgcgtgtaaagagtaaccgtgaccgtgagcagtaaaaattgtagtggttaccgaccg

SEQ ID NO: 14571 - DNA, 167 bp, Zea mays
  Clone ID: MRT4577_113278C.1
aatcacacctaaatacggaaatttgacaaaatttagggcctccgactaccacatctaataaatcatcacacgaacaactcctgttattgaactctaaagctgcaaaactgcatgacatcttatttaatcattagcacttaaatcaaaacaacaactacctttcatac

SEQ ID NO: 14572 - DNA, 1020 bp, Zea mays
  Clone ID: MRT4577_113279C.1
cgcgccgcgctagtaattcaacctagtacgagagggtcatcgtctcgttcctctgctcccttttgcaacctcccttcatataggccactgtgacctgcttccctttcgcagttgctcatctccatagccacctcggaagctcgaggccgaggatccacatatatagcatctgtcttttatactaataggttttagtttttgggagaatctacacagcgcagaagctaggtagctttcttcaataatctgggtccagtccagcaagcttcaccttgccctccatcgacggatcgacctgctgcgggcccagagacatccatccatccatccttcctggctgtaagaagaggagatggtctcatggccgtgatctcacctcgccgagcgctcgtcgcggccgtgtccctctgcctcctcctcggcgccgccaccagcatccgcaccgcgacgttttccccttctcaggagaacctggcggaggacaagtcgcggctggggtcgacgccgccgatctgccgcaaccggtgcagcgcctgcaacccctgcatgcccgtgcaggtgacgaccgcgcccgcggggctcgggcgcgcggcccgcgtcaccgacgccgacgcggtggccggcttctcccgctactccgactacaagccgctggggtggaaatgcggctgcgacggccgcctgtacgacccctagccgagcgtgcagcgccagtgcactctgctccggtccggtagggtgggggagactggaggccatccaggttcttcgtgtcatctgttctgttggtttttgcatgcccatgggccatggcggcttgcttcacaagcttattatttctctctctattctctactagttcgagcttgcagcttgtaccgcccgtagccgtagccatttttttttgctctctgctgaaacaatttactcgcgtgtaaagagtaaccgtgaccgtgagcagtaaaagttgtagtggttaccgaccgctgattggtgaaaaaaaaaaaaaaaaaagcggcc

SEQ ID NO: 14573 - DNA, 443 bp, Zea mays
  Clone ID: MRT4577_11327C.1
aaaaaaaaaaaaaaaaaaaaaaaaaaaaaaaaaaaaaaaaaaaaaaaaaaaaaaaaaaatcccccctttttttttggggcttccgaaaccccccaagggaagcttcctagcaacggcttaacaacaatgggttccaagatttttgccctccttgggctttttggcctttttgggggggcaacaaatgggttcattattccacaatgcgtacttgggcctagggccattataccaaagttccttcgaccaggtactttaatggggtttgaacacctaggtggggaagcctacagggtacaacaaggggttgggggggggggtttacaacaaccaattaaccaattggcacaacaatccttgggccatttaaccatacaaaccattggaacccaacaggaaccacggttcctaccagcattgggccaacttgggggggggaaccc

SEQ ID NO: 14574 - DNA, 608 bp, Zea mays
  Clone ID: MRT4577_113280C.1
atacccaaactgccatgcgggaaaatagatagacaaaaaaaacgggaacttaaccaacacaaaacacaaaaagctggacccgggggaggcatggggcaccgggcccactgaccccgggccccaccacctttaccacccgacgcacattttttttaacccacgttatttgaagcccgcaccggacacgtccacccaaaagtaattgttagttacgtaccgggtttcgtacgaaacacacccccccccccccagagagacccccgtaaccggagggtactgaacaaaaaaatcccgggtaatactgccatgtacccccccgaaaaaataccccgccacgggcgcacgccaatcccttggggcctgggccctggccccccccctttggtgcccacggccttatttgttggccttttggggctcctaaagaacaaaaacctcccccttggggggcggtttctggggacccccaggagcaggagcaggaacctccggtttgtccgggggaagctttttgggagcaaaaaccttttccttgggaaaaggtttggccggggggggcttcttggaaccagcaggaggagcagcagcagcctcctccttggggggtg

SEQ ID NO: 14575 - DNA, 373 bp, Zea mays
  Clone ID: MRT4577_113281C.1
ttgttcacgcgttcgcaccttcactatttggttgtgcactctgccgggcactgtccttgaccaggacttacacaatcagatgtccacaatgctgtcgagctccagatcgagatctgggccgatcgagtgccgcatcaggcggaggagaccgtgcacgcaatgctccaacaaccggccctccaagcagtgctccaaccaccggggctgcacccgggggggcaccaggaggagcagcgtcaggacgcggtccacgccgagctggcgcagcatcggcgcgggctagtttcaagtccgagcccaactcggcggcgcaggacgccgggcagtagccccagctctcgttggagacgctcgagagatacggggacaccag

SEQ ID NO: 14576 - DNA, 152 bp, Zea mays
  Clone ID: MRT4577_113282C.1
actcatatatcctttctggtcacataaattcttgccatttaagaccagcactaaagaagatcaatgcatgatgtttgatttgttgacactggaagaggcgactaattgaggccgttgtcattaacaaaccaagttggtcattttcgaaatgc

SEQ ID NO: 14577 - DNA, 191 bp, Zea mays
  Clone ID: MRT4577_113283C.1
ccctccttacactaacaaactttttcctactgagtgtcttttaagccggtgcagggaactcaataacacaattcacacacaacttgggatccacgcacccttttttccctcctccgacagggtgcgcagaatccatcacattcttaagaatctccgaagctgcaacacaggcaagccaacacgtatggatc

SEQ ID NO: 14578 - DNA, 150 bp, Zea mays
  Clone ID: MRT4577_113284C.1
gcgctaaaacgagcgctgtagttatttggatcagtgtcagttttattgactagagcgagtccgtactataaacaacggggtgagccgtcatagcaccgctcaacaatccgaacagttgttctaacgtggtttgtccagctattgatggct

SEQ ID NO: 14579 - DNA, 464 bp, Zea mays
  Clone ID: MRT4577_113285C.1
ttttgtttttttttgaagagcaaaactagtggggttcgttccgggtgggagagcacaagaatactcgcatcccctcatggtacaaatcacgacagaaactagtggtgaacaacacattgtcctgtcacgccgcgtacccggtgctagcttaaaaccctgacgcgaacttggtggcgtagacccatgcgtcgttggcgaccgcgcccttcgaggcggacgaacaggttctcgaggggccccttgccggtgactatggcctggacgacgaagccgaacatggagaacatggcgaggcggccgaccttgatctccttgaccttgagctcggctaaggtgacggcctcgtcggtgaggaccagcgggtcgaagtactggcccacggggtaaaggtcgatgccctcgtcgacgccttcatgcccttgatgcggaagccctccacgaggcccatgaggatgacctggaag

SEQ ID NO: 14580 - DNA, 793 bp, Zea mays
  Clone ID: MRT4577_113286C.1
tacctcgaggccggccgggataacattctcaatattccaagagtcctccccagatccttacagtaacccagcacaaattaccagacttgattgtagttcataaaacctcagtcatcatggatgtctactacttctactcctacggcaccgctgcatggctcatgacgcaatccgtgcctctcattacctcccccacaatgatcgtagcattgctgtcaccagaggttcgcgaagcgacgactctggaagtctacttcagccgttcgctcggcctcacgctgatagcgttgggaattcttacggagctcctcacaggctctgtgccgttatcaagtcgtctctcagaaggcgcaacaacccaagccgaggatccaaaagcaccatacgcactgccaacccttaccataaccgccatgttccacgccgcttatgccttttatggatacgccatgtggaccaagactggagtcatgtcttttagcctgggtacacttggttctggtttcctggccacgatcgcgctgtggtgcatcttgttcgctagtagcaacggcaggatcagcaggaagactggtgcggataagaggacgagtgggttcccattcaagaatgctgaggcagacaagaggaaggctaggtaaatgcttagcactaaacggcctatgaaaagtctctggagcggatggtgggcgcgaatgacgcgcttgcaacgcttgcgtaacatgaacatgcaagtggcgcctcgtcagcatggagctggaatgcacatgcagaaactagcaccccacacaca

SEQ ID NO: 14581 - DNA, 337 bp, Zea mays
  Clone ID: MRT4577_113287C.1
gaagtgaggtggtgatcactaggggatgtaaatatgtgttcttaaaacggaaaaaatcaaaaaaccgaggcgcacgggatacccttatttaaggggtcacgatggcatcactgacacgggggcatatacgcagttcggactccattatgaggaaccaagacggataaaaaaaaacctagctcacatcatgtagcatacctgcttaatgacacatgctaatgaaactatctgaactcacattggagtctgcttgccgaggtgacagttagcaaacacattcatattctgcatgccgtgagagaacaggtggagctcacacagagcctacttaatgcta

SEQ ID NO: 14582 - DNA, 341 bp, Zea mays
  Clone ID: MRT4577_113288C.1
aacacgcgtacgctcacgcgtactggacaagctcaaggctgagcgtgagagaggtatgacgattgatatcgctctgtggaagtcagacaccaccaagtactactgaacggtgattgatgcctgtggacaccgggacttcattaagaacatgatcactggtaccttcgaagctgactgtgctgttcttatcattgactccagcactggtggtatggaagctgatatcttaaaggatggccagagccgtgaacatgctttaactgcgttgaccacttggagtgaaacaaatgatttgctgttgcaacagaatggatgcatgcactcttaaatacttccaggca

SEQ ID NO: 14583 - DNA, 333 bp, Zea mays
  Clone ID: MRT4577_113289C.1
agcgcagcgtaagctctgggaattcggctcgagggttgttccctttgaagttttattgcgttttgtactagacgttccttgggggtgattgctgtggtaaaacagggaacgaccattgtcatgaggaaactcgggctttggaacacagttgcgctagtgataattgagatcttggttcggaggtctggcacccttctagggtgggacggctaggcgaatgtacaaataacaacgcactttatgatccagcatattgcagcgctattgtatttctagggtcttgaactgcctgtggctgtgggtgttggttgcctctaaaccccatatgatggc

SEQ ID NO: 14584 - DNA, 391 bp, Zea mays
  Clone ID: MRT4577_11328C.1
attattaggaaatataaggggtggtttcttggaggccacatacattatccaaaaaactttattattgaatgacaactaataagcaatctaaaagagggcacccccaatgatgtgttgttgggagaaggctgctgggcttgtcaaagcaagttggacaaagggcaccaacctgtgcagttgtaaaagggttgcggggttagccacaaactggtggtagaacggaagcaattgttgttgtgtcaaaaaggaagcggggctttgttgtaactatctttccaaatgggaggagtttttgctgctgtaaataaacagaggggttcagtgcggcgaattgcttaaatggaaaaaattgttgctgctgaaaataggccatatctatctggctgaatgg

SEQ ID NO: 14585 - DNA, 246 bp, Zea mays
  Clone ID: MRT4577_113290C.1
ccccggaccggccggcccggaattacccacgcgaccgatttcaaacctttatcacacgcggcacttgccccccgcgagggaacctcaccgcccgccaccagctggatccacaagcgcaacgctcgacagggctcaccgcctccatcactgatgcaacactgcaggccgcaggaactgaactatccattagataaaggcttcccgcccccccgagcgccaacagacaacgatactcactgaacagcc

SEQ ID NO: 14586 - DNA, 580 bp, Zea mays
  Clone ID: MRT4577_113291C.1
ccggccggacttccctctctcctctcctccccccggctctctgatgaggcaataaatgcctgcgctacgcccattaatgtctcgagatggagagctactggacggtggtgaccacaacccgcctctactacgagcttttcttcttcttcctcctcgcgtctgtctgcttttcttcttcttcctcctcgcgtctgtctgcttttcttcttcttcctcctcgcgtctgtctgtctcatcattccgccatacatatacttgctccccgctcctgtgtagctctgcgactgcgaggaacaagagacgatccctcggcggcagccggcaggaaaccaatgcaattgcaatcagggatgacaagttgaaggaagataggccttgggatcaattaggcctctaaaccacatgatgtagacgtatcacgtatgcatgtgccgtttgttcggcagtcgagatcaccataaactctggatctgagaagtgtaccattttcgatcattgaatgattccccctcgtgtaccattcgactcgggtttttttttctttctttcttgaggatgatgcatacggatacggctgact

SEQ ID NO: 14587 - DNA, 519 bp, Zea mays
  Clone ID: MRT4577_113292C.1
ccggtttgaattccctttcgctacacgtgtccaagatgtcggaaagaagcacggggacatggaattccatgatcttcgggctggcgaattccggtcactgccaagaagccatcggtctcttcaaccggatgctgtgcgacggagcaaggccggatcacctgacgttcaccgccgctctgacggtttgcagctacgccggcatggtggagctcgggaagggcctgtaccgcgccatgcaggaagaacacggcatcgagccgaggctggagcattgcgcatgcatggtgcatttgcttggccgagccggctggctcgccgaggcttatgatttcatcaaagccatgcccctggagcctgactgcttcgtttggggggcgttgctgggggcatgccggagccatggcgacatcaagcttgccgagctggctgcgtcccacctgctaaccgtcgagccggccaatgcagcaagttgcctgctactctcggactcgctggcaagtgtaggcagacaagatgatg

SEQ ID NO: 14588 - DNA, 774 bp, Zea mays
  Clone ID: MRT4577_113293C.1
ggcgattgggttcctcgaggccggccgggacggttgcctcttgtctcgtgtggatactggattggctgtatcatatatcaccatactgtaccaggttgacgagcgaggactaataacagacaacaatggcgttcatgcggtactaccgtgcgctgccgcagggggagacgacggtggaggagttcagggcgtggctgagccagttcgacgcggacggcgacggcaggatcagccgggaggagctggagcgggcgctgcgcagcctcaacctgtggttcgtgtggtggaaggcgcgggaggcggtgcgcgcggccgacgccaaccgcaacggcgcggtggacggcgacgagatgggccggctgtacgccttcgcgcacaagcacctccacctcaagatgagccagctgggcctgggtctgggcctggaggagtagcgctgggccgctggcctgctagagttctaaggcgttgccgggaacgctgggtttttcgctgtaaattggactgttattagactcaagtggtcgtgctagctcttggtcgtggattttgttgtttcataagctcggcaagtagaggtggtgatattaatttgtaaatgaaagtagtatgtataaactctttttttttcgattacataggctacaccagcaacatatacttttatgaatctggacactgtaaagttttgacaaatggacgtgtggacatattatgctgctcatcatgggaaaacaatttggttacaaatggtcctctgatgcactcattaga

SEQ ID NO: 14589 - DNA, 1023 bp, Zea mays
  unsure (1)..(1023): unsure at all n locations
  Clone ID: MRT4577_113294C.1
gccggccggtccgttattcttctccaacccgatggtcgctgtcgtctaatctaccgcgcgcaagcctcccctcggggctagatctccggtctccgcttgcccaatttccaccactgaggcgatgcaggaagccaagcacctcaccacctcaaagcttccgccgcaatcccaatcctcatccccatccccttcggctcccgccgcgaaccctcccccataccatcacgactatggtacctttcaccggccgtttcagccgacgctgcccgtcgtaggccccgcctaccatgactaccatgcctctcctatcgggttcggcagccaggggttcgttgcctccccgggcgccgtccagcagcaggtcttcgtggagggcatccccgtccgagagccgcccctaccgttctgcggcgtcggcgtcggctggtttttgttcttattggggttcttcttggcggcaatcccctggtatgctggtgcgttccttctattctttgttgctttggaccacagagagaagcctggattaatcgcatgcaccgttgctggcatatttgcactagttccattcatcctgaacggtatcagattgaaccctttctggtgatcagtgcttgccaatccagatccacatgactaatgttttcagcaccacattcgatatgttcatagctgtattattttgctcaaacttgcgaagaacaaaatatatgagcttatgtgtaaaaaggaattgccatgctgttttatgtccgcagcaggttcatgccctgtgatatgtgtaatcatgaattgtacagtttatctgtaccgcagcagtttacgagaggtctagtaaaagcacattttacccaaaaaaaaaaaaaaaaaagcggcccagctcatgtaccaaggcgacacggatcgagctaatactgtgcggcatgtntgtttggggcaattgacgttcggttgggggtaatttaaacgagggaacgggagtttcgagttaagagttaagtttttttttgttggtttcgtgga

SEQ ID NO: 14590 - DNA, 886 bp, Zea mays
  Clone ID: MRT4577_113295C.1
acctcgaggccggccgggccgggattcccttcggctcccgccgcgaaccctcccccataccatcacgactatggtacctttcaccggccgtttcagccgacgctgcccgtcgtaggccccgcctaccatgactaccatgcctctcctatcggtgggtgctcctgtcccggcgctattaccctcgattctcgcccttctggtttcgagatatgactcgatgcttcggtctgttcgttggcgctcagggttcggcagccaggggttcgttgcctccccgggcgccgtccagcagcaggtcttcgtggagggcatccccgtccgagagccgcccctaccgttctgcggcgtcggcgtcggctggtttttgttcttattgggggtcttcttggcggcaatcccctggtatgctggtgcgttccttctattctttgttgctttggaccacagagagaagcctggattaatcgcatgcaccgttgctggcatatttgcactagttccattcatcctgaacggtatcagattgaaccctttcagaagatcagtgcttgccaatccagatccacatgactaatgttttcagcaccacattcgatatgttcatagctgtattattttgctcgggcttgcgaagaacaaaatatatgagcttatgtgtaaaaaggaattgccatgctgttttatgtccgcagcaagttcatgccctgtgatatgtgtaatcatgaattgtacagtttatctgtaccgcagcagtttacgagaggtctagtaaaagcacattttacccatcttttgaatttgccttacaatcttgtcaatctcctataacaccattcagcgtctatgaatcttaccctggatgaataaccagataaaaatataaatt

SEQ ID NO: 14591 - DNA, 674 bp, Zea mays
  Clone ID: MRT4577_113296C.1
tttttttttttttttttcgagcggaaatcttattacaaattctacaagttacataagtttacattatatttaccagagtgatacaaaagtgattcaaagaaataaactttgaaatattataaattatctataagtttggaatatatatgcttagctcaattaaccatcctcaataagaagtatagaagagttacttatatttataagaaggtcgtgcccaacgacgcttaaaccaccaatcacaatccaagcgactcgtatcctgggtaacactaagttagtgttgttagacgacgaccacttgacgatcatccttgtcctagcacttggtcaggcaggttcgtccatcagcatcaccatgaggagtagcccgcgcttggggtcgacttggctcgtcttccgcatcacgtggttaattcacgtaccatactaactctgacgcgctatccgcgagcacgacatggattccagttcggcccttgtgtcgagtacttggtgaacatcatgctgctaactccgtcttcacccgactcttgggatttcttgatgacacacagaacgacaacgaccttcgattgaagtctttgaccgagcactagataatcaatgcacacggacctcgtttatttttgcctaactttcgggagtcgaggtttgacgagcggacgcgtggg

SEQ ID NO: 14592 - DNA, 587 bp, Zea mays
  unsure (1)..(587): unsure at all n locations
  Clone ID: MRT4577_113297C.1
atcaatacagacaacagtttatttaccacaaaaaaaaagagggaaaaaaaaaatacaataatccacattttccagccaagctgcctctttgcttaagggaactttcccctaaaacgcttcccaagccgtatctgaagaaagtagtagcaatagttagtttaacaatgcaaaaacttcacaatcagatacagctcttaacattacattaactctatgattatatattcatatcaataaaccccaataagcaactgtttcaccttgattcataaaaacacccaatctaaaataaatgacaaatgtattcaagttttaaagaaaagaaagccatacatggatcaaatacaacttctggagaacaatcaaatagtcaaatagatggaaatgtgtcacagctgattaaggcaaggaaatacaatttgactctttgcacatgtttgacttcaatggaataacccctttcaattaaagatactacactgaactctgaaagtaaaaatcaatgctgaccatgantaattcacccttaaactaggcctnacaaatggaaactctatttatacctgacatgcctatattttgtgctc

SEQ ID NO: 14593 - DNA, 160 bp, Zea mays
  Clone ID: MRT4577_113298C.1
aaaaacgtgcaggtgggaacaacatcggtggcgcgttttaaaacctcccttgttcacggaacaaaattatgtgccaccactttggggaacaaacaacagattttggcgaggccatcacacaattgtttaacccccgcgacgagaattaaacttctccttt

SEQ ID NO: 14594 - DNA, 372 bp, Zea mays
  Clone ID: MRT4577_113299C.1
ctagggtgcgactcgctgccatttgttcgggcatgttgaacatacaggtgtgtcgcaagaaattcttaggggtccagaaaccagccttaaaagctccttgtggctccaagctgttaaaaaactacaaaatgtttactggacactactacagctcgatcaaagttgtttaatatatttttctcacaacttccttctcaaacccgttacatgcctgctccgacgtcaaagttgtttgagttgttggctaaacccgtcctattactttttggtgatcaagaacccaccaaaaactactgctcgttacacctacgccgtacttgagatttgatccaaacacatacttgaaatggggtcgtcttattccattcgtgg

SEQ ID NO: 14595 - DNA, 451 bp, Zea mays
  Clone ID: MRT4577_11329C.1
cccccggcaggcaccggaccggaataaatctcccgggctcgcacgagcctcataatgctcggcgggcgcggcccctttcttcttctctttttgtggtgatatgtctttatcatatgacttttcttgcctgtgacacacaccaatcatcaccactcgtcattatcttttattagatgccacgccagacaaggggggaaccgggatggtaaaacaacaaatctggcgcctccaaaaaaaacctataataaaaacagcaaaaactgccaaaccccccgggcctcaaaaaaggggagcggggaatctaaaaataaaacagaagaaaaaaaagggaaggggtaaaagaaacacagtcacccaggggggcccccgaatgacagggggggccgggcaaaaaaaaaacaaacattacctcagcccgaccaagggactcaaaactcccccagggcccggg

SEQ ID NO: 14596 - DNA, 287 bp, Zea mays
  Clone ID: MRT4577_1132C.1
gccgcgggcaccacgggacacgccacgcgcgtcggccacggccacgacctggtgcctgccttgcgtcgcgcgcgggacgtgatgacttgttgtcttgtccgtgcgctgcgcggcgcggtgcggtgcggttggtggttgctggttgggacaggaggaggagcgggcggtgtcggtggccggtgggagtcgtgaccggagttaccaccgcccggccgctgtttggtttgttggttggacttggatattacggccgggcccgtgttacgtcggtcggggggcccgtcgct

SEQ ID NO: 14597 - DNA, 352 bp, Zea mays
  unsure (1)..(352): unsure at all n locations
  Clone ID: MRT4577_113300C.1
attatatatacatttttatactctaccctaacaggtatgaggggatatttctacattttgggaaagacngnacactttatatgaaccataagctaatgcatccatgataaaaataatcggagaaaatgctccacgaattaacaaagcaaaaaaacctcccgagaaaaacttggcaacataccctgaggaaccaacactaattcaactgcatctgctaaccggtacagaaaaaaaaattcttaagaagccaacacacgggccacaacagaggaaaaaactgttctcaaacaacaacacttgaaacacataatcctgatttgagagacacagcttacatttatcgccgacttct

SEQ ID NO: 14598 - DNA, 682 bp, Zea mays
  unsure (1)..(682): unsure at all n locations
  Clone ID: MRT4577_113301C.1
ggccgctttttttttttttttttcagaggataaaacgattaatttgaaacaatactttgtcattttcattccaattgttcattcaggcaattgttcacactgacactggcacccatggtgatgcgtgacacattattactcaattattgccgctaaatgactcaactagctagctacaccagcggctatactacaggacatatgtttcttcagtggtggacaccgccgtcagcagcgtatggtcatgtatttggctgctgaaggccgcacatagccgtcagttgctgcgctatttgtgccggcaacagtcgcgggacctggccgatatgcggttgctgctgcacgatggactgaaggaccaagcctaatatcgcctgtgaccggtgctgcagttccacctgcctgagctgttggcaacactgctgccgcatcgactgggactgaggcgagcagtacggtgtccccgtatggctgcactgatgcctcaggaactcgactcactgtgccacgatctgggagctgccaacgccgaaggttccctgcagctgtcacgatcttgcatgcgcctgttggcactgacatggggagtggctggggatgaggctgaggccaacgcggttgagtacagtaaccgcatggtgccggtngcacatgaaccggaggcggacatggaccggagatg

SEQ ID NO: 14599 - DNA, 244 bp, Zea mays
  Clone ID: MRT4577_113302C.1
ctgaccctttagccgtactaccggtattttcaatctgtacggcactgattcatctcaaggatgcattcataaagcaggggctgcaagcgcaagcccacaacttcaacgcccacacctcggagctcacgatccagctggcgttcgctcccaacctcaaggacatccgctccatacgaggtccacatccgccacaacgagaataaacagcacagcatgcttagcatttacgaccacatcctctcca

SEQ ID NO: 14600 - DNA, 353 bp, Zea mays
  Clone ID: MRT4577_113303C.1
aaaagatgcgctggcgctgccactgccactggcggtttcagcgctagtggaggatgaactcctggttccacaggctgcggcgcaagagaaccggggcaggggcgatcgcgaacgccgccgccgccgaacccccgccgccaccaccctgctcgccgaacagggcgtcctactacgtgccgagccgggaccgcgccgtcccgcgccgcccggacaacaaccccaagctccgggacacgcagttcccgcgcagcccgcaggcgagcgacgtcgtcgcccgctccagcccggcgccggagctcaagctacggcccatcctcacgagagcgcctcccagacccgacgacggcggcggc

SEQ ID NO: 14601 - DNA, 592 bp, Zea mays
  Clone ID: MRT4577_113304C.1
gtcaccttttttttttttttttttcgacatgatgatgtatgaccaagtcaaagtctcaaacaaatgaacaggctgcgtcgtgttgaaactgccaaacaaggctgttcctgcgtcgtataattcaccaaggcacgcacgcgacgcgaaaagccacgaccccctccagacgaccagatcggggttcagtgcgactgtgcgactgcgacggtcagttgggtccccaaaggagcaggtgcatcagtttctccgtcctctcaatctccgcctcccgaagccgaggcctctgcctccactcctgattgcgctcctccccggccgtccgcgcgcgcccctcccccttggcccgcaacgtcgccaccgtctcgccctcctccgtcttcgcgtcgtgccggcacgcaggcgcagctgccgccgccggctccggccctggcctcggcctcgcgtcgcgctcgtgcagggaggcgcggaacgcgcgctcgcgcccgcactcccgcccgttgcacatgcctcgcgctcgccggctaccggacacccgctcgacggctggctggctgccgctgcaacctctttgtgtggatacgctctcgtgccg

SEQ ID NO: 14602 - DNA, 1055 bp, Zea mays
  Clone ID: MRT4577_113305C.1
tcgaggccggccgggaacattgggaacctcgaggccggccgggaccgcgcgcgcgtgtgctcgcctcacttcgcttggcccggctgtctccacgccacgctgcccacaatcccctttcccctccagtaggtagagtggcgagaaggatggtggccgtgtccacggcgacgatggcgagctcgctgctcctccggccgcgcgcgctcctgccaccccatccgattcctagctccagccgccggccattgccagctccgcgtgtacaactacaggggagcatccaggagaagccgggccttccggcgaaaagcgacggcgagcggaggcggccggctgggacgcggctctactcgctggcgccctaccctctgctgctggccgcgctgctgccgggagctgagccggtgacggccgtgttcgcgccgttcgtggagctggtgaagacgtgggacctccccggctggctcgtgcactggggccacccgggtaacatggctgtggtgctcttcgcaatgggtggttacgggacatacctgggcttcaggatcaaactatcagacgaccttgaagagaaggccaaggccaaagatctccacccgaaactcctcgccgggatgttctttttcttcgccctgggcgcgaccggtgggatcacagctcttctcacctcagacaaacccatctttgaaagccctcatgccgtgactggagtcatcggccttgcgctcctgaccattcagtccgtcctgccaaaactgttcgagggaaacccagggcttaggactacacatggtctgctcggcagtggcatcatgactctgtttctaatccacgcggcacttggcctgcagcttgggatcagtttctaacttgtggctacaatatcttggggtttgcttctctttttctttaactcactctaagtattatcacacgaagcatccccttaaatcaaaataatgtaagagaaagcaaaattattttccttggctttgttggcaactgcagtccatgttatatgataatttgatattgccatacggccctagaatatc

SEQ ID NO: 14603 - DNA, 749 bp, Zea mays
  Clone ID: MRT4577_113306C.1
cattgggtacctcgaggccggccgggaatgcactacggaccaccaccaccaccccgcggcgcgcgcgtgtgctcgcctcacttcgcttggcccggctgtctccacgccacgctgcccacaatcccctttcccctccagtaggtagagtggcgagaaggatggtggccgtgtccacggcgacgatggcgagctcgctgctcctccggccgcgcgcgctcctgccaccccatccgattcctagctccagccgccggccattgccagctccgcgtgtacaactacaggggagcatccaggagaagccgggccttccggcgaaaagcgacggcgagcggaggcggccggctgggacgcggctctactcgctggcgccctaccctctgctgctggccgcgctgctgccgggaggtaacggcctcgccacggcttgtgtagttgtgttctcggcggccttgccatgccatcactgacggctgacgccttggttcttgtttccgccggcggtctgagcagctgagccggtgacggccgtgttcgcgccgttcgtggagctggtgaagacgtgggacctccccggctggctcgtgcactggggccacccgggtaacatggctgtggtgctcttcgcaatgggtggttacgggacatacctgggcttcaggatcaaactatcagacgaccttgaagagaaggccaaggccaaagatctccacccgaaactcctcgccgggatgttctttttcttcgcc

SEQ ID NO: 14604 - DNA, 625 bp, Zea mays
  Clone ID: MRT4577_113307C.1
cctgcgagttttttttctcttttttttttttttttttttttttttttttttttttttttttttttttttttttttttaaaagcccaaaaattttggggggggggtaaagggccccaaaacaaaggggtacctttgggccaaatttttaaagggggcgaaaccattttcgttttttaaaaaaacccatgggtcccaatcgaaaaaacccgttggcccccttgggctgggcccccgggggggggggccccccccccccaggaaaaggggtctttggaacccccccaaggggcccccccctccaaaaaaaccgggttatttttttgggaaaggaaaacggggccaaattaggggcccccacaaaaaaaaaaattttttttccccccacccctttttccggaaaaaggctaacggggggggggtttttttagggggggggccgggccctaaaaaaacccaggggaaaggggttggaccccctgggacaggggggggggaaagggaaaaaagttttttcctaaaaaccctggcaatctggtttggggggggaaaaacccgggaaaaacccgggtcctgggagctccaggggtctggaccaacccggggttaaattgggggaattttggcc

SEQ ID NO: 14605 - DNA, 357 bp, Zea mays
  unsure (1)..(357): unsure at all n locations
  Clone ID: MRT4577_113308C.1
gacaacgatactgtnacagcaacacatggcgatcctcagacgatgatggggctgnnaaagncatgcttgattgaagaccttaataatagnattnactacgcggcgctctccttgcagatgctccttcttgacgcgccccacccccacgccgttgacccgtcgacacacatggtctacccaccggcggcggcggcgacgcaccgtcatgcnntaatgtctaataacaccaacagtattgacgactactatgacgacgacaacttgttgccgactgctgctgatactgcggtagacgcggcggaggttgttgttgtactactcagntcgtcgtctgcagacaccaacggtgtgaacaag

SEQ ID NO: 14606 - DNA, 351 bp, Zea mays
  Clone ID: MRT4577_113309C.1
aaaaaagccgcgacgccacgcgtccgcttttttcaacttaggaaccattgtttactctttttgggagtttctttttgaaacaattgttgatgttaccatcgagttgtcttgtacttttggtgtgatgcacaatctcacataatcattactgtaattttttgtgtaagatcagttcaatcccgaccaatccagttgaggggcagaagactgtgacttagtgtcctgtggaaaaaggtttactgtttggtgacacattttggattgctatagcttttattttcatttttttttattaattctatttttttttaataattctatttttattatattcgataatgtatttttaaa

SEQ ID NO: 14607 - DNA, 124 bp, Zea mays
  Clone ID: MRT4577_11330C.1
gctttatttatagctttcaattgatcaatttcttggcggggtgccttctgaaacaaacgacctcttttccaccccaggacgccaaagtctgctgacgcatattctttctctctgcctttaaaac

SEQ ID NO: 14608 - DNA, 387 bp, Zea mays
  Clone ID: MRT4577_113310C.1
tttcttcgcaggtggtaccagcgaggtggagcccggtcgcatcccatggaggacaaccttccaattgatccagggcttgaggcacctacacagtgtattggctagcgaaccgtgtgctattatccactatgtagtaccctcattcaaagggcgcatactcacttattggatacaaattttacccataaaaagtttaggtaaaaaaggtgaacagcaaaatagaattagtcatcatatagaaggtacatttacccctgttggcatttggattgcagttcattttctatttcttaaattggacaacaggagatcatgtatctataacaaaatataaagagccatttagttaaatgcccaaggtacccaaaagggagagaaggtggcttt

SEQ ID NO: 14609 - DNA, 1527 bp, Zea mays
  Clone ID: MRT4577_113311C.1
atggggctcggtgtatgcggctcgctctgccaaggtggcagtgagattgatggtttttgtattgattatggtaatggtaagtggtattctttccgtttggaaagaatggctcgtcttagacacactgcacggaagtccgtcatccccttcttgccttctctcctcgctgagcgtccgcttcgccgtccagtgactggtcagtccagccatttggagaggctgcaccaccgcctgcatgaggagcgggaacgtcgacgacaggagcaggagcatcagagctcttctttctcgctccagcaggagatagagtctgtgaggagctgctccccgtgcttccgctggaggagttggaaggatgggttgctcgacccatcactcgcgacgctgctcgcgggtgtcacttccacgatgcgctcgacaccctgctacgtcgggcactcgaccggcgtacttagtctatcgagtatcgctgtgtggtcttccagcaccgtcgcggggtctacccggaccgctgggaggcgacctgcttggtgcgccgtccggagaatagtctccggggtgcggaggtctgctcagagcactattccatctctgagcgggactcagctaaggcggccatgcaagatgccgcacgtcatgtcagaaaacaggcgcagaggagaaagacgtgctcagcaggagcaagcagctcagcaggatgaggtaccccagcaacagcaactgcaactgccgcccctgcccccgatgtccatcgagcagatgttcctgatgcagactcaggcagttcaagccatcggtcagactatggccgccattcagcagcagcagcagcaaccaccaccccagcctcagatgcctcagatgcccagggacaaacgtgctgagtttatgagaggtcatcccccaacgtttgctcattcttctgaccccatggatactgaagactggctgtgcacagtggagcgagagttgcataccactcagtgtgacaacagggagaaagttttgtatggtccccgtctattgagaggagcagctcagtcctggtgggagtcttatctcgccacccatgccaaccctgacactattacctgggaggaattcagaaacaatttccgtcagtaccatgttcctgcaggtctgatgacattgaaggaggagttcctggcactcaagcaagggtcattgtccgtcagtgagtatcgagacaagtttctgcagctgtctcgctatgctcccgaagatgtcaacaccgacgccaagagacagtatcgtttcctgagaggcttggtcgaccctctgcagtatcagctgatgaatcataccttccccacatttcagcacctgatgtatagagcaatcatgacagagaggaagcgcaaagagatggaggatcgcaagcgcaagatcagtggaccccagcctggaagcagcaatcgtcctcatttctcaggcaatcaacctcagcagttcaggcagaaccagcgtccacctcagcagcagcagtttcaaaggcagtatccttag

SEQ ID NO: 14610 - DNA, 5764 bp, Zea mays
  Clone ID: MRT4577_113312C.1
atggtagtaatttggggtaatatatttccactattgcaggaactccttacaccaagaaatcatacaaggggcccaccaccaacgagcacgccgctttcctcccgagtggacagagcggaagccgatggacgagacccaggatacgctccggacctctgccttccccagctcacacgtcagagagacatgggccaagagcctctacatcgattcgatatgcgacgggcggaccgtgctctgatggcgcgcacgtgggaaatggaagtcgaagcgcctcgcatcaagagccgcgagatggcgcgtcaagtcgaaaccagtactaataataggatcagtttacctttgaagctaccgttgggtttcccccccccgcacacccccctcgtcctcccgctcgcgcgcgccccgccctcgccccccgcgctcgcgcggcgcacgaggcgacgaccccgacctcctcctccgcgcccgtccctgccaccggtcgccgatattggaaggagctgggaaggctggggcgctgacctgaattttaaggagagaggatgccagagctgcgaaaattaccaagcatacccatggtcgaagaagcttgaggatctgcagccaggagaggcgcctgcgaaaccggtgtcaccttctccagcgggggcaagagatcgtcacaaatatgaaatttgatgaagagccaaattatgccatgcttatctctattttcgctgggttgattgaagcacctgcatcgagacaattcagaattgatggggcactcaaggttggacagaaacgtggaagattggttgcaaatctagaagaagatgaacaacctaaaaagaaggttatatctagggagcagagcggcccaatggattagagtttagaaaccctagggtactcggccgctccccgttaacctggcaaaggcaaaagtcggaggaatgcctactgagcttaggattgctacggtcgatccgtgtgcaggatcaacgaagtgtgaggtggccccaatgactgagtgccgggccttgggtcaggagcttggaaccgttcgaggctccttcaatttccataaggcgtaatgaggaaaaagttactaaatgagaacaaacggtatgagatccaactgtgaccctatagcaaggtttgacctaaagaacaccttgaatccttgaaatctcacaaggtgagcgagtcgtttccttacaagtggatcaataagaagtggaaagaagggttccatgtgacatccatggccaccgctgggaatcgctggggcgtagtcatgtcaaggaattcagggttctctactcaggttgtagagttggatttcctgtaccccagcgagggcatccaccggcgctgggagagcggctacaggataacttccacggcagccaccaacgaccaagccgctttcatcctgagcatgccgaaacggaagccgatggacgagacacaggaaacgctgcggacctccgccttccccagctcacacgtcaaggagaaatgggccaagaacctctacatcgcttcgatttgcttcgggcggaccgtgtgctgatcgcgcgcgcctgggaaatggaagtcgaagcgagggccaccgatccggtacggtggcgcctcgcatcaagagatgcgagatggggcgtcaagtcgaaaccagttctaatgataggatcagtgtatctctgaagatacggtatgggttaccctaccgtatttgtaaagtaatgatgccggccgaacgacctttcctaacgcgtttgggcagaaattcgttgctgtcgccatattttgacgggagtttctcccgtgttgtcggtacatcttcaacggcgcgacatacatctacgaggcgcacgtccggcgctacttcaagatcggcagctacgtgagccccagctacagcgagcaccaccgtcgggtgctgcagatgacgagcttcaacgcgtgcagtgcagacatgatgtcagagaacaggcgcagaggaggaaggcgtgctcagcaggagcgagccgctcagcaggaggaggtgccccagcaacagcacctgccgcccccacccccgatgtcgatcgagcagatgtttctgatgcagactcaggcagttcaagccatcggtcagactctggccgccattcagcagcagcagcaacaacagcagcaagcaacacctcagcctcagatgcctcagatgcccagagacaagcgtgctgaattcatgagaggtcatccaccaacgtttgctcattcttccgaccccatggatgctgaagactggctgcgcactgtggagcgggagttgcacaccgctcagtgcgatgatagagagaaagtcttgtatggtccccgtctgttgagaggagcagctcggtcatggtgggagtcttacctcgccacccatgcccatcccgacgccatcacttgggaagagttcagaggtagctttcgtcagtatcatgttcctgcaggtctgatgacagtgaagaaggatgagttcctggccctcaagcaagggtcatcatctatcagtgagtaccgggacaggtttctgcagttgtctcgctatgctcctgaagatgtcaacaccgacgccaagcgacaataccgtttcctgagaggcttggttgaccctcttcagtaccaactgatgaatcataccttcccgacattccaacacctgattgacagagcaatcatgacagagaggaagcgtaaggagatggaggatccagcccagcagaacagccaggcagcaccagctcaggttggaaacagagcatgtttccactgtggagagcaaggccattgggtgatgcaatgtccgaagaaggcagcccagcagcagtcaggccccaatgccccagcaaagcagaacgtgtctcagcctggagcaggcaaccgccctcagccgcgctacaatcatagaagactgaaccacttggaggctgaagcagttcaggagacccccagcatgatagtaggtatgttcccagtcgactcccatattgcagaagtgttatttgatactggagcaacacattctttcattactgcatcatgggtagaagcacataatcttccaattactaccatgtcaacccccattcaaattgactcagccggtggtagaattcgagccgatagcatttgtttgaatgtgagtgtggaaataagggggatagcgtttcccgccaacctcatagtaatgggtactcagggaatagatgtcatcctagggatgaattggctagataagtttcaggcagttatcagttgtgataaaaggaccatcaagttggtgtccccactaggagaggaagtggtgaccgagttagtcccgcctgagccaaagaaaggaagttgttatcagatagctattgatagcagtgaggcagacccgatcgagagtatcaaggttgtgtccgagttcccagatgtgtttccaaaggacttaccgggtatgccaccagagcggaaagttgagtttgccatagcgcttcttcctggaacctcccctatctttaagagagcttacagaatatctggaccagagttggttgaacttaaggagcagatttatgagctgtcagagaaaggttacatccggccaagcacctcgccttgggccgctcctgtcttgtttgtggaaaagaaagatggcaccaaaaggatgtgtatcgattatcgagctctgaatgaagtcacgatcaagaacaagtaccctttgcccagaatagaagatttgttcgaccagttgagaggagctagtgtgttctccaagattgatctgaggtcagcctttttcatgaatctgatgaatagtgtattcatggactatctcgataagtttgtggtggtattcattaatgacattctgatttattctcaaagcgaaaaagagcatgcaagtcatttgaggatggtattgcagagattgcgagagcaccaattgtatgcaaagttaagcaagtgtgaattctggatcaatgaagttctatttttgggtcacataatcaacaaagagggattggctgtggatctgaagaaagtggcagacattctgaactggaaagcgccaacagatgcccgaggaatcaagagtttcattggaatggctggatattatcggcgattcattgaagggttttcgaagattgcgaaaccaatgacagtgttgctaggcaacaaggttgagctcaagtggacccagaaatgtcaagaggcctttgaagcgctgaaagggaagttgacaacagcgcctgtcctagtcttgcctgatgtgcacaagcccttcttggtgtattgtgatgcttgttacacaggtttgggatgtgtgttgatgcaagagggaagagttgtggcttactcgtcccgacagttgaaggttcatgagaagaactacccaatccatgatctagagttggcagcagtggttcacgcactgaagacatggaggcactacttgtgtggacagaaatgcgatgtttacacagaccacaagagtctaaagtacatattcacccagtcagagttgaatatgaggcagcgaaggtggttagagttgatcaaagactatgagttggagatccattaccatccaggcaaagcaaacgtagtggcagatgctttgagcaggaagagtcaagtcaatctgatggtcgctcggccgatgccttacgagttggccaaggagtttgacaggttgagtctcggatttctgaacaattcgcgaggagtcacagttgaattggaacctaccttggagcgcgaaatcaaagaagcgcagaagaatgatgagaagatcagtgagatccggcgactgattctagaaggcaaaggcaaagattttcgagaagatgcaaaaggtgtgatatggttcaaagactgcttgtgtgttcctaatgtccagtctattcgtgagttgattcttaaggaagctcatgagacagcctatttcgattcaccctggcattcagcttatcatccgcagacagatggtcagaccggaagaaccaatcaaattcttgaagacatgttgagagcctgtgcgttgcaagatcagtccggatgggacaagagattgccttatgcagagttttcctataacaacagttatcaggacagtttgaagatgtcaccatttcaggcactctatggaaggagttgtagaactcctttgcaatgggatcagcctggagaaaagcaagtgtttgggccagacattttgcttgaagccgaagagaacatcaggatggttcgagagaatctgaagatatcgcaatcgaggcagcgaagctatgcagacacaagaagaagagagctgagtttcgaagtcggagactttgtctatctgaaagtgtcaccgatcagaggagtcagaaggttcggagtcaaaggcaagctagcaccccgctacattggtccgtaccaaattctctcaaggcgtggagaagtggcctatcagctcagtctgccagagaatttgtccgctgtgcatgatgtctttcatgtgtctcagttgaagaagtgcttgcgtgtgccagaagagcagttgccagtggaaggtcttgaagtccagaaggacttgacctacgttgagaagccagtgcagatccttgaggttgcagacagagtcactcgaaggaagaccatcagaatgtgcaaagtcaaatggaatcaccactctgaggaagaagcaacctgggagcgtgaagatgatctattggctaaatacccagagctctttgctagccaaccctga

SEQ ID NO: 14611 - DNA, 449 bp, Zea mays
  Clone ID: MRT4577_113313C.1
atgtgttgttttgtttcttttttttctttttttttttttgtttcatagctcgcaaagctaaggcttgtttctgccctgaacttctatccatcgaatggaggcgaacgaagcgcccaacgaggatctcgggggtcatcagggggaaaacaaacccttcagccccgtacctaccctggggctgaagacccctaacctgctgctgctgctggtgcgggggccctatcttgctggtaatcccccccccaccgaaccgacggccccgaccccggggctaaggcttctcaactcctgcctgctgacggagacggcacagttgctaccaaacctccgcgcgggggccgagctcaggagctccagggggtgtttccccatctgttttactttgtgccccgagaggatttttatgcaggacaccgagctccctttttcttgccaggggtcgtcacccc

SEQ ID NO: 14612 - DNA, 4896 bp, Zea mays
  Clone ID: MRT4577_113314C.1
atgagcccccgcgcgctcggccgcgtcccgatggctcgtcttagacacaccgcacggaagtctgtaatccccttcttaccctctcgtctcgcggagcgtccgcttcgccgtcccgtggtcggtcagtccagtcacttggagaggctgcaccaccgccagcatgaggagcaggaacgtcgacgacaggagcagcagggctcttctttcttgctccagcaggagatagagtctgtgaggagctgctcccatgtgcttcccctggaggcgccctctgcaccaccactggacgccccagcccctggagtagctactggaggagacccagacgacggaggtggcgacagcaactcgagccacgacaccgacttttatgctgaccagaagccggaaggatgggttgctcgacccatcacttgcgacgctgctcgcgagtgtcacttccacgatgcgctcgacaccctgctacgtcgggcacttaaccggcgtacttggtctatcgagtatcgctgtgtggtctaccagcatagtcgcggggtctacccggaccgctgggaggcgacctgcttggtgcgtcgtccggagaacagtctccagggtgcggaggcctgctcagagcactattccatctctgagcgggactcagctgaggcggccatgcaagatgtcgcacggcgtgcgcttttgcactactgctcagtgctcggtggggtagctgacggtctcaacctgaagtattacccccgccgtccatctggcagcacaggaggcgtgattgtttcacctgttggtgaggacaatcctaggttgagcagcacagtcaacctagccgccgtgctaaacacggagctagaccatgcattagacgagctgagtagggctcgtgctgagatcgcccagctgcgagctgagcgcgcggagcgtcgtcacctggacgatggttcccccgctcccgtcgggactcagcacccagtgtgggtatcccctgcattttggtttacctgttatgttaatggagttagttatctagttgggaagccttttattccactttcctctttatctgagaagctgtgttggtctgtgttggagatcagtgaagatgctcacctgttcagtgttatggagaattctatactcttttcttatgctatgtcagagaacaggcacagaggaggaaggcgtgctcagcaggagcaagccgctcagcaggaagaggtaccccagcaacagcaactgccgcccccgcccccgatgtccatcgagcagatgttcctgatgcagactcaggcagttcaagccatcggtcagactctggccgccattcagcagcagcaacaacaaccaccacctcaacctcagatgcctagagacaagcgtgctgaattcatgagaggtcatccaccaacgtttgctcactcttctgaccccatggatgctgaagactggttgcgcacagtggagcgggagttgcataccgctcagtgtgatgacagggagaaagtcctgtatggtcctcgtctgttgagaggagcagctcagtcatggtgggagtcttatctcgtcacccatgccaaccccgacaccatcacctgggaagagttcagaggaagcttccgtcagtaccatgttcctgcaggtctgatgatagtgaagaaggagaaattcctggccctcaagcaagggtcatcgtctgttagtgagtaccgggacaggtttctgcagctgtctcgctatgctcctgaagatgtcaacaccgatgccaagcgacagtaccatttcctgagaggcttggttgaccctctgcagtatcagctgatgaatcataccttccccacattccagcacctgattgacagagcgatcatgacagagaggaagcgaggaggtcagtttcagaggcagaatcagcaggcacctcgtcttcctgccccagcaaaccagcagaacagtcaggcaacaccagctcaggttggaaacagagcatgtttccactgtggagagcaaggccacagggtgatgcaatgtccaaagaaggcagcccagcagcagtcatgccccaattccccagcaaagcagaatgtgtctcagcctggagcaggcaactgctctcagccacgctataatcatgggagactgaaccacttggaggctgaagcagttcaggagacccccggcatgatagtaggtatgttcccagtcgactcccatattgcagaagtgttatttgatactagagcaacgcattctttcattactgcatcatgggtagaagcacataatcttccaattactgtcatgtcaacccccattcaaattgactcagccggtggtagaattcgagccgatagcatttgtttgaatgtaagtgtggaaataagggggatagcgtttcccgctaacctcatagtaatgggtactcagggaatagatgtcatcctaggaatgaattggctagataagtatcaggcagttatcagttgtgataagaggacaatcaaattggtgtccccactaggagaggaagtggtgaccgaattagccccgcctgagccaaagaaaggaagttgttatcagatggctgttgatagcagtgaagcagacccaattgagagaatcaaggttgtgtccgagttcccagacgtgtttccaaaggatttaccaggtatgccaccagagcgaaaagttgaatttgctatagagcttcttcctggaaccgcccctatctttaagagagcttacagagtatctggaccagagttggttgagcttaagaagccgatcgatgagttgtcagagaaagtctacattcggccaagcacctcgccttgggcggcccttgtcctattcgtggagaagaaagatggcaccaaaaggatgtgtatcgattatcgagctctgaatgaggtcaccattaagaacaagtaccccttgcccagaatagaagatatgttcgaccagttgagaggagccagcgtgttctccaagatagatctgaggtcaggttatcatcagctcaggatccgaccttcggacattccgaagatgacaatcattaccaagtatgggttgtatgagttcactgtgatgtctttcggtctaaccaatgcaccagccttctttatgaacttgatgaacagtgtattcatggaccatcttgataagtttgtggtggtattcattgacgatattctgatttattctcaaagcgaagaagaatatgcagatcatttgaggatggtattgcagagattgcgagagcaccagttgtatgccaagttgagcaagtgcgagttctggatcagtgaagtcttgttcttgggtcacataatcaacaaagaaggattgactatggatccgaagaaagtggcagacattctgaactggaaatcgccaacagatgctcgaggaatcaagagctttattggaatggccggatattatcggcgattcattgaagggttttcgaagattgcgaaaccaatgacagcgttgctaggcaacaagcccttctcgatgtattgcgatgcttgttacactggtttggtatgcgtgttgatgcaagaaggaagagttgtggcttactcgtcccgacagctgaaggttcatgagaagaattacccaatccatgacctagagctgacagcagtggttcacgcattgaagacatggaggcactatctgtatggacagaaatgtgatgtttacacagaccgcaagagtctgaagtacatattcactcagtcagagctgaatatgaggcaacgaagatggttagagttgatcaaagactacgaattggagattcattaccatccaggcaaagcaaacgtagtggcagatgctttgagcaggaagagtcaagtcaatctgatggtcgctcgtccgatgccttatgagttggccaaggattttgactggttgagtctcggatttctgaacaacgcgcgaggagtaacaattgagttggaacctaccttggagcgggaaatcaaagaagcacagaagaatgacgagaagatcagtgagatccggcgactgattcttgacggtagaggcaaagattttcgggaagatgcagaaggagtgatatggttcaaagaccgcttgtgcgttcccaatgtccagcctattcgggagttgatcctcaaggaagctcatgagacagcttattcgatttaccctggtagtgagaagatgtatcaggatctgaagaagaaattctggtggtacgaaatgaagagggaaatcacagagcatgtggctatgtgtgatagttgtcgacggatcaaggcagagcaccagagaccagctggattgttgcaaccattgcaaatccctcagtggaaatgggatgaaatcgacatggatttcatagtcggattgcctcatactcgagccggctacgactccatttgggtagtggtggaccgcctaaccaagtcagcccacttcataccagtcaagaccaactacagcagtgcagtattggcagagttgtacatgtctcaaatcgtttgtcttcatggtgtgccaaagaagatagcactctatggaaggagttgtagaacttcgttgcaatgggatcagcctggggaaaagcaagtgttcgggctagacattctgcttgaagctgaagagaacatcaagatggttcgagagaatctgaagatagcgcaatcaaggcaacgaagctatgcagacactagaagaagagatctgagttttgagttgaagaagtgtttgtgtgtgctagaagagcagttgccagtggaaggtctggaggttcaggagaacttgacctacacagagcaaccagcgcaaatccttgagactgcagacagtcacccgaaggaagaccatcagaatgtgcaaagtcagatggaatcaccactctga

SEQ ID NO: 14613 - DNA, 458 bp, Zea mays
  Clone ID: MRT4577_113315C.1
cccacgcgtccgcccacgcgtccgcccacgcgtccgcccacgcgtccggtggatgcatacactcgttaaatctcctcacttcttctccggatggtttcagttctgcttttccctctcgcccgccctagatccgctgggatctgagtctctgtttgatgctgctttccaagccccgccatagatccgctgggatatgagtctctgtttgatgctgttttccaagcctgaggagttccggccggagtggttcataggcgaggagaagagcgtggacgcaaccgtcggcgggaaggcgaggagaagagcatggacgccacgcgacgtcatacaatcgcattattgtttggttggtactctaaagacgcctcttgttctaatttattgcctgcagaatcatatgctaaattagaaacagacgcttcgtttcttcctaaatagaaatactaatttactgggtt

SEQ ID NO: 14614 - DNA, 4746 bp, Zea mays
  Clone ID: MRT4577_113316C.1
atggcttgtcttagacacaccgcacggaagtctgtcatccccttcttaccttcctgtctcgcggagcgtccgcttcgtcgtcccgtggccggtcagtccagccacttggagaggctgcaccaccgcccgcatgaggagcaggaacgtcgacgacaggagcagcaaggctcttctttctcgctccagcaggagatagagtctgtgaggagctgctcccctgtgcttcccctggaggcgccccctgcaccaccactgagcaccccagtccctagagtagctactggaggagacccagacgacggaggaggcgacgacagctcgagccacgacaccgacttttctgctgaccaggagccggaaggatgggttgctcgacccatcactcgcgacgctgctcgcgggtgtcacttccacgatgcgctcgacaccctgctacgtcgggcacttgaccgacgtacttggtctatcgagtatcactgtgtggtctaccagcatagtcgcggggtctacccggaccgctgggaggcaacctgcttggtgcgccgtccggagaacagtctccagggtgcggaggtctgctcagagcactattccatctctgagcgggacttagctgtggcggccatgcaagatgttgcacggcgtgcgctttcgcactactgctcagttctcgatggggtagctgatggtctcaacctaaagtactacccccgccgtccatctggcagcacaggaggcgtgattgtctcacctgttggtgaggacaatcctaggttgagcagcacagtcaacctagcctccgtgctaaacacagagctggaccatgcattagacgagctgagtagggctcgtgctgagatcgcccagctgcgggctgagcgtgcggaacgtcgtcacctggataatggttcccccactcccgtcgggactcagcacccagtgtgggtatcccctgcattttggtttacctgttatgttaaaggagttagctatttagttgggaagccttttattccactttcctccttatctgagaagctgtgttggtttgtgttggagatcagtgaagatgctcatctgttcagtgttgtggagaattctatactcttttcttatgctgcaagatttgcaagatcagttctgatgtgtggttgcattctgcagatgtcagaaaacaggcgcagaggaggaaggcgtgctcagcaggagcaagccgctcagcaggaagaggtaccccagcaacagcagctgccgcccccgcccccgatgtcaatcgagcagatgttcctgatgcagactcaggcagttcaagccatcggtcagactctggccgccattcagcagcagcagcaacagccaccacctcagcctcagatgcctcagatgcccagagacaagcgcgctgaattcatgagaggtcatcccccaacgttcgctcactcttctgaccccatggatgctgaagaatggctgcgtactgtggagcgagagttgcataccgctcaatgtgatgacagggagaaagtcctgtatggtctgatgacagtgaagaaggaggagttcctggccctcaagcaagggtcatcgtctgttagtgagtaccgggacagatttctgcagttgtctcgctatgctcctgaggatgtcaacatcgacgctaagagacaatatcgtttcctgagaggtttggttgaccctctgcagtatcaactgatgaatcataccttcccgacatttcagcacctgattgatagagcaatcatgacagagaggaagcgtaaggagatggaggatcgcaagcgcaagataagtggaccccagcctggaagcaacaatcgtcctcgtttctcaggcaatcaacctcagcagtttaggcagaaccagggtccacctcagcagcagcagttccaaaggcagtatcctcaacatcaatatcagaatagccagaacaatcagtcaggaggagaagtgttatttgatactggagcaacacattcattcattactgcatcatgggtaaaagcacataatctttcaataactaccatgtcaacccccattcaaattgactcagccggtggtagaattcaaactgatggcatttgtttgaatggaatagatgccatcctagggatgaattggctagataagtatcaggcagttatcagttgtgataagaggacaatcaagttggtgtccccactaggagaggaagtggtgaccgagttagtcccgcctgagccgaagaaaggaagttgttatcagatggctgtcgaaagcagtgaagcagacccgattgagggtattaaggttgtgtccgagttccaagatgtgtttccaaaggacttaccaggtatgtcaccagagcggaaagttgagtttgctatagagcttcttcctggcaccgcccccatctttaagagagcttacagaatatccggaccagagttggttgaactcaaaaagcagattgatgagctgtcagagaaaggttacatccggccaagcacctcgccttgggccgcccctgtcctgtttgtggagaagaaagatggcaccaaaaggatgtgtatcgattaccgagctctgaatgaggtcaccatcaagaacaagtaccccttgcccagaatagaggatctgttcgaccagttgagaggggccagcttgttctccaagatagatctgaggtcaggttatcaccagctcaggattcgaccttcagacattccgaagacggcattcattaccaagtatgggttgtatgagttcactgtgatgtctttcggtctaaccaatgcaccggccttctttatgaacttgatgaatagtgtattcatggattatcttgataagtttgtggtggtatttattgatgacattctgatctattctcaaagcgaagaagagcatgcaaatcatttgaggatggtattgcagagattacgagagcaccagttggttttgaaagattcgaaaccaatgacaactttgctaggcaacaaaattgagttcaagtggacccagaaatgtcaagaggcattcgaagcgctgaaagagaagttgactacagcgcctgtcttagtcttgcctgatgtgcacaagcccttctcggtgtattgcgatgcttgttacactggtttgggatgcgtattgatgcaagagggaagagttgtggcttactcgtcccgacagctgaaggttcatgagaagaattacccaatccatgatctagagttggcagcagtggttcatgcactgaagacatggaggcactatctgtatggacagaaatgtgatgtttacacagaccacaagagtctgaagtacatattcactcagtcagagctgaatatgaggcaacgaagatggctagagttgatcaaagactatgagttggagattcattaccatctaggcaaagcgaacgtagtggcagatgctttgagcaggaagagtcaaggcaatctgatggtcgctcgtccgatgccttatgagttgtccaaggagtttgacaggttgagtctcggatttctgaacaacacgcgaggagtcacaattgagttgaaatggcccaagggcacatttccctttcagttggaacctaccctggagcaggaaatcaaagaagtgcagaagaatgatgagaagatcagtgagatccggcgactgattctagatggcaaaggcaaagacttccgggaaaatgcagaagaattgatcctcaaggaagctcatgagacagcttattcgattcaccctggtagtgagaagatgtatcaggatctgaagaagaaattctggtggtacggaatgaagagggaaatcgcagagtatgtggctatgtgtgataattatcggcagatcaaggcagagcaccagagaccaactggattgttgcaacctttgcaaattcctcagtggaattgggatgaaatcggtatggatttcatagtcggattgcctcgcactcgagccggctacgattccatttgggtggtagtggaccgcttgaccaagtcagcccacttcatacccgtcaagaccaactacagcagtgcagtattggcaaagttgtacatgtctcggatcgtttgtcttcatggtgtgccaataaagatagtgtcagacagaggaacacagttcacctctcatttctggcagcagttgcatgaagccttgggcacacatctaaattttagttccgcctatcatccgcagatagatggtcagaccgaaaggaccaatcaaatcctcgaagacatgttgagagcctgtgcgttgcaagatcagtccggatgggacaagagattgccttatgcagagttctcctataacaacagttaccaggccagcttgaagatgtacccatttcaggcgctttatggaaggagttgtagaactccgttgcaatgggatcagcttggagaaaagcaagtgttcgggccagacattctgcttgaagctgaagagaacatcaagatggttcgagagaatctgaagatagcgcaatcaaggcagcgaagctatgcagatacaagaagaagagagctgagtttcgaagttggagacttcgtctatctgaaagtgtcaccgatcagaggagtcagaagattcggagtcaaaggcaagctagcaccccgctacattggtccgtatcagatcctcgcaaggcgtgaagaagtggcctatcagctcagtctgctagaaaatttgtctgctgtgcatgatgtctttcatgtgtcttag

SEQ ID NO: 14615 - DNA, 662 bp, Zea mays
  Clone ID: MRT4577_113317C.1
atctcacgccattcctctgtgctagtgaccacgccagcagttctcccacctcgccatggctcggacgtcctaaggagttgctggcccatatgaagcttgttccataatcatctcagaattcccataagaagaagatgaaattcaagaagtggtttctgaagaggagtctgcttcagtgcctgctcatcaagtggtgggagccatctaactggggtttaatagagggatttagaccttcatctctgcaacaaagatgtctgagaacaggcgcagaggtgcgaggtgtgatcagccagagcagcaggcacccaagagcaggcagctccgctgcagcagttgccaccgccacccccgatgaccattgagcagatgttcttgatacagacccaggtagttcaggcaattggtcagacattaacagtgatgcagtaggctcagcagtagccaccaccacctcagcctccggtgcaagtccagatgcctcaagtgcccagggacaagcgagccgaattcatgaggggccatcccccagtctttgcccattctgccgatcccatggatgcgaaagattggctgcataccgtggagcgtgaggtgcacactgcccagtgcaacgatcatgagaaggtgttggatggtccctgacagctgaggggagcagc

SEQ ID NO: 14616 - DNA, 168 bp, Zea mays
  Clone ID: MRT4577_113318C.1
cgtgggcgggcgcgtgggcggacccgtggaaccaacccctgggccgacccgtggtcccacccgtggtcgctcaggtagagctctggcacacatcctttgctttcatcaagggcatcgctctcaagtcttttttttaccttggcatatcccactccatgcggggggggg

SEQ ID NO: 14617 - DNA, 279 bp, Zea mays
  Clone ID: MRT4577_113319C.1
acccacgcgtccgctatcacataggcattgactctttttttcaatctatgtccataaattccattccttgcgaatggcgaattaacccagtaataagcgcattacaaaaagcacaagattgtcttcttcccattcaaattaccttttaaaatcttgcccatctatattgtgtaaccaggcaagatcaacatcaagcccacgattaatctcataagaaagcttcttcaaccacaatcttttgaaaattcaaggattacatcctccctcgtccaacaaaaa

SEQ ID NO: 14618 - DNA, 709 bp, Zea mays
  unsure (1)..(709): unsure at all n locations
  Clone ID: MRT4577_11331C.1
gccagcttgaaattcctattgatgtagggatgtcgaatatacacgtttacacgtagagaagttttttttttttggcgtgatggcccagctgcatatgaaaacttgcaattagtgagggcaacaggaacgtttggtttcctcgccaagacgccaagcgcttgcctcgcctgtctggggagggatccagcctggggtgggntggattggattctttaccatctgcctcgtttcccgtgccgtaaagatttttccatgcttggccaggtatcaggtgagccgcttcagcttgcctcggctggcgagggtacccttgcccagctaggttaggtgaggcaagggcacaagaaaatcaaacacgcccgacgtctacgaacatttgcaatccaactaacgcataacaattcacacttctcatcgaggaaagagcaggagttgagttaccctacccggaattccaggcgttctctcatactgcaacaaatttcttggatgctcagacttcagagggcaccagcaggcgtatccctcatgcttatgttcaagctgtttctcatcgttctcctcccaactcccatattgccctttgtcatcatggcaacaaattccccgtaatcaatgcgcccatcattatcctggtcagcttctttaatcacatcatcaagaaaagcagctggcatgttatgctctttgcacgcttgttgaagctcat

SEQ ID NO: 14619 - DNA, 8157 bp, Zea mays
  Clone ID: MRT4577_113320C.1
atgccgacctcctcttcttccgttgccgctacgccgccggccgatccctcgctgccggccgccgcctcgtctgaggggacgctgagtagttcgatggcggaggagttgcgcgccggcgattctgttgattttggcgtgtcgcggatgtcgtcggtccgcgtgcaagatatgcagcggttgggttacttcggcggcggagttgctcgtgtcccggggacggaggaagtccccgagccggagcgcgattaggctgtattcaaggcattgttcgccgccggtctccacttccctgaccgccgattggttggcacacggaacaggcgggtcaaccttcgtctacattggccaacaccgatcctcgggtggcctctgtccaaggatgtggcggcctcgactccgcgtggtgtccagatgacgctcgaatccggcaagcacacggtacagtgggttgacttggttccttgcgcccgaagcaactggggaaaaggttaggaaatttggttttacgttgctgagagtaccgtcaaggggcatgagggactccccgtgtccgagatgtgttctcatttttactcagcgtacccgccctttgaagtggcagaggaggatgtggacgaaggggcccttcggtgcaccgccagcccgaggagtgggcgccagatgcttgaggagtttatggcgtccgtggtgtcgacctgggcgcatgactcggcgctggagcaagtgtgccctcgccagatgcctttgcacggtgcaagggtggtgccaaggcccacctgcgcactaaacctacaaagccgcgacccggccgcccctgagcgtgatgccgagaatggggctgtgcggcgcgttggccgtgacgtgccgaggacagaggacccgcgcagctttgatatccgcgcgtcgaaggaccgtttgaacaggcttgttgaattacatcaatcgccgtaggacggttatcctggtcaagaggatgtggaccgccctgggaagaagcaggtggtggagactggagatgaccctgcgccggcggccgccccgtcctctaaaaagagcaaactaggtattcttgtgggaagacttggggtttctgctagagagttgatgaggacgagcgcgcccctggggggaaggatggcttcgcccgatctccggaaggatgcggctcggatgctgagggttatcgggggttgctggcctaggaatgttcctatcccccgcgcggctggcgaggacctttttacatctcgcatggttcgtgagtggagagtttttccttacgggcggaatattgctgctgttgtgtcggcagtgatggataaggatcgccagggagcggcacaaaagcgtcaggcggttgtcaggctcgttgaagctaggccgaagaggcagcggggatctgcgaaagctgcggccgccggtggaggcaagccgccgctggcggcgaagttgggcgtccctgcgtctagcaaagcgccggaggcgacgacaggcgccgggggctccaaaccgacgaaggcagtgccgccggccagcagagtgccggaggccgctaaggcggcgaagttgctgccggcaggcaagcgtatcgccgacttcgccaccgatattagtgtggaggactatcttggtgggtcggacgagggccaacttgctatagttgcgcctgccgcggcgacaacgacggctgccgcagcgccgaaggcgaagggcggggctattggcgccagaggtgaggtggcggccctcgcggctgtcagggatgaggcgggcgctgcgtcccgccagctgaaggaggtggcagagtcgctaagtcaggtggctgacttcgccaaccgcacgacgtcgggggccctcacggcagttgtgtctgccgaagtcgagagacttcggacacaacatactgacgccgtccgagagaaatcggccgccgacagcaagtgccgcaagctggtggacaaggtggccgcgctggagggagagaaggctgacctccggcgccaattggcgggggagaggagggagaccaacgaggccctcgtcaacgcgcaggctgcgcaggcggaggccaatctggcacgggcggagggcaatcttgccagggagcgcgccgagcagctgcaggagcggctcatcgccctggagagccgcgtggaacgggccgaggccgcgacgcgagcggaggccgaacggacgcgcacgcagcttatggacacatatcgtgagctgggtgcgcggaccggtgacttcgaagtgccggaccgagagcccggacttcactatctggaatgggtgcaggaggagctgcaggcactccccactgtcgtggaggggttcatgtcgtacgcctccctggtcacctgcgagggggcgatgaacgcgctctcccgcgaagggtgccggcacttcgaggtcttcgaccaggccgatgatgattttgagcgagatatctacaaggttgaagaccccgtagtgaaggaatccgccggggccatctacgaccggatgtggggtccgcatggtcgcgaggtggtcagggagcgggccacgacggcgagggctcaggcggcgcgtggcgagcgggtggacgacttcggagcgttgaacaacgcgctggctgacccagagccgaccccggctgtgacaatgagattgatggttctgattacgattatggtattgatggctcgacttagacacactgcacgaaagtccgtcatccccttcttaccctcccgccttgctaagcgtccgcttcgccgtcccgtggccggacagtccagccacttggagagactacaccaccgcctgcgtgaggagcaggaacgtcgacgacaggagcagcagagctcttctttctcgctccaccaggagatagagtctgtgaggagctgctctcctgtgcttcctctggaggcgccccctgcaccaccactgggcgccccagcttctggagtagctgctggaggagacccagacgacggagatggcgacgacagctcgagccacgacaccgacttctctgctaaccctgagccggaaggatgggttgctcgacccatcactcgcgacgctgctcgcgggtgtcacttccatgatgcgctcgacaccctgctacgtcgggcatttgaccggcatacttggtccgttgagtatcgctgtgtggtctaccagcatagtcgcggggtctacccggaccgctgggaggcgacttgcttggtgcgctgcccggaggacagtctccagggtgcagaggcctgctcagagcactattctatctctgaacgggactcagctgaggcagccatgcaagatgctgcacggcgtgcgctttcgcactactgctcggttttcggtggggcagctgacggtcttgacctgaagtattacccccgccgtccatctggcagcacaggaggcgtgattgtctcacctgtcggtgagggcaatcctaggttgagcagcacagtcaacctagccgccgtgctaaacacggagctggaccatgcattagacgagctgagtagggctcgtgctgagatcgccctgctgcgggctgagcgcgggaacgtcgtcatctggatgatgtcagagaacaggcgtagaggaggaaggcgtgctcagcaggagcgagccgctcaacaggaggaggtgccccagcagcagctgccacccccgcccccgatgtcgatcgagcagatgtttctgatgcagactcagtcagttcaggccatcggtcagactctggccgccattcagcagcagcagcagcagcaacagcagcaagcaccaccccagcctcagatgcctcagatgcccagagacaagcgtgctgaattcatgagaggtcatcccccaacgttcgctcactcttctgaccccatggatgctgaagattggctgcgcaatgtggagcgggagttgcataccgctcagtgtgatgacagggagaaagtcttgtatggtccccgtctgttgagaggagcagcccaatcatggtgggagtcttacctcgccacccatgccaaccccgacaccatcacctgggaagaattcagaggtagctttcgtcagtaccacgtgcctgcaggtctgatgacagtgaagaaggaggagttcctggcccttaagcaagggtcatcatctgtcagtgagtatcgagacaggtttctgcaattgtctcgctatgctcctgaggatgtcaacactgacgccaagcgacaataccgttttctgagaggcttggtcgaccccctgcagtatcaactgatgaatcacaccttcccgacattccagcacctgattgatagagcgatcatgacagaaaggaagcgtaaggagatggaagatcgtaagcgcaagatcagtggaccccagcctggaagcagcagccgccctcgtttttcaggcaatcaacctcagcagttcaggcagaaccagcgtccacctcagcagcgtcagcagcatcagcagttccaaaggcagtatcctcagcatcagtaccagaaccgtcagagcaatcagtcaggaggtcagtttcaaaggcagaatcagcaagcaccccgtcttcctgccccagcaaaccagcagaacagtcaggcagcaccagctcaggttggaaacagggcatgtttccactgtggagagcagggccattgggtgatgcaatgtccgaagaaggcagcccagcagcagtcaggccccaatgccccagcaaagcagaatgtgtctcagcctggagcaggcaaccgccctcaacagcgctataatcatggaagattgaatcacttggaggctgaagcagttcaggagacccccggcatgatagtaggtatgttcccagtcgactcccatattgcagaagtgttatttgatactggagcaacgcattctttcattactgcatcatgggtagaagcacataatcttccaactactaccatgtcaacccccattcaaattgactcagctggtggtagaattcgagctgatagcatttgtttaaatataagtgtggaaataagggggatagcgtttcccgccaaccttatagtaatgggtactcagggaatagatgtcatcctagggatgaattggttagataagtatcaggcagttatcagttgtgataaaaggacaatcaagttggtgtccccactaggaaaggaagtggtgaccgagttagtcccacctgagccgaagaaaggaagttgttatcagatggctgtcgatagcagtgaagcagatccaattgagagtatcaaggttgtgtctgaattcccagatgtgtttccaaaggatttaccgggtatgccaccagagcggaaagttgagtttgccatagagcttcttcctggaaccgcccccatctttaagagagcttacagaatatctggaccagagttggttgagcttaagaagcagattgatgagctgtcagagaaaggttacattcggccaagcacctcgccttgggccgcccctgtcttatttgtggaaaagaaagatggcaccaagaggatgtgcatcgattatcgagctttgaatgaggtcacgatcaagaacaagtatcccttgcccagaatagaagatctgttcgaccagttgagaggagccagtgtgttctccaagattgatctgaggtcaggttatcatcagctcaggatccgaccttcggacattccgaagacggcattcattaccaagtatggtttgtatgagttcacagtgatgtcttttggtttgaccaatgcaccagcgttcttcatgaatctgatgaacagtgtattcatggattaccttgataagtttgtggtggtattcattgatgacattctgatttattcccaaagcgaagaagagcacgcagatcatttgaggatggtattgcagagattgcgagagcaccagttgtacgcaaagttgagcaagtgtgagttctggatcaacgaagtcctgttcttgggtcacataatcaacaaggaaggattggctgtggatccgaagaaagtggcagacattctgaactggaaagcgccaacggatgctcgaggaatcaagagcttcattggaatggccggatactatcggcgattcattgaagggttttcgaagattgcgaagccaatgacagcgttgctaggcaacaaggttgagttcaaatggacccagaaatgtcaagaggcctttgaagcgctgaaagagaagttgactacatcgcctgtcctaatcttgcctgatgtgcacaagcccttctcggtgtattgtgatgcttgttacacaggtttgggatgtgtgttgatgcaagagggaagagttgtggcttacacgtctcgacagttgaaggttcatgagaagaactacccaatccatgatctagagttggcagcagtggttcacgcactgaagacatggaggcactatctgtatggacagaaatgcgatgtttacacagaccacaagagtctgaaatacatattcactcagtcagagttgaacatgaggcagcgaagatggttagagttgatcaaagactatgagttggagattcattaccatccaggcaaagcaaacgtagtggcagatgctttgagcagaaagagtcaagtcaatctgatggtcgctcgtccgatgccttatgagttggccaaagagtttgacaggttgagtctcggatttctgaacaattcgcgaggagttacagttgagttggaacctaccttggagcgcgaaatcaaagaagcgcagaagaatgatgagaaaatcagtgagatccggcgactgattctagatggcagaggcaaagattttcgagaagatgctgaaggcgtgatatggttcaaagaccgcttatgtgttcccaatgtccagtctattcgagagttgatcctcaaggaagctcatgagacagcctattcgattcaccctggtagtgagaagatgtatcaggatctgaagaagaaattctggtggtacggaatgaagagggaaatcgcagagcatgtggctaagtgcgatagttgtcgaagaattaaggcagagcaccagagaccagctggattgttgcaaccgttgcagatccctcagtggaaatgggatgaaattggtatggatttcatagtcggattgcctcgcactcgagccggctacgattctatttgggtagtggtggaccgtttgaccaagtcagcccacttcatacctgtcaagaccagctacaacagtgcagtattggcagagttgtatatgtctcggatcgtttgtcttcatggtgtgccaaagaagatagtgtcagacagaggaacgcagttcacctctcatttctggcagcagttgcatgaagccttgggcacacatctgaatttcagttcagcttatcacccgcagacagatggccagactgaaaggaccaatcaaattctcgaagatatgttgagagcctgtgcgttgcaagatcagtccggatgggacaagcggttgccttatgcagagttttcctataacaacagttaccaggccagtttgaagatgtcaccgtttcaggcgctttatggaaggagttgtagaactccgttgcaatgggatcagcctggagagaagcaagtgtttgggccagacattctgcttgaagccgaagagaacatcaagatggtccgagagaatctgaagatagcgcaatcgaggcagcgaagctatgcagacacaagaagaagagagctgagttttgaagtcggagattttgtctatctgaaagtgtcaccgatcagaggagtcagaagatttggagtgaaaggcaagctagcaccccgctacattggtccgtaccagatcctctcaaagcgtggagaagtggcttatcagctcagcctgccagagaatttgtctgctgtgcatgatgtctttcatgtgtctcagttgaagaagtgcttgcgtgtgccagaagagcagttgccagtggaaggtcttgaggtccaggaggacttgacctatgttgagaagccagctcagatccttgagattgcagacagagtcacccgaaggaagaccatcagaatgtgcaaagtcagatggaatcaccactctgaggaagaagcaacctgggagcgtgaagatgatctagtggccaagtacccagagctctttgctagccagccctga

SEQ ID NO: 14620 - DNA, 4113 bp, Zea mays
  Clone ID: MRT4577_113321C.1
atgtcgatcgagcagatgtttctgatgcagactcaggcagttcaagccatcggtcagactttggccgccattcagctgcagcagcagcaacagcagcaggccccacctcagcctcagatgcctcagatgctcagagacaagcgtgctgaattcatgagaggtcatccaccaacgttcgctcattcttctgaccccatggatgttgaagactggctgcgcactgtggagcgggaattgcataccgctcagtgcgatgacagggagaaagtcttgtatggtccccgtctgttgagaggagcagcccaatcatggtgggagtcttacctcgccacccatgcccaccctgacgccatcacctgggaagagtttagaggaagctttcgtcagtaccatgttcctgcaggtctgatgatagtgaagaaggaggagttcctggctctcaagcaagggccattgtctgtcaatgagtaccgagataggtttctgcaattgtctcgctatgctcctgaagatgtcaacaccgacgctaagcgacagtaccgtttcctgagaggcttggttgatcctctgcagtaccaactgatgaatcacaccttcccgacattccagcacctgattgacagagcaatcatgacagagaggaagcgtaaggagatggaggattgtaagcgcaagatcagtggaccccagcctggaagtagcaatcgtcctcgtttctcaggcaatcaacctcagcagttcaggcagaaccagcgtccacctcagcagcatcagcagtttcaaaggcagtatcctcagcatcagtaccagaaccgtcagagcaatcagtcaggaggtcagtttcagaggcagaatcagcaagcacctcgtcttcctgccccagcaaaccagcagaacagtcaagcagcaccagctcaagttggaaacagagcatgtttccactgtggagagcaaggccactgggtgatgcaatgtccgaagaaggcagcccagcagcagtcaggccccaatgccccagcgaagcagaatgtgcctcagcctggagcaggcaaccgctctcagccgcgttacaatcatggaaggctgaaccacttggaggctgaagcagttcaggaaacccccgacatgatagtaggtatgttcccagtcgactcccatattgcagaagtgttatttgatactggagcaacacattctttcattactgcgtcatgggtagaagcacataatcttccaattactaccatgtcaacccccattcaaattgactcagccggtggtagaattcgagccgatagcatttgtttgaatataagtgtggaaataagggggatagcgtttgccgccaaccttatagtaatgggtactcagggaatagatgtcatcctagggatgaattggctagataagtaccaggcagttatcagttgtgataaaaggaccatcaagttggtgtccccactaggagaggaagtggtgaccgagttagtcccgcctgagccaaagaaaggaagttgttatcagctagctgttgatagcagtgaagcagacccaattgagagtatcagggttgtgtccgagttcccagatgtgtttccaaaggacttaccgggtatgccaccagagcggaaagttgagtttgccatagagcttcttcctggaaccgcccctatcttcaagagagcttacagaatatccggaccagagttggttgagctgaaggagcagattgatgagctgtcagagaaaggttacatccggccaagcacctcgccttgggccgcccctgtcctatttgtggagaagaaagatggcaccaagaggatgtgtattgattatcgagctttgaatgaggtcacgatcaagaacaagtatcccttgcccagaatagaagatctgttcgaccagttgagaggagccagtgtgttctccaagattgatctgaggtcaggttaccatcagctcaggatccgaccttcggacattccgaagacggcattcattaccaagtatgggttgtatgagttcacagtgatgtcttttggtttgaccaatgcaccagcgttcttcatgaactcgatgaacagtgtattcatggactaccttgataagtttgtggtggtattcattgatgacattctggtttattctcaaagcgaagaagagcacgcagatcatttgaagatggtattgcagagattgcgagagcaccagttgtatgcaaagttgagcaagtgtgagttctggatcagtgaagtcctgttcttgggtcacataatcaacaaagaaggattggctgtggatccgaaaaaagtggcagacattttgaactggaaagcgccaacagatgctagaggaatcaagagcttcattggaatggccggatactatcggcgattcattgaagggttttcgaagattgcgaaaccaatgacagcattgctaggcaacaaagttgagttcaattggacccagaaatgtcaagaggcctttgaagcgctgaaagagaagttgactacagcgcctgtcctagtcttgcctgatgtgcacaagcccttctcggtgtattgcgacgcttgttacataggtttgggatgtgtgttgatgcaggagggaagagttgtggcttactcgtcccgacagctgaaggttcatgagaagaattacccaatccatgatctagagttggcagcagtgaaatgcgatgtttacacagaccacaagagtctgaagtacatattcactcagtcagagttgaacatgaggcaacgaagatggttagagttgattaaagattatgagttggagattcattaccatccaggcaaagcaaacgtagtggcagatgctttgagcagaaagagtcaagtcaatctgatggtcgctcgtccgatgccttatgagttggccaaggagtttgacaggttgagtctcggatttctgaacaattcgcgaggagtcacagttgagttggaacctaccttagagcgcgaaatcaaagaagcgcagaagaatgatgagaaaatcagtgagatccggcgactgattctagatggtagaggcaaagattttcgagaagatgcagaaggcgtgatatggttcaaagaccgcttgtgtgttcccaatgtccagtccattcgggagttgattctcaaggaagctcatgagacgtcctattcgattcaccctggcagtgagaagatgtatcaggatctgaaaaagaaattctggtggtacggaatgaagagggaaatcgcagagcatgtggctatgtgcgatagttgccgaagaattaaggcagagcaccagagacctgctggattgttgcaaccgttgcagatccctcagtggaaatgggatgaaattggtatggatttcatagtcggattgcctcgcactcgagccggctacgattccatttgggtagtagtggaccgcttgaccaagtcagcccacttcatacctgtcaagaccaactatagcagtgtcgtattggcagaattgtatatgtctcggatcgtttgtcttcatggtgtgccaaagaagatagtgtcagacagaggaacgcagttcacctctcatttctggtcagcttatcatctgcagacagatggccagaccgaaaggaccaaccaaattcttgaagatatgttgagagcctgtgcgttgcaagatcagtccggatgggataagagattgccttatgcagagttttcctataacaacagttaccaggccagtttgaagatgtcaccatttcaggcgctctatggaaggagttgtagaactccgttgcaatgggatcagcctggagaaaagcaagtgtttgggccagacattttgcttgaagccgaagagaacatcaagatgttgaagaagtgcttgcgtgtgccagaagagcagttgccagtggaaggtcttgaagtccaggaggacttgacctacgttgagaagccagtgcagatccttgaggttgcagacagagtcacccgaaggaagaccattagaatgtgcaaagttagatggaatcatcactctgaggaagaagcaacctgggagcgtgaagatgatctgatggccaagtaccctgagctctttgctagccaaccctga

SEQ ID NO: 14621 - DNA, 455 bp, Zea mays
  Clone ID: MRT4577_113322C.1
gggtacccgcggccccccctcgagtttttttttttttttttttttttttttttttttttttttttttttttttttttttttttttttggggcgaacctactaggccattatttttactacctttttatggggaccaattaaacacacccattattcggcgacggacatgcccccacgacatggcccggagaacaattccaaaaaattaattctaaaactatgaggggaagcccccgggggggggcccccgaaaaggcgaccccggaaggggggcaaatacaggggcacaggggtgggggcggggagcacgaggaggccggcaccaggctgggggcacaggaacaccctcacgggttcttccaggcggagcccccccactggggcccaacactttttggcccaaacttttcggcccgaagatctcagggggctcggctgccgcctcgggcctaatt

SEQ ID NO: 14622 - DNA, 4461 bp, Zea mays
  Clone ID: MRT4577_113323C.1
atgcaagatgctgcacggcgtgcgcttttgcactactgcttggttctcggtggggtagctgacggtcttgacctgaagtattacccccgctgtccatctggcagcataggaggcgtgattgtctcacctgtcggtgaggacaaccctaggttgaacagcacagtcaacctagccgctgtgctaaacacggagctggaccatgcattagacgagctgagtagggctcgtgctgagatcgccctgctgcgggctgagcgcgcggaacgtcgtcacctggacgatggttcccccgctcccgtcgggactcagcacccgtaccgctcacctcgatgtcagagaacaggcgcagaggaggaaggcgtgctcagcaggagcgagccgctcagcaggaagaggtgtcccagcaacagcatctgccgccccccgcccccgatgtcgatcgagcagatgtttctgatgcagactcaggcagtgcaagccatcggtcagactctggccgccattcagcagcagcagcagcaacagcagcaggccccacctcagcctcagatgcctcagatgcccacagacaagcgtgctgaattcatgagaggtcacccaccaacgtttgctcactcttctgaccccatggatgctgaagactggctgcgcactgtggagcgggagttgcacaccgctcagtgtgatgatagggagaaagtcttgtatggtccccgtctgttgagagaagcagctcagtcatggtgggagtcttaccttgccacccatgcccacctcgacgccatcacctgggaagagttcagaggtagctttcgtcagtaccatgttccggcaggtctgatgacagtgaagaaggaggagttcctggccctcaagcaagggccgttgtctgtcagtgagtaccgggacaggtttctgcagttgtctcgctatgctcctgaagatgtcaacaccgacgccaagcggcagtaccgtttcctgagaggcttggttgaccctctacaagcaatcatgacagagaggaagcgtaaggagatggaagatcgtaagcgcaagatcagtggaccccagcctggaagcaccaatcgtcctcgtttctcaggcaatcaacctcagcagttcaggcagaaccagcgtccacctcagcagcatcagcagttccaaaggcagtatcctcagcatcagtaccagaaccatcagagcaatcagtcaggaggtcagcttcagaggcagaatcagcaggcacctcgtctcccttccccagcaaaccagcagaacaatcaggcagcaccagctcaggttggaaatagagcatgtttccactgtggagagcaaggccactgggtgatgcaatgtccgaagaaggcagcccagcagcagtcaggcccaatgcccagcaaagcagaatgtgtctcagcctggaaagtgttatttgatactggagcaacgcattctttcattactgcatcatgggtacaagcacataatcttccaattactaccatgtcaacccccattcaaattgactcagccggtggtagaatccgagccgatagcatttgtttgaatataagcgtggaaataagggggatagcgtttcccgccaaccttatagtaatgggtactcagggaatagatgtcatcctagggatgaattggctagataagtatcaggcagttatcagttgtgataagaggacaatcaagttggtgtccccactaggagaggaagtggtgaccgagttagtcccgtctgagccaaagaaaggaagttgttatcaaatagctgtcgatagcagtgaagcagacccaattgagagtatcgaggttgtgtccgagttcccagatgtgtttccaaaggacttaccgggtatgccaccagagcggaaagttgagtttgccatagagcttcttcctggaaccgcccccatctttaagagagcttacagaatatccggaccagagttggttgaacttaaggagcagattgatgagctgtcagagaaaggttacatccggccaagcacctcgccttgggccgcccctgtcctatttgtggagaagaaagatggcactaagaggatgtgtatcgattatcgagctctgaatgaagtcacgatcaagaacaagtaccctttgcccagaatagaggatctgttcaaccagttgagaggagccagtgtgttctccaagattgatctgaggtcaggttatcatcagctcaggattcgaccttcagacattccgaagacagcattcattaccaagtatggtttgtatgagttcactgtgatgtcttttggtttgaccaatgcgccagcctttttcatgaatctgatgaacagtgtattcatggactatctcgataagtttgtggtggtattcattgatgacattttgatttattctcaaagcgaagaagagcacgcagatcatttgaagatggtgttgcagagattgcgagagcaccagctgtatgcaaagttgagcaaatgcgaattctggatcaatgaagtcctgttcttgggtcacataatcaacaaggaaggattggctgtggatccgaagaaagtggcagacattctgaactggaaagcgccaacagatgctcgaggaataaagagtttcattggaatggccggatattatcggcgattcattgaaggggttttcgaagattgcgaaaccaacaacaaggttgagttcaagtggacccagaaatgtcaagaggccttcgaagcactgaaagagaagttgacaacagcgcctgtcctagtcttgcctgatgtgcacaagcccttctcggtgtattgcgatgcttgttacacaggtttgggatgtgtgttgatgcaagagggaagagttgtggcttactcgtcccgacagctgaaggttcatgagaagaattacccaatccacgatctagagttggcagtagtggttcatgcactgaagacatggaggcactacatgtatggacagaaatgcgatgtttacacagaccacaagagtctgaagtacatattcactcagtcagagttgaatatgaggcagcgaagatggttagagttgatcaaagattatgagttggagattcattaccatccgggcaaagcgaatgtagtggcagatgctttgagcaggaagagtcaagtcaatctgatggtcgctcgtccgatgccttatgagttggccaaagagttcgacaagttaagtctcggatttctgaacaattcgcgaggagtcacagttgagttggaacctaccttggagcgagaaatcaaagaagcgcagaagaatgatgagaagatcagtgagatccggcgactgattctagatggcagaggcaaagattttcgagaagatgcagagggtgtgatatggttcaaagaccgcttgtgtgttcccaatgtccaatccattcgggagttgattctcaaggaagctcatgagacagcttattcgattcaccctggtagtgagaagatgtatcaggatctgaagaagaaattctggtggtacggactgaagagggaaatcgccgagcatgtggctatgtgcgatagttgtcgaagaattaaggcagagcaccagagaccagctggattgttgcaaccgttgcagatccctcagtggaaatgggacgaaatcggtatggatttcatagtcggattgcctcgcactcgagccggctacgattccatttgggtggtagtggaccgcttgaccaagtcagcccacttcatacctgtcaagaccaactatagcagtgcagtattggcagagttgtatatgtctcggatcgtttgccttcatggtgtgccaaagaagatagtgtcagacagaggaacacagttcacctctcatttctggcagcagttgcatgaagccttgggcacacatctaaattttagttcagcttatcatccgcagatagatggccagaccgaaagaaccaatcaaattcttgaagatatgttgagagcctgtgcgttgcaagatcagtccggatgggacaagagattgccttatgcagagttttcctataacaacagctaccaggccagtttgaagatgtcaccatttcaggcgctctatgggaggagttgtagaactccgttgcaatgggatcagcctggagagaagcaagtgtttgggctagacattctacttgaagctgaagagaacatcaagatggtccgagagaatctgaagatagtgcaatcgagacagcgaagctatgcagacacaagaagaagagagctgagtttcgaagtcggagactttgtctatctgaaagtgtcaccgatcagaggagtcaggaggttcggagtcaaaggcaagctagcaccccgctacattggtccgtaccaaattctctcaaggcgtggagaagtggcctatcagctcagtctgccagagaatctgtccgcagtgcatgatgtttttcatgtgtcttag

SEQ ID NO: 14623 - DNA, 437 bp, Zea mays
  unsure (1)..(437): unsure at all n locations
  Clone ID: MRT4577_113324C.1
cacccctacgtaagcttgcatcctctagttttgccgccctttttttttttttttttttttttttgaaaaattttataaaatttgcgggatttacccccaanttatacataaacctcatttccatccctttatcctattaagaattaaatacactcttatttgacttttacaaaatggttgaacatcaaattttaagccaaattatctacaccttacattccaattcctttaaaaatgacaagatccaaacctccttaaattacaagttcacattttaaaaccaacccccgtttttcttttattacctctttcattctcctttcacaaagccaaaccccaaaaataaagccttactttggttccttcctacattcaactcctatcatttttccaaactttcaaattaaacaaaattccctttcttcaaacaaaaagct

SEQ ID NO: 14624 - DNA, 4446 bp, Zea mays
  Clone ID: MRT4577_113325C.1
atgtcgattgagcagatgtttctgatgcagactcaggcagttcaagccatcggtcagactctggccgccattcagcagcagcagcagcagcaacagcagcaagcaccaccccagcctcagatgcctcagatgcctagagacaagcgtgctgaattcatgagaggccatcccccaacgttcgctcactcttctgaccccatggatgctgaagattggctgcgcactgtggagcgggagttgcataccgctcagtgcgatgacagggagaaagttctgtatggtccccgtctgttgagaggagcagcccagtcatggtgggagtcttacctcgccacccatgccaaccccgacaccatcacctgggaagaattcagaggtagctttcgtcagtaccatgtgcctgcaggtctgatgacagtgaagaaggaggagttcctggcccttaagcaagggtcatcgtctgtcagtgagtatcgggacaggtttctgcagttgtctcgctatgctcctgaagatgtcaacactgacgccaagcgacaataccgttttctgagaggcttggttgaccctctgcagtatcagctgatgaatcacaccttcccgacattccagcacctgattgacagagcaatcatgacagaaaggaagcgtaaggagatggaagatcgtaagcgcaagatcagtggaccccagcctggaagcagcagccgccctcgtttctcaggcaatcaacctcagcagttcaggcagaaccagcgtccacctcagcagcatcagcagcgtcagcagtaccagcagtttcaaaggcagtaccctcagaatcagtaccagaaccgtcagagcaatcagtcaggaggtcagtttcagaagcagaatcagcaagcacctcgtcttcctgccccagcaaatcagcaaaacagtcaggcagcaccagctcaggttggaaacagggcgtgtttccactgtggagagcaaggccattgggtgatgcaatgtccgaagaaggcagcccagcagcagttaggccccaatgccccaggaaagcagaatcgctataatcatggaagattgaatcacttggaggctgaagcagttcaggagacccccggcatgatagtaggtatgttcccagtcgactcccatattgcagaagtgttatttgatactggagcaacacattctttcattactgcatcatgggtagaagcacataatcttccaactactaccatgttaacccccattcaaattgactcagccggtggtagaattcgagctgatagcatttgtttaaatgtaagtgtggaaataagggggatagcgtttcccgccaaccttatagtaatgggtactcagggaatagatgtcatcctagggatgaattggttagataagtatcaggctgttatcagttgtgataaaaggacaatcaagttggtgtccccactaggagaggaagtggtgaccgagttagtcccacctgagccaaagaaaggaagttgttatcagatggctgttgatagcagtgaagcagacccaattgagagtatcaaggttgtgtctgaattcccagatgtgtttccaaaggatttaccgggtatgccaccagagcggaaagttgagtttgctatagagcttcttcctggaaccgcccccatctctaagagagcttacagaatatctggaccagagttggttgagcttaagaagcagattgatgagctgtcagagaaaggttacatccggccaagcacctcgccttgggccgcccctgtcttgtttgtggagaagaaagatggtactaaaaggatgtgtatcgattatcgagctttgaatgaagtcacgatcaagaacaagtatcctttgcccagaatagaagatctgttcgaccagttgagaggagccagtgtgttctccaagatcgatctaaggtcaggttatcatcagctcaggatccgaccttcggacattccgaagacggcattcattaccaagtatggtttatatgagttcacagtgatgtcttttggtttgaccaatgcgccagcgttctttatgaacttgatgaatagtgtattcatggattaccttgataagtttgtggtggtattcattgatgacattctggtttattctcaaagcgaagaagagcacgcagatcatttgaggatggtgttgcagagattgcgagagcaccagttgtatgcaaagttgagcaaatgtgagttctggatcagtgaagtcctgttcttgggtcacataatcaacaaagaaggattggctgtggatccgaagaaagtggcagacattctaaactggaaagcgccaacggatgctcgaggaatcaagagcttcattggaatggccggatattatcggcgattcattgaagggttttcgaagattgcgaaaccaatgacagcgttgctaggcaacaaagttgagttcaagtggacccagaaatgtcaagaggcctttgaagcgctgaaagagaagttgacaacagcgcctgtcctagtcttgcctgatgtgcacaagcccttctcggtgtattgcgatgcttgttacacaggtttgggatgtgtgttgatgcaagagggaagagttgtggcttactcgtcccgacagctgaaggttcatgagaagaattacccaatccatgatctagagttggcagcagtggttcacgcactgaagacatggaggcactatctgtatggacagaaatgcgatgtttacacagatcacaagagtctgaagtacatattcactcagtcagagttgaacatgaggcaacgaagatggttagaattgatcaaagactatgagttggagattcattaccatccaggaaaagcaaacgtagtggcagatgctctgagcagaaagagtcaagtcaatctgatggttgctcgcccgatgccttatgagttggccaaggagtttgacaggttgagtctcgggtttctgaacaattcgcgaggagtcacagttgaattggaacctaccttggagcgcgaaatcaaagaagcgcagaaaaatgatgaaaagatcagtgagattcggcgattgattctagatggcagaggcaaagattttcgagaagatgcagaaggtgtggtatggttcaaagaccgcttgtgtgttcccaatgtccagtctattcgggagttgattcttaaggaagctcatgagacagcttattcgattcaccctggcagtgagaagatgtatcaggatctgaagaagaaattctggtggtacggaatgaaaagagaaatcgcagagcatgtggctatgtgcgatagttgtcgaagaattaaggcagaacaccagagacctgctggattgttgcaaccgttgcagatccctcagtggaaatgggatgaaattggtatggatttcatagtcggattgcctcgcactcgagccggctacgattccatttgggtagtagtggaccgtttgaccaaatcagcccacttcatacctgtcaagaccaactacaacagtgcagtattggcagaattgtatatgtctcggatcgtctgtcttcatggtgtgccaaagaagatagtgtcagacagaggaacgcagttcacctctcatttctggcagcagttgcatgaagccttgggcacgcatctgaatttcagttcagcttatcacccgcagacagatggtcagactgaaagaaccaatcaaattcttgaagatatgttgagagcctgtgcgttgcaagatcagtccggatgggacaagcgattgccttatgcagagttttcctataacaacagttatcaggccagtttgaagatgtcaccgtttcaagcgctgtatggaaggagttgcagaactccgttgcaatgggatcagcctggagagaagcaggtgtttgggccagatattttgcttgaagccgaagagaacatcaagatggtccgagagaatctgaagatagcgcaatcgaggcagcgaagctatgcagacacaagaagaagagagctgagttttgaagtcggagattttgtctatctgaaagtgtcaccgatcagaggagtcagaagattcggagtgaaaggcaagctggcaccccgctacattggtccgtatcaaattctctcaaagcgtggagaagtggcttatcagctcagcctgccagagaatttgtctgctgtgcatgatgtctttcatgtgtctcaattgaagaagtgtttgcgtgtgccagaagagcagttgccagtggaaggtcttgaagtccaggaggacttgacctatattgagaagccagctcagatccttgaggttgcagatagagtcacccgaaggaagaccatcagaatgtgcaaagtcagatggaatcaccactctgaagaagaagcaacctgggagcgtgaagatgatctgatggccaagtacccggagctctttgctagccagccctga

SEQ ID NO: 14625 - DNA, 506 bp, Zea mays
  Clone ID: MRT4577_113326C.1
ctcgactgtgaacgtatgcgacgacgagctgggcaggatccaagctaataggtacagtatgggacagcgaccagcacaacggacgaactaagtcgcgaggtcggccgacgagggaattcaaggaacactacggtcagtcagcgagctggcaagttcggatagggactgctgacgtgaggaccatgacgaatatgaaatcgatgaccgaccaagatatgattggtgagttgagcgactccgatgatttgacggcagtcgcgacagcgaacaggaggacgtgcgcagagaaacagcacggcacggtatcaagcgccatggccaggacgagttcggacaccagcacacgcagcgttttaccatgcccaacacgcgcgtcaccgacttgatatcgactgcgagcagtttcgcgcgcacgacaacgcgatggaggcgaactgaacagggagctttacgggcagacgcgcaggaacaacggaacgcgacgcaaaggcgaacagaacgtgaac

SEQ ID NO: 14626 - DNA, 4371 bp, Zea mays
  Clone ID: MRT4577_113327C.1
atggagagtcatgatctccgggcagaaagggaatcacggcttgtgggtggcaatgagattgatggttttggttatgactatggtactggtaagtggtattctttccgtttggaaaggatggctcgtcttaggcacactgcacgaaagtctgtcatccccttcttaccctcccgccttgctgagcgtccgcttcgccgtcccgtggccggtcagtccagtcgcttggagaggctgcaccactgcctgcatgaggagcaggagcgtcgacgacaggagcagcaaggatcttctttctccctccaacaggagatagagtccgtgaggagctgctcccctgtgcttcccctggaggcgccccttgcaccaccactggacgccccagcctctggagtagctgctggaggagactcagacgacggaggtggcgacgacagctcgagccacgacaccgacttctctgctgaccaggagccggaaggatgggttgctcgacccatcactcgcgacgctgcacgcgggtgtcacttccacgatgcgctcggcaccctgctacgttgggcacttaaacgatgtacttggtctatcgagtatcgctgtgtggtctaccagcatagtcgcggggtctacccggaccgctgggaggcgacctgcttgatgtcagagaacaggcgcagaggaggaaggcgtgctcagcaggagcaagccgctcaacaggaagaggtgccccagcaacagcagctgccacccccgcccccgatgtccatcgagcagatgtttctgatgcagactcaggcagtccaagccatcggtcagactctggccgccatccagcagcagcagcaggcaccacctcagcctcagatgcctcagatgcccagggacaagcgtgctgaattcatgagaggtctgatgacagtgaagaaggaggagttcctggccctcaagcaagggtcatcgtctgttagcgagtaccgggataggtttctgcagctgtctcgctatgctcctaaggatgtcaacaccgacgccaagcgacagtaccgtttcctgagaggcttggtcgaccctctgcagtaccaactgatgaatcataccttcccgacatttcagcacctgattgacagagcaatcatgacagagaggaagcgtaaggagatggaggatcgtaagcgcaagatcagtggacccccgcctggaagcagcaatcgtcctcgtttctcaggcaatcaacctcagcagttcaggcagaaccagcatccacctcagtatcagcagttccaaaggcagtatcctcagcaccagtatcagaatcgtcagaacaatcagtcaggaggaggtcagtttcagaggcagaatcagcagacacctcgtcttcctgccccagcagcccagcagaacagtcaggcagcaccagctcagattgggaacagagcatgtttccactgtggagagcaaggccactgggtgatgcaatgtccgaagaaggcagcccagcagcaatcaggccccaatgccccagcaaagcagaatgtgtctcagcctggagcaggcaaccgctctcagccacgttataaccaagggagactgaatcacttggaggctgaagcagttcagaagacccccggcatgatagtaggtatattcccagtcgactcccatatagcagaagtgttatttgatactggagcaacgcattctttcattactgcatcatgggtagaagcacataatcttccaattactaccatgtcaacccccattcaaattgactcagccggtggtacaattcgagctgatagcatttgtttgaatgtaagtgtggaaataagggggatagcgttttccgctaatctcatagtaatgggtactcagggaatatatgtcatcctagggatgaattggctagataagtatcaggcagttatcagttgtgataagaggacaatcaagttggtgtccccactaggagaggaagtggtgaccgagttagtcccgcctgagccgaagaaaggaagttgttatcagatggttgtcgatagcagtgaagcagacccaattgagagtatcaaggttgtgtccgagttcccagatgtgtttccaaaggacctaccgggtatgccaccagagcggaaagttgagtttgccatagagcttcttcctggaaccgcccccatctttaagagagcttacagagtatcaggaccagagttggttgaacttaaaaagcagatcgatgaattgtcagagaaaggttacattcggccaagcacctcgccttgggccgcccctgtcctattcgtggagaagaaagatggcaccaaaaggatgtgtatcgattatcgagctctgaatgaagtcacaatcaagaacaagtatcctttgcccagaatagaagatctattcgaccagttgagaggagccagtgtgttctccaagattgatctgaggtcaggttatcatcagctcaggatccgaccttcgaacattccgaagacggcattcgttaccaagtatggtttgtatgagttcactgtgatgtcttttggtttgaccaatgcaccagcctttttcatgaatcttatgaacagtgtattcatggattatcttgataagtttatggtggtattcattgatgacattctgatttattctcaaagcgaagaagagcatgcagatcatttgaggatggtattgcagagattgcgagagcaccagttgtatccaaagttgagcaagtgcgagttctggatcagtgaagtcctgttcttggggttttcgaagattgcgaaaccaatgacagcgttgctaggcaacaaggttgagttcaagtggacccagagatgtcaagaggccttcgaagcactgaaagagaagttgactacagcgcctgttttagtcttgcctgatgtgcacaagcccttctcagtgtattgcgatgcttgttacactggtttgggatgcaaagcgaacgtagtggcagatgctttgagcagaaagagtcaagtcaatctgatggtcgctcgtccgatgccttatgagttggccaaggagtttgacaggttgagtcttgggtttttgaacaattcgcgaggagtcacagttgagttggaacctaccctggagcgggaattcaaagaagcgcagaagaatgatgagaagatcagtgagatccggcgactgattctagatggcagaggcaaagatttttgggaagatgcagaaggtgtggtatggttcaaagaccgtttgtgtgttcccaacgtccagtctattcgggagttgatcctcaaggaagctcatgagacagcctattcgattcaccctggcagtgagaagatgtatcaagatctgaagaagaaattctggtggtacggaatgaagagggagatcgcagagcatgtggctatgtgtgatagttgccggcggatcaaggcagagcaccagagaccgactggattgttgcaaccgttgcaaatccctcagtggaaatgggatgaaatcggtatggatttcatagtcggattgcctcacactcgagccggctacgattctatttgggtagtagtggaccgtttgaccaagtcagcccacttcataccagtcaagaccaactacagcagtgtagtattggtagagttgtacatgtctcggatcgtttgtcttcatggtgtgccaaagaagatagtgtcagacagaggaacacagttcacctctcatttctggcagcagttgcatgaagccttgggcacacatctgaatttcagttcagcttatcatccgcagacagatggtcagaccgaaagaaccaatcaaatccttgaagacatgttgagagcctgtgcgttgcaagatcagtccggatgggacaagcgattgccctatgcagagttctcctataacaacagttaccaggccagtttgaagatgtcaccttttcaggcgctttatggaaggagttgtagaactccgttgcaatgggatcagcctggagaaaagcaggtgtttggaccagacattctgcttgaagccaaagagaacatcaagatggtccgagagaatctgaagatagcgcaatcaaggcagcggagttatgcagacacaagaagaagagagctgagtttcgaagtcggagactttgtctatctgaaagtgtcaccgatcagaggagtcagaaggttcggagtcaaaggcaagctagcaccccgctacattggcccgtatcagattctcgcaaggcgtggagaggtggcctatcagctcagtctgccagaaaatttgtctgctgtgcatgatgtctttcatgtgtctcagttgaagaagtgcttgcgtgtgccagaagagcagttgccagtggaaggtctggaggtttag

SEQ ID NO: 14627 - DNA, 177 bp, Zea mays
  Clone ID: MRT4577_113328C.1
cccagacgtccgcgagcttgtccgcggaccgcaccctgtctgcacgcatctccaccttgcgatccgcaggcgagggctacgtagaccgcggcggactaccacgatatccggcgacccctggcggatggcgccgctgctgccggcatgggcgacgcctccttgggggtcggcggcggg

SEQ ID NO: 14628 - DNA, 418 bp, Zea mays
  Clone ID: MRT4577_113329C.1
aaaaaaaaaaaataaaaaaaaaaaaaaattaaaataaaaaaaaaaaaaaaaaaaaaggaggaaaaatttataaaaaaaaatacattcatataatcatacttttcacctacttctttactacttcttaccaactctttccttttctttggcgtcatctaaatccatttttttgtctgttacttttcaacttctcccattttactacccctgcctttatcccactttactgattttctgcttttgcctttttgccaacctctcgtactctttattcactcctgacaagcctaccttcctaacagtcctcctcctttaatgcttaatttgcctcatccttttccttctcttttatccctgcatttattttatttactcccacctttactttttctcttttcatttcctttactcccttttt

SEQ ID NO: 14629 - DNA, 743 bp, Zea mays
  unsure (1)..(743): unsure at all n locations
  Clone ID: MRT4577_113330C.1
cggatcacatcattctcataaactctctaaaatcccacttcctctatctacaattcccaacagtgacagccgtcatcatggtcgattttgagcaaatctccaagcaggccgaggccgacctcaacaccaagggtgcaaagactggcgaccatggtatcaacaccgtcgatgatggaggtgccaacgctgctttcgcagaaagaaaattcgacacggcggaggttattcaaggtgacgagttgagcaccaatgcaggctacaacaaacgcattccccctagcgaaggtggcatcctcgatgaccgtggccgtcaaactcgtggccagcactacgaagggaaaggcggtcccctcgacaaggtcgaccacacaggtgacaatgacaacgacgtcgtcccggcacgcgtccccaagccccacggtctaggctctgtcaacgacattgccacccaaggtgaggacgcaagcgagtcaaacgtgggcaagaaccctcccggccctggtggccaaaagtggaagggcgagaactaccacgagccggcgagcgtgcctggctctatatcggccgaagggtatgaggctcctgggagcgtggtggaggcgagtcgggaagcacagcaccctgagcgatttgggcctcaataggcgcgcanagggtatcagaaggcatgagcgtctgggaactgtatgagtacgatgattagggatcaatgtcagcgatgaagaactcgctagaaacatatg

SEQ ID NO: 14630 - DNA, 260 bp, Zea mays
  Clone ID: MRT4577_113331C.1
catggggtatcttttgcggaccataatggagtaacaataaggtgtgatggatatggatcgactggcaaagccggagtgatggtgctggacgactgaaattcgatgtgcccatcggccgagcaagcttgcgtgtgctgcacatggtagcactgcactcagcgtgcgtgatacgaacatagcttacaacacagacccaagctacgacccaaaagggtaaccatacatagagactactgaccaatgctatatataggacaatg

SEQ ID NO: 14631 - DNA, 350 bp, Zea mays
  Clone ID: MRT4577_113332C.1
tggatatggaggctgccacccctgcttctgtcttggccaacgacattgtcgaaggggacacagtgattgtgcctcaagatgcatcgtcgtagcccgagtgccatgtgcaggggcgacgacagggggcacagggggaaatgtcctcctaatgctcccctaattctataggacatgttagtttttagctaattttcatgtaaaaagcccccctaatctaatttggtccccctaattttggatcctggcttcgcccctgaccatgtggcttgtaacccatagaatgatgtggatgaatctgttgttgagaaaacacatgttcgtgaggtcgtaaaaaaagtgccgaataatgt

SEQ ID NO: 14632 - DNA, 355 bp, Zea mays
  Clone ID: MRT4577_113333C.1
cgtgccggtgagcgtgggcggctgtgcctgcaggtgcggtccgggttcccgggtcggcccgcgcgtccgctggtttgcggcgggttgtctcgtgccgtgggtccgcggcgccgtgctggcggggctccgcgcagcgcgtggcggggccgctgctgcccgtgcgccgcggcgtcgtgcggggcgtgctcttggtccgggctcgggtccctggtcaccaccagcaagtagctggccgtcgcgtcgggcccgctggcgtgcgcggtggtgtgcgcgtgggagacttcgcggccacgccgcggcgccaacagtctcggggtgctgcgtgggtgttcgtgtggtgggtcacggacccgtg

SEQ ID NO: 14633 - DNA, 590 bp, Zea mays
  Clone ID: MRT4577_113334C.1
gcgagacgggaccgagcccgagggcaggctgcagctgcactgccggttcgtcaccaagcttctcaacgacctgttcggcgtgcaggcgcgcgcgggttgcgcgtgcgcggggccctacgcgcaccggctcctcggcatcagtccggcgcgcgccaaagccatcagatcagccgtcgagcagggctaccacggggttcgtcccgggtggacgcgcgtcagcctggcagtacacgtcgatgcaggaggccgagttcgtgctggacgccgttgccttcgtcgccagcttcggccaccggttcctgccgctgtacacgttcgactggaaaaccggagactggcactacgatcacagctgcgcccgtgggctcgtgccgaacatcgtcggcggcaatcccagtgggcgagtcaaagccgagaactgctaccagagctacatggcatttgcgcactgcctggcggagtccttggctaccacttgcactgggctcagcagcgatcctgctatacgtattcccaagagggtcgacccccagttggtgtatttcctcgtatgagttgtcataggcggtgatactactccgttccgtttt

SEQ ID NO: 14634 - DNA, 844 bp, Zea mays
  Clone ID: MRT4577_113335C.1
gggtacctcgaggccggccgggaccatctctctacccctctcaatcatcctgagcaccttgggttccagggtctttcgttgagaaaactgagtacacataggatccaaatgccctgcaataatttgccccgccttgtcctcctgctatcaggattgttggcagaaaccggcttgatcagatgtcatcttccaatgccccagggaccagtgttcggcaaggcgagtgctgagatggataggtcggtgttgtatggccgtcagggtacggtgactacctggcacgagacaatcggtgctattgtccaagggggaggcagtctgatcaagagatcttccgacggcgacagagaaatacaagctgctcggagagagtggacaactatcgacgaacttcgtgacttgattatgtctcaaaataactggcataatctggagtccccagtccaaggaagtctcttcgagtacgcccacaacccgaaatatgtttccgtccgagctaacgactttccctacgatttaccagcaggagtagagcactacatcttatggacgcgggtgtcggccataacgcgagaggcctttgccccacgggatggtgaagcggtgccagaccacagcttcaatgacccgtcgcgagtagaagcgctgataagatacgtcgagcattatgacttttacggctggtatgggattcatgacgaggacgtggagaactcgtttgcgttatcgagctttgcacatgccaccaaccccgtctggcatgatcccgaatctgatcacaccgtcacccgcgagcagggtgccgccgtcatgaaatggctcggaagacatgttgccgccgcta

SEQ ID NO: 14635 - DNA, 253 bp, Zea mays
  Clone ID: MRT4577_113336C.1
attcggctcgagctggttcgtccaccccacatggtgtccgccgccctttaactctctaaagggggggtgttttacaaaaaaactctgggtgtgcactcccaagctccacgtttcggccataagaccacaagacaactgggttaatgaagaacaaatcctgtgcaattattctaaaaaaataagaaaaagggttaaaccggaggaacacaatttatgcgagcgatgctagagaagaacccctccccggaacaaa

SEQ ID NO: 14636 - DNA, 287 bp, Zea mays
  Clone ID: MRT4577_113337C.1
cggctcgagcaccgttccctgcacgccaaccaggacgtacacgccggacacacgtcacagccttcaaccctccctcccatacaaccccaagccccaacacaaacacacacacacgatcggtctcgtcgcagcgcacgctcgcgccgcgggtttgatcgtcacgagtggcgacttccttcccctccctctttcgccgatgaccacctcgtcctccgggagcatcgaagcatcggcgaactccagacccggctcgttctcgttcgcgagcacgatcacgagcttcacga

SEQ ID NO: 14637 - DNA, 264 bp, Zea mays
  Clone ID: MRT4577_113338C.1
cccacgcgtccgcggacgcgtgggtacaacggggacatataataacataatagctgatatacaaggtggcaacagatcgcaccaccagcaaccagcatccaaccacagaagggttctgcatgcaacacactgatgggatctgctaagccaacttgccatgaagaatcaattctgaccacacatactgtgcaggcacacttgactaccagctgagagcatcgcgcaccatagctctgatcaccacggtgtaaacaccacttgtgc

SEQ ID NO: 14638 - DNA, 250 bp, Zea mays
  Clone ID: MRT4577_113339C.1
accttcggaattctttaaacacaagactggctactgtctcgtggtccggtatcgagaaaggatggcgggccttggcaagggtataggggcttgcaccccgaagaaagctacatttaggagcttctcaggcgcactctacatacccttgggtaaaaattgcaggttactataaggggggcaaaaaacttaaggattcctatctcctccccccccaactcatgggccactccaccgtataccacggcttaat

SEQ ID NO: 14639 - DNA, 297 bp, Zea mays
  Clone ID: MRT4577_11333C.1
gtcaaaacactgctcctcgtcacataaaaccatgtgaagaagaagcatactcaatggccagcactaccatgcccctatacttcacaagcttccccggccaggaaataagcctgcctgaagactatcttcggctaggccactctgacgatactcaagacggccataaaggccaacaccgtgttgagctccaacaggcagtgctacagccacgaccgcgtgctctacctgggctccctgctctacttgcgcccgagctacctgaggggcgagttccccgacgagctacgcttgcacacc

SEQ ID NO: 14640 - DNA, 523 bp, Zea mays
  unsure (1)..(523): unsure at all n locations
  Clone ID: MRT4577_113340C.1
aaaaaaaaaaaaaaaaaaaaaaaaaaggggggggggggggaaaaaaaaaaaaaagggcggccgatataaaaagatccaaaacttacatacgcaatgcatagcaaaaaaaataagggtcttctctttttgtaacctacaatgcatttcactcgcccgctggcttaacaacttacttttctgtaaaaaaccctgggggggggggggctttagnccccttgttaacaaatcccccttattggcaaaatccctgaatattccaaaagtccacgcaccgttgcgccctttcccaacttttgccccagtcgtgaatgtcgaatagggaccccccctcgaaccgcctttttaaacgctggggctgtggtgattacaatcggaacgccccttacactggccatttacctacggcccgttcgtttgtttcccttaccttgctttttccccatggccgccgcttttccccggcaatttctaattggggccctccttttagggccccgttttagggctttcccggacctgctct

SEQ ID NO: 14641 - DNA, 1360 bp, Zea mays
  Clone ID: MRT4577_113341C.1
gggtacctcgaggccggccgggacggaaactgaaatcaaaaccgcaaaacaacaccgcaccacggcaccagccaggcagccaccagcaaacagcagcgagccagcaaggatccccaaccccccacgcacaccaaattccccatctccccgtccccgtagcacgcgcgtccttctgccttcgccatggcctctgcacccactccgccgcccctcctcccggtgacaaaccccgcacccggatcgtccccggccgccgccggaggctccgacgcgccgatcgctacgccggctttccggctcttactgagccggctctccgacacggcgcggcgctcgctgtccgatcgccggccgtggggagagctcctcgaccgttcggcgttctcgaagccggactctctctccgacgccacctcccgtctgcgccgcaacctcgcctacttccgcgtcaactacgccgccgtggtcgccttcgcgctgggggcctcgctgctggcgcaccctttctcgctcctcatcctcctgggcctcctcgccgcctggtgcttcctctacctcttccgcgcgtccgaccagcctgtcgccctcttcggccgaaccttctccgaccgcgagacgctgctggggctcgtcggcgcgtccttcgtcctgctgttcttcacctccgtcgcgtcgctcatcatctccgggctgctcgtcggcggggccctcgtcgcggcgcacggcgcgttccgcgtgcccgaggacctcttcctcgacgagcccaacgcggcccccggcaacagcgcggcccaagggctgctttcattccttggcgcacccggatctggggtttgaggcggcggacggcaagatctggtagggtccttgggctcgacaagttcgtattaagctggaaattttgtggatctagtcttgtagctgtagcttattgcttgccctgttcctcttcatgtacctacagatctactggcttagtgctggtttcgattgatgcaccggcttctgcgaagctctgcatgtacctacagatctactggcttagtggtggtttcgattgatgcaccggcttctgcgaagatcagcaaattcatcgagattttaacatatggagtttagtgccaagtatacgagtttgtggtgtcagactttcaatatggattgtatcttcattcgcgagcattgatgatacgttaatatgcttcattcgttcaatgttcgattagtatttctttttgctatacttgatatgtttgtggaaactcatgataatttctgaccatgagttctgaggggtggcttgcgatgatgcattgattttacctcatacatgttgttagatggtgtatgtcttctcttt

SEQ ID NO: 14642 - DNA, 1739 bp, Zea mays
  Clone ID: MRT4577_113342C.1
aattcggcacgaggctttgttgatgcatacggcaccgccgatgaatggccgatctcggaggccggcagcggcgcgcggcgcgaaagcggcccccaagagcgacagcagagtgatggagaaggatccgaggaaggccgcgacaccggcgaagggaccggccaacgcgggcacccgggtcaccatgaacagaatccagtcgagagagcgcaagctcgcgctgcagcaagatgtggataagctcgtaccgtcgaatccggtgctgaattccgaggtctcaccggcgacagtgagccaaggtcctccagaccatcctcccggcgctcgtccgtcgccgcacagcggcgtggccaacggcaagcaaacgccacggaatcccgtcgctacctcgccgagccaggatgaccggtccggggcagggaaagagaaccagtcgtgcagcaacacgccgagcacgagcagccgccagtcgccgtcgcagcagaagacgcccaagtccagggcgacgccgccgcctgacaggcgcagggttactcctgctcagacaagccctgctattgcgcctgaccgtaaacggcctgccgacgctgctgctggcactggcagcaactctgacaaagtgacgacgtcccacgacgacgcgagctcgagcgtgccgaacaaagtatcggaggagctgctccggtgcctgctggccatcttctcgcagatggggggctcggctgctggcggcggccgaggactaggagacgaggaccagcagcaggcgctgtccccgtcggtctccggctccagcgagagctcggcgtcgtcggaggcggacgcgtacccgcaggacccctacggcatcctggagctgggcgccagggacatcggcgcctacaagcggttccacgtggtcgacgccgcgtccttcgacggcaacggcgacacgcctctcgttcgtcggagactcaaggccttgctgcggaggctgtcgtcggttgacctggcggggctctcccatcagcagaagctggccttctggatcaacgtctacaattcctgcatgatgaacgcgttcctggagcatgggatacctaccaccccgcaaatgctggtggctatgatgcccaaggccaccgtgagcgttggtgggcgcacgcacagcgccatgtccatcgagcatttcatcctgaggctgccctacagcgccaagcaggtgaaggtgagccgggaaggagccaagtgcgacgacggcgacgtgacggcggcgcgcggcgcgttcgggctggagtggcccgagcccctcgtcaccttcgcgctctcctgcggcagctggtcgtcccccgcggtgagggtgtacacggcggcgcgcgtggaggaggagctggaggcggcgaagcgggagtacctacaggcggccgcgggcgtgtgggcggcggggaggctggcggtcccgaagctcctgcactggtacctgctggacttcgcaaaggacgtggacgcgctcatggactgggtctgcctgcagctgccgccggagctgcggcaggaggcggtgcgggccgtggaggccgggcggcgcgcgggcgccggcggccgcgtccgggtcctgccgtacgagttcaggttcaggtacctgttggcctcctgacgacgcgtgcgtactacggtaggagtagtgccgtgcgtactggaggtggtagtagtagtctttgcaataataaaacggagatgggattgactatgcagtttttatt

SEQ ID NO: 14643 - DNA, 312 bp, Zea mays
  Clone ID: MRT4577_113343C.1
atgattattcgctgtagtctgaccgccccgacgagctctaacggatccacgcagcgacaggccacttaatcttctggaactgcgcccgcttcttacgtatgctcgccatgtcccgagccatcagtgacagctacctgaatccactcgtgatctcctaacccaaagctctgatggtggataggaatgacagacatggactagttactgatcctacccactgactgcatacccgacgtgcagagcatcgaggacgcgtgcacggacgatcgcacatgacttccgaacatggcaccgctcggtgaacatgagcag

SEQ ID NO: 14644 - DNA, 400 bp, Zea mays
  unsure (1)..(400): unsure at all n locations
  Clone ID: MRT4577_113344C.1
cccacgcgtccgctaagctggccaaagctattttcaattcagtgataaattgctgcatgtaggttctagggcttcaaaggttgacactttgttcttttatagcaagggaagtgtctcaatatttttttggtctatgttgatgacattgtagttgctagctctntataggatgctattgatgctatgctccaagatttgagttcagagattgcatcgaaggacctaagacaactccattacttccttggaattgaggtatagaaaactggtgatggcaattacttgtctcagactaagtacacgttagattcgcttttaggttgaaatgatgaattgcaggcctactttgactttgccagtacttcagaaaagttaagaactggtgaangtgaactactag

SEQ ID NO: 14645 - DNA, 287 bp, Zea mays
  Clone ID: MRT4577_113345C.1
cttcgctttagatacaaaatactcttatcaaaccattggggaagacaccaaccttttaatagattaggattaagggtttctttttgaggggttcaagattctttcacaagagaaaaataaaattgtgggttcttttagggaggttaaccgaatttgcctaccttagaggtttggacaatggaatctttgtttgaaatgggtgtaccaacaactttttttttgggtttacaattgggaactttgggttgtttataattttgagaacaactaaatttatacttgatttt

SEQ ID NO: 14646 - DNA, 420 bp, Zea mays
  Clone ID: MRT4577_113346C.1
ctcaggctttgtgaggactgtcattcagtcaccaagttcatctccaaattcacagatcgggagattgttgtgagggacgtgaacagatttcaccacttcaggaatggagtttgctcgtgcagggattattggtgatgatgatgcaaactccttgttttagttaccttcactgattatactggatgataactgaaagtaggagctgttgtttcttcaaaccattgtgtacagcctaacatatttcattagcctaggcatggtgatagcttttcaggaggggcatcagattgatcaactagtctggagaaaagtggaactcatacctgacaaacagttttgacacgcttgtgaggatgcctcttgtttacatgtaaagagatcgaactcaagactgataggatgattatgatgcttagggtc

SEQ ID NO: 14647 - DNA, 688 bp, Zea mays
  Clone ID: MRT4577_113347C.1
ggcgattgggatcctcgaggccggcggccgggactgagaaatctcatcacgtcagagcaattggacgccgacgaattgtcccatcggccgagatgctcccacaacgaattgcgcgggcctcggccctgcgtagcggcatggcagctgctcgacgacttcctacgatccagcgccgaacattcctccccgatcagtacaccgacaagaaggtcattgatcagaagtaccccgaggcgcccagcatgaccgaggcggaggaccccggaatgaacggcggctacatcaacccaccccgaattaagcgacagttccgtgaccctcacggcaactggtgggatccccaggagcgacgaaactttggtgaacccattcacgaggataacgatgttttgggaatcttttctccctgggagtacacttggaccaccgccggtcccggtgccgtcatggtcggaacctttatcgccgttttcatgagcgtcactggaattgtttatcttaactaccccgaccgcccggcctacccccgagcctttgagggtggtctggagcgagagcttggtggaccaggagctacaagggctcgtatggagggagatgaggatccttaagcaatatgcgtttgtacataaagaaatggaatgcaagagattgaatcgcgcgaaaaaaaaaaaaaaaacccgcggcc

SEQ ID NO: 14648 - DNA, 695 bp, Zea mays
  Clone ID: MRT4577_113348C.1
ggccgcttttttttttttttttttcacaacacaaatattcccatttgcttcgttaccacaatgagtagaaacacaaaaaactcgccatctaccaacattcccatatacaaaaacacgttggtcaagtaagatccgtcccatccgaatgtgctcccgtcacaccaatggcaaagtcctctcggatcctcgccagcgcactcatttcctcttcatcatgcacctccgcttccacgtcgtcctcgccgtcgctatctctactcctcgcaccatcgctgttactccgactgccgttgacaagctcacccgcttcctcgtcattgtcagactcgtcatcgctgtcatcgtcaagcttgctgctgctaccgctgctgcgcgggtcgcgaccgagttcgggtttcaacttgcgctcaaagtcctcagcgtgagcgtcgcggaaaatgtcgcctacgtgcgtgaatgcgcgttgtaagggcgaggggcggaattcgtcttggacgccccgccgcttgcgagcgaacgcctgcgggtcatccagttctgagcctgtagcagtggctgggcgacgcgggccagcttcagttggcgttggtggttgtccctcgccaggttgttcttcgtcgacttgcgttggtgcacgaggaataccagatgtgggtcttcttccacttccgcattcgaaggaacatcccggccgg

SEQ ID NO: 14649 - DNA, 646 bp, Zea mays
  unsure (1)..(646): unsure at all n locations
  Clone ID: MRT4577_113349C.1
cccacgcgtccgcccacgcgtccgcccacgcgtccgcccacgcgtccgcaagtcactctcgaatcgtccgatggcgagaagttcaaggtcgacaaggaggtcgccgagcgatcagtcctgattaaaaacatgattgaagatgttggcgagtctgacaacccaattcctctgcccaacgtgaacgcaagcgtcctacgaaaggtcttggaatactgcgaacaccaccgtggtgacccactgcctgctgccgatgccgatccatccaacgacgacaaccgcaagcgggcgactgagatctcggattgggaccagaagttcatccaggtcgaccaggagatgctgttcgagatcatcctggctgctaactacatggatatcaagcccctactcgacgtcggctgcaagaccgttgccaacatgatcaagggcaagactcctgaagagatccgcaagttattcaatatcgtcaacgacttcactcccgaggaagaggctcaaatcaagaaggagaacgagtgggcagaggaccgataaattcgtctattactctcgtttaccttttgacgtcttcatacgtttgtatcattgttacatgctcttcgtcgttgaactgcatctcttggtcttgtcgtatccaaaanaaaaa

SEQ ID NO: 14650 - DNA, 327 bp, Zea mays
  Clone ID: MRT4577_11334C.1
ccgggtcgacccacgacgtccgagaggtggtggtgctcctgctgctgagtccaagaaagaagagaagaaagaagagaaagaagaatccgatgatgacatgggtttcagtttgttcgagtaatgcggtatacttggcatttggttttgctgtaccctttcgaaatctttatgtcgttgtttagtttgttgtattcgactatcttcttagactttgctgaaattctcaagagatttttttactcaaacatcagtccacttgtgattggcatttatatttcaaaaaaaaggatatgagtgaaagcgctggaaaaggccaaaaaagataac

SEQ ID NO: 14651 - DNA, 430 bp, Zea mays
  Clone ID: MRT4577_113350C.1
cccacgcgtccggccgctctcgcacgacatcacgccgcgcgtgaatcgcctctactacaacgtcatcggggaacatgtctccgtcacttggctcggtcccacgccaagggtgatcgtgaacgaccccaagctggtgcgggagatcctggccaacaagcttggtcacttccagaaacgcaagcacgacggcatcgtcaggcggctggccagcgggctggtcaaccacgagggcgagaaatgggctgcgcaccgcaagctcatcagcccggcctttcacctcgagaagctcaagaaaatgttgcccgcgtttgcttcgtgctcagacgagttgatagctagatgggcgggttacgtggggtccgacggagcgagggagatagatgtctgggcggagttccagaacctcaccggcgacgtgatctcgcgcacg

SEQ ID NO: 14652 - DNA, 585 bp, Zea mays
  Clone ID: MRT4577_113351C.1
ctagcagtagcttaaatctaaaaaatgtcatgaattcctaaggcagcagtgcatgcctttggtaatgcctttactccaatcacgtttggtacaaccaagtagctggcaggtgttggagtaacaatgtagtgatgatcttaggcagattgagccccaatacataacaccaagcagatctacaacatggctcaatccataatccatgaggagcgacaacaacaaccatgtgagtcatgtggatctaaacaagctactcaaagtgcggagggaatcttgacagctgcacaatacctaccatcaatgtgcggctcgtaccactcatactactcaaaataatccatgcatgatgaatgacatcagtggtgtctgcaattcgaagaattggtttacctagacgctgtactcatattacggcagttaaccaataaagctccatacattatgatgtgcgtactcattggtcgctaccttcctgcagcagcaacaacaattgctgccatacaaccagttctctttgatgaaccctgccttgcagcaacccatcgttggaggtgccatcttttagataacatatgagatgtactc

SEQ ID NO: 14653 - DNA, 693 bp, Zea mays
  unsure (1)..(693): unsure at all n locations
  Clone ID: MRT4577_113352C.1
cggacgcgtgggttcacatggnaagtaatactgcgggttggagaagtatctattgatgttgctttgcatgaattctgaactagaacccgcagtattacttccatgtgaatgatcaacttggtacggacatattgatcattcacatggtaagtgaatactgcgggttggagaagtatctattgatgttgctttgcatgaattctgaactagaacccaaaaacttctccccatatactcctatcccagatctgattagacccgagcttgcaccgtataatggattatcaaactggacaggttgagagttctgcgggggcatctgcatccccgaaggattcccgtaattactatacatggctgcagtgaagaagcagaggtataaaagaggttagaccaaaatgatagtatgacaattcataacagagagttgacatatttgcagacgactaaatgagaataacaaaacattagcatgatgttacataaatcatggttaaatataccggagctatttaggtcactgataaggcagaaagctctataattttcattaatccccaggcacatacacaacaacaataaaacattttagctacaagcaagttgaggcaagctagagttaaaactcaacaaaaacaagtcaagatgcaggcacgtggataactgttttccatgcacttatattcaaagcta

SEQ ID NO: 14654 - DNA, 580 bp, Zea mays
  Clone ID: MRT4577_113353C.1
gcaccagtttgtgctatgaagcttattaactgtcctttctaccatgttggatgtgaaacagcctttccacaaggtaatcttgagaaccactgttcgaagctacttcaaacgcatatgttgtatgttctccaagcaagtacaagacaaaatgctgctgttaatgatatgaatcaacgattacaacttcttgagaaggctcagtcacttaacgaaatctctggggctttagatgttaggtcgctcactctgataataaaggagcaagaagcaaagatcaaggatcttgagagcggtatcaaagcacaagaagcaaaggtgaagaaacttgagaacgagcttaggtcgaagaatgcacgataacttcctacacaaaccagagtggcatactttaggacctgtaaataatcagtagcactgacatatatttggaaattatgtttttttgttcatataaaaagtatagagaattgcagggtttagacttcagaatatgaacttctcttgggttatcttttaagttgatgtaattgatgttttgatatttttatatgatatattgattgcttggattattatgggg

SEQ ID NO: 14655 - DNA, 316 bp, Zea mays
  Clone ID: MRT4577_113354C.1
gaggacgctgtattgcccttttgtgtttcttttttttttggtgtgtgccaccttttaaggaaaaagcaaaaaattttggaagggtttttcgtgtggttaaccggatttggggtttcaaacagaaaacatcgcaaacggggtgtggttacagggcgcaacccatgtgggtgggaatgcacaaaactgggcgtgggcatgcatggtttcagcgtcgcattataaattaattcgcatccgcattgccctttggcgcgttttgaattaaagaaaatgtcgcttctctcgaaataaaacacacgctcccctttcttaaaaa

SEQ ID NO: 14656 - DNA, 268 bp, Zea mays
  unsure (1)..(268): unsure at all n locations
  Clone ID: MRT4577_113355C.1
gtgactacccgctgagtttaagcatataaataagcggaggagaagaaacttacgaggattcccctagtaacgggcagcgaaccgaaagcatcccagctcgagaatcggtgcggctctgcgtcccaatcatgaccgtgatgcgtacgtacccagcgacagcaccgagcctaggtcctgtggactagtacgacctgggagggtgagagtccctngcgtaccccaacgtgttgtacgacgactagtcgttgatgtgccggttttacactga

SEQ ID NO: 14657 - DNA, 1489 bp, Zea mays
  unsure (1)..(1489): unsure at all n locations
  Clone ID: MRT4577_113356C.1
ttctgcccacgcgtccgcggacgcgtgggttcagaaatgcggcccatgacgaacccgcccctgctctcaccgtccccgttccctcttctcctccgcctcctccacctctcgcgcgcccctcgccgccggaaccctaccaccgggcgggcacctacttgtacttcccgcaaccgcctcccgctcctcctctccgctgccatgtcctccgcttccaacaccgccccccactccgtcgtcgccgaccccactactcttgcccgcaaagtcgcagacatccgtgccgccggacccaccaaactccaggttatcgccgacttcgatggcacgctcacgcggtactggtacgacggcgcccgcgggcagagtagccatggactgcttaggcaagggaacgaggagtacgacgccaagagagaagcgttgtatcagcactaccaccccatcgagatctgccccgacatcccactctcggagaaggccaagctcatggaagaatggtgggagaagactcatggtcttcttattgaaggcggtcttacatacgaagctatcacaaaatctgtctctgatgccgcaattgctttcagagagggtgtggtggagctctttgagtacttggaggagagagagattccagtgctggtattttctgcaggacttgcagacataattgaagaggtcttccggcagaaactacacaaaacattcaagaacatcaaggttgtctccaacaggatggtgtttaatgaagaaggccgtctcatagcatttaaagggaaaacaattcacgttctaaacaaaaatgagcatgccttggacatggctgctccagtgcatggcaatccgggggatccaaacggatttatggatgactattcattggtgaagaaaaggaccaatgtgctgctacttggcgatcacattggggacttggggatgtctgatggtttaaactatgacaacaggatcgctgttggattcctgaacgccaacatcgagaaatctttgaaggattactctagcgcgtttgacattgtatatctgaacgatgctccgatgcacggagttgtgcaacttgtgtctgaattatgtccataatccagtgatcttcgaatcgcccctcagaaaaaaagtatatcttcccatcaactttgcagctaccgaagttcgctcacctggaaatgtaaggattccactcttgctaactagggcttgcttcatgagcagctgttctataggctcatttcagggctaaagagcccttggaacaatgttttttagcactagtgcattcaaacacccactgtagatattttctcctccttttccaattcgaaagatccgtgaatgttttttccttctctagctaacacaatatttaggaacttttttgggacatgcctagatacccttttgtgttcagtatggattaagatcagtaataactntactatgtcactttaagtaaaagaactgacggttaagctgc

SEQ ID NO: 14658 - DNA, 280 bp, Zea mays
  Clone ID: MRT4577_113357C.1
ccgcctgtaggtccgtccgtataccgggcgacccacgcgtcgctcgcgtgccgcgcatccgagatctgcttcgtgcgagcctaccacgagagggggagggcttatccagcgcgtgcgagcctgaccgctagtgacatgaccgctgctgtgtatcccggtgaagctgctgcttgaggcggtgggccacatagtcacgggcgagctgaggaccaggctaggtctaccgcggctccatggtcgagtgcgaggtcacttggaactgccaactcgaaaacatcat

SEQ ID NO: 14659 - DNA, 619 bp, Zea mays
  unsure (1)..(619): unsure at all n locations
  Clone ID: MRT4577_113358C.1
nnnnnnnnnnnnnnnnnnnnnnnnnnnnnnnnnnnnnnnnnnnnnnnnnnnnnnnnnnnnnnnnnnnnnnnnnnnnnnnnnnnnnnnnnnnnnnnnnnnnnnnnnnnnnnnnnnnnnnnnnnnnnnnnnnnnnnnnnnnnnnnnnnnnnnnnnnnnnnnnnnnnnnnnnnnnnnnnnnnnnnnnnnnnnnnnnnnnnnnnnnnnnnnnnnnnnnnnnnnnnnnnnnnnnnnnnnnnnnnnnnnnnnnnnnnnnnnnnnnnnnnnnnnnnnnnnnnnnnncttgcgggccgaccaacaaaccagcgcggggtggccccctgaaaacgtaataagaggaaacttgttttattgttaataatgagtcacacgcgatggcatgtcaactcattattcggtaccggcccgggcggccgcccgggcaggtacttggatactgccagcaaatgtgataattttaatagattttgtggttatccatgcccttattttatgggcgtgttccactgatacaaaataaaaaaaaaaaaaaaaaaaaaaaaaaaaaaaaaagcttgtgccttctgccgccccccccccctgggcgatctccggggggtttccttcctctgtcggccgctgg

SEQ ID NO: 14660 - DNA, 310 bp, Zea mays
  Clone ID: MRT4577_113359C.1
aaaacagataatattatacataagatcacagtcaggacatctaaagatagtcattacaaaacattacaatgaacgccgactaagaatgggtggatggaccaccggcgagtggtcccaggctccaggggtcggtcaggaggaacttcacattgacccggcccacgatcgaccgggcgtggggatggacctgcacctcaatggcacccagctcctcgtcacttcaaccggcggcgaagccttccgcgatcacaccagagtcgatttcatcgaaatgggagaccatctgtcccagggcaaggatgctcccgtg

SEQ ID NO: 14661 - DNA, 396 bp, Zea mays
  Clone ID: MRT4577_11335C.1
ccggccggggccgagcccttaacccgacgctgcccccgccacctcccgccgccaccgcgttccacctcggcgcggacgaggcgcggctgccgctcctcgcggactacgcgctgctccaccagcccgccgcctccgtcgacgcgccggcgtcgtccgagtggagcgccgggagcgccttcaccgccacctccgacgcggtcaccaccaccgcctcctccaccgtcacggcgccggcgggctcctcccaggcccaggtgctggccgccggcggtagggacagcgacacgtgggctccgccgcgctcagggagggctactacctacagatgtccctcgtcatccgcctcacctcgaaggacttcctcgtcggcgctcctcccgcgaccgacctcctcct

SEQ ID NO: 14662 - DNA, 1026 bp, Zea mays
  Clone ID: MRT4577_113360C.1
atgtcgttgaagtctcctaccaagaagctagacactagagatggctctggtggtggtgagaagaaggtccagccgtcacgttcgccgccgaggggacgttcccacagccgccgccgccgatcgtcacgtgccggatcacgcgtcgtcgaccgcgtcatcgagcagtcatctgcgaatgtctcctggccgatgctctcccggacgaattacccagagaccgtgaaggaggcatgggacgcggtcaagatcctacggatcggcgatgagcgcgcgcgtgatgctagctcgcagcagcgttgccgagaattcggcatcctctctttcaaggaaggtggttggggggtatttatagccctcaaccaccaaacaaccgtttgggttgggctgctgtcgatgagcgcaccggacagtctggaaaatgttaaaccctatttccctttcagcgagagcgtcactgagtttggcatccgcatcacgacgctggacaccaacctccgcaccctcggtgacaacatcaccgacaccgaggtggtaaagaagttgttgcaggtggtaccagaacggcaaacccaagccgcggtctccctcgagaggttccttgatctgaacaaggtgacgatcgaggaagtgatcggtcgtctccgcgtgttcgaggagcgcgctaagccctcacagatcacggacgccatggggcgcctgatgctgtgcgaggaagactgggaagcccaccgcaaggaacaccgcgatgaggaggagaaggaggttgtggccccttgcctgtgggtgcttgataccggggcgacaaaccacatgacgagatcgcgccgcctcttcgccgagcttgacaccagtgtcactggaaccgtgaggttcagtgatgggtcggtggtcgacataaaggggaagggcaccgtcctctttgccctcaaatctggcgaacatcgctggcaagacggggtctactacatcccatggctcatgaccaacattgtgagtctcgggcagatggatgatgtaacaccctga

SEQ ID NO: 14663 - DNA, 405 bp, Zea mays
  Clone ID: MRT4577_113361C.1
gaaaaaaaatcaattttaggtggtttaaaaggccaaataaaaagggggaaccaaccaagggcccttctttccccaatttgggttggccttttcccctttccaaactggccgtttggggcctttaaaagggaatcccccttttccaacttgaatttatccctgaacttttttacccccttgaaaaaaaaaggtttaaaccttttttttggtacccataaactcctgtttaaaaaaaatctgggaaatggttggccccccctggggggggatgtcctttggccccttaaacaccaaggggccctttgggtacttttctttgaggggggtttccttttccaaaacgtattttttcacttcccggaggccctttttcccccccggttggccaaaaaagttgggggccat

SEQ ID NO: 14664 - DNA, 601 bp, Zea mays
  unsure (1)..(601): unsure at all n locations
  Clone ID: MRT4577_113362C.1
gcaggcctctccccgnagaagaggcggatcgggcggagatgttttctctttccacctttcattcgctgtcgccgccaggctgcaggcctccccaggacataagcctggaagaattcgatgatgaggacctgtctgagatcaccgatgactgtggcctgggcctcagctatgactcggaccactgcgagaaggacagtctctccctgggacgttcggagcagcctcaccccatctgctccttccaggatgacttccaggagtttgagatgatcgatgacaatgaagaggaggaagaggaagaagaggaggaggaagaggaggaagaggaggaggatgaggaggaaggagtcagagagggcaaggagggaggaggccctggctcggaggcccctgccccagaggccctgatcccctccccctccctggaggaaccccacaagaaccgacccaccacgctccacctgacgacgctgggagcccaggactccctgaacaacaacggaggctttgcccctgcgcctccagcttcctggcaggagaccgcgctgtgctcgcctccccaggagcccctgagagagccccccgcctccctgcagcccac

SEQ ID NO: 14665 - DNA, 610 bp, Zea mays
  Clone ID: MRT4577_113363C.1
gaaaaagataacagatgctcagtctcttgaggctagtttggaggaaaaatccttggagatcgagggaaaacttcatgctgcagatgccaaacttgcagaggcaaaccgcaagaagtctcaagctgaccgtgatttagaagaggcggaagctcgtcaacgtagactggagaaggagaaactgtattttgagacagagcggaaggcccgagaaaagcaacttaaggagcaggggattcaacgagctggagctggaggaacgcgcggcataggagcaggcgtgcgcacggagcttgcagggagcacgcagcgaatgtgcgtcgggagcatggctggcgatgtggagcgctgatggagattttttttcgttacaggatagaagggaggtcgcacggcttggacaagaaaaaaatgtgacggtgggatatttccaggaattaaacgccaagcattggaataagaatgaagagagatatttaggatgagcggtgagaagattaggatgagagagatattttcttttttaattattctttaaagaatttcgcagatatttttgaatcctgatttttagcgctgtacacatgccgacaaatacatattttattctccg

SEQ ID NO: 14666 - DNA, 359 bp, Zea mays
  unsure (1)..(359): unsure at all n locations
  Clone ID: MRT4577_113364C.1
aattcggcacgaggcttgggttagcatggatggaggcagtcccatgcagaccgtgctgtcggcccccggcgtcaaggacaagaagctggtctccttcacccgcaacgacgatgcgaccaacgacaaggacgccgtcaccggcctcatccgatccatcgtcggcggcgccacgccgtccagccccgcgcagcggaccgccttcncacgtnncttnnccacatnncaacacccccgtcgtcgacctcttctcgggccttgggcgccggcggcttcccgacgtgcgcccctactacggccgtcaagtgcaaccccggagccggcgctcctgggcgcgcttcgcccgcgctgggccgcggggg

SEQ ID NO: 14667 - DNA, 334 bp, Zea mays
  unsure (1)..(334): unsure at all n locations
  Clone ID: MRT4577_113365C.1
tcctgctcccccctttactgcttaagttctttcaaatgatctccgcccgcccaactgcgactgcggcggacccgacgaacaagaaccggcaggctctgattttcggcaggagcaacanatttcccgcatggctcgcagggacgcgtcctcgctcgtctcccgctgcctcccgccgagagcccctgccggagcgccgaccgctgtcccctctgccccgcccaggacagtgcccgcatacgcgatgcaccagagcgacgccaggtgacctccagacgctcacccctgcagccacaccacacgaacccatcacgccgtcagtccatgtgaactacac

SEQ ID NO: 14668 - DNA, 211 bp, Zea mays
  Clone ID: MRT4577_113366C.1
gggaataagataaataattattgcttacttttttcaatcgcctgccagcattgtatagcccggttccctaacaaactcatgccacttatcctcttatctaaacaactctaatacttatctcctactttctagccatgcttatcttcatgctggcgcctaagcctttgctgccggcgtttgttgcttctggccgcacgatctgcgctagtag

SEQ ID NO: 14669 - DNA, 554 bp, Zea mays
  unsure (1)..(554): unsure at all n locations
  Clone ID: MRT4577_113367C.1
ttgggtacctcgaggccggccgggacactagataaccgcagagactggtcgtcttcgtaccttctcatatacacagcgacatgcacacattaagatccgttcgcaggccatgccgatatctcaagcactctcctgccgccgcccgccaagtcagaccgagcatgaggcaccgcatacacggcactctcggctcgggcatcgtaaacctccatgctcacgctcgtcgccatctgcactgccttcagcatgctactgaggcagatgatgatatgcccggagacaacacagtgtgcggaatgagaagaagctcacgacaccctcttcagctcagactggctctagggaatcacggcccatgcccaccctcgtggcgagcaagatcctactgccatctcatgatgcgaggagtgcgacctaccgtgatgtcttccagcaagagcatctaacagcgcataatgacgaggcagncaacaacttcgctcgaggtcactagaccaatganaaagagattgatgacctgagcctagaccggatcaggaagnttgcagataatt

SEQ ID NO: 14670 - DNA, 531 bp, Zea mays
  unsure (1)..(531): unsure at all n locations
  Clone ID: MRT4577_113368C.1
tccgnaaaaaaaaaaaaaaaaaaaaaaaaaaaaaaaaaaaaaaaaaaaaaaaaaaaaaaaaaaaaaaaaaaaaaaaaaaaaaagaggcgaccgatcttaaaggatccaaaacttacatgcggcgcgcccgctttaggggttcccagttttcttgccccgcccttgccccgttttctgttctttttttgggccccctagttcctgttccctccccggcgtttcccaccttagtccctgggaaacccctgccgttcccccctttttgcgccttgccgaacttcccctttccgccggctgttttaatcgggagggggcccgccccgtccccctttcccccccttggcccggcctttttggcgcgggggcccccccctttaccccccctttaccccctccggttgtgggggtccccccccccgttccctttccttttgcccgtccctttttcccccctcttttcgttttttcccttttttttttaacccggttgctccttttcccccgcccattttttttttgggggcccctttt

SEQ ID NO: 14671 - DNA, 607 bp, Zea mays
  Clone ID: MRT4577_113369C.1
gcaacacaagtttcattctattattatatgaacaaggcaacaggttgcctcacaagtcacaacttttagatttctatgtcaagccagacaagaggagcattgtgaatcctgcataaactttcccctgctccttcacgagatcagacaaccaggcaaactagctactaatgcactgatacccctgaatcacaaatagtagctgctaatgcaacaatctgaacgagctacatttccataatcctacaaatacaaagatgacgacgaggaggagaaccaaaaggagcaaccgcaccactgaaccaatctgtgcagcctctcctttccttctcaaggatggcactgccactctagtcacatggacgctgtgctgcatgccatcacgaacatcctgcctcgtctcctccgtgcgccgctgcctgagattgcctccatgatgcagctcaccatgtagcagtgtaccttcatcaaatgtgaaatcttgtagcttttctgttgacgaaactacttgagtagatatcacccctccacgttgaatacgcattgcttctccagcctggtcaagaccatattaatccagttagtactagcgtcagcaaatggagttatg

SEQ ID NO: 14672 - DNA, 309 bp, Zea mays
  unsure (1)..(309): unsure at all n locations
  Clone ID: MRT4577_11336C.1
tcgagtggatatntgtctcaaccttcatctaaaaggcttgtcataaattcaatagtttgattctccaaaaaaaaaaaaaaaaaaaaaaaaaaaaaaaaaaaaaaaaaaaaaaaaaaaaaaaanaagggccgggccaaaaaataaaaaagcccgaggcacccccgaaaataaataaccaacccggaccttaaaataaaacaaaaatcgcctaaagccaactaaaataaaatttcccccgaaaaaaaatcaaaaaccgttcccgaaaggaaaacaattttcccttaaaaatgcaaaaaaaaaaccaacccg

SEQ ID NO: 14673 - DNA, 525 bp, Zea mays
  Clone ID: MRT4577_113370C.1
ggggccgggaaacggggcccttccattgtttacaggggggaaattttacacccaaggaacaaaaaactaaaagggggccgcaaaacccccaaaaaaaacagccccgaaaaaaacaacccaaacaaccttaaaccaaaaacaaaacacgaccgccatcgccaccaagaaattcccccccgggagagggggggaccaaccccccaaaaccgaaaaggggggggccctgacccttgggcgcgaaaaaaacgcccagggggggaaaagttttggggggggcggccccggggaagggaacggggccccggaaaaccttcccaagaaaaaatttgaaccccccgggggtcccctctaaaaaaaccccggaaaagcccttgaaccccccccttcttgaaaacctgaaaaaacccggttgggggaacccctggaatgttgccccccaaaacctgtgggggggggttgggggccccccttgccaaaacccttcccccccttgggggggccaaaaaaaaaaaccaaaagggtccc

SEQ ID NO: 14674 - DNA, 335 bp, Zea mays
  Clone ID: MRT4577_113371C.1
ggcacgcgtacgtccacgccatcgttatcattctctatcgggagactcatacgtccggcggcttcttcttcgtcacctgctgcacagatgaggcgatgctgaacgccatcgagggcatgaacagcaaggagctgaacggacgcaacatcaccgtgaacgaagcccaatcccactgcgagtcgttagtccactgcagtgggtactgcggtcagccgtggaggctgcggctacagcagaggcgagcgccgtgatagctgtgacagatactgcggtgagcacgctgctactgttgaggcagccgctacagtagttgtagcagcggctactgaggtggc

SEQ ID NO: 14675 - DNA, 281 bp, Zea mays
  Clone ID: MRT4577_113372C.1
aggccattcacaacgcgaatggggtttgccgccgccgccgccgtccgggaggggggcggcgctgttcaacaggaggaggcaagccgaccggccaccgtcgaggtcctcgcgcccgccagccattctttggtctctcgctctcttctttctgccgctctctttccccccgaccgtacttgtacttgtacttgccccaaagattatcccgctcttaccttcttctggcgcgccttgagaagtcttgcttctgcggctcttgcttgcgtcggcgcattgatatt

SEQ ID NO: 14676 - DNA, 1674 bp, Zea mays
  Clone ID: MRT4577_113373C.1
aatctgaaactctttcttgctttttatttgccatacatgcatccagcaagatcttcctcaactatccaatgaagcataagcatataattaacattaaactggagagcaactggagacaggagtgtacaagtacaactggtactacatgccaaagcactacgtgttgagcgaatctagcttcggaacgttacagtcaactagccagccaaccttaaacctctggcacattataagctgcatctgcagctttggcggctatgatacacatgatacatgagaatctctaaagagttaagatgaacctacaactgtcctgctatcctacttatccactctgaaagctataagggcagagctagtcttgattgtcataatacccattctctccaatctgtatttttttttacaaagcaaactggacagggcccatctccatattgttcatgtcaggcagttcccaagcacccagaaagtgcaacagatggtcccgcagtggctgcaacggaactagtcgctggatcgactgggcttggggtggcactgtaatctcatcttcttcatcagttggatctaaattcaagtcaatgttcctgagcaaaccccttggagtgggttcagttgcatctaagacctcatcaaatggactatgccatcaaatgagtggttgaactgctccttgatgtagtagcctcttttgcttcagttgcatcttaagacctcatcggctatctccacttttaggctactagcttgctagattggttctccacgaattgtttatgaactatgacaacacccgctaagttccacacgtccgcggcagcctctcacacaagtacacaacccctcgcacaacctgtcattgcctgtatggttttctgctttctgcacacaagaaacttaatcagcaaaaagagctcaaaagtcatagggcctgtttggttcctttagtctatggactaaagtttagtcccaaccctgtttagttttagggactaaaaatattcaaaacgcattaaatgacttataagaagaccaaaatgcctcttaacattgttcaaaagggacctcaaaccaaaagggaccttaggctcaatagaaaacgggattatcatagccataaggagattgataaaattgttcaaaacatgccttttgacaaagctccagtctttaatggatttaatggaaagtttctgagacacatcatcaaaattgatttttataaactttgtcatgatttttatgatggtaacattaatctggatggaattaacacctctttcatcgctctcatcccaaaggtgaacaaccctgttagggtgaatgattttaggccaatctctcttctcagtatagccatcaaattaatcacaaagctattggtgaataggctgaagcctgtgattcaacgaattgtgcacaaaaatcaatatgattttattaaaaacagaaccatacaggattgtgtcttgcttggtgctatgaatacttacatcagtgccatctttctagaaaggaagtggttgttctcaaattttgataaagcttttaatacagtggagcatagtgtcattattgctatactcaatcagttgggttttcccgtcaggtggattcgttgggtcagttcaaccttaaattctgaatcctctactgttcttttaaatggtg

SEQ ID NO: 14677 - DNA, 154 bp, Zea mays
  unsure (1)..(154): unsure at all n locations
  Clone ID: MRT4577_113374C.1
tggagggggttttgttgagcgaatacgcgcaaaaaagatctagagatcttgtcttttgggctgacgctaggacaaactacgtaggatntgtatgaatataaagattactaatcttaataaagagttatattaagtttatactgcgcgtcagtat

SEQ ID NO: 14678 - DNA, 1742 bp, Zea mays
  Clone ID: MRT4577_113375C.1
cgaaaagaatgttgctgaacttaagtcagtaaaagaggcagtggcgtcagtacatgaacagtatgctgccttggtagatgaaagagacacagcaatcaaaagagcagaagaggtcatatctgctgggaaggacattgagaagcgagtggaacaactgacattagaactgattgcgtctaaagggtctcttgaattggcccatgctgcgcatcatgaagcagaggaacgtaggatcggtgcagcattggcgaaagagcaggattgcaatgcttgggagagagagttgcgtcaggcacaagaggagctggaacgattagacagtaagcttgcgttcagtaacgatatgcagcacaatattgatgcaaatttgcacaagttgcttagcctcaattcggagctgtctgcctatgtggcgaacaaactgactgaagaagctgaaggtgtttccaaggatcatgagtccgaagattctagacacattagcaacgcagttaaggaagctctagcatcgaaacagaaagaacttcaggagctcaaagccgacattgagaaggcaaaggctgaggccaacgtgctaagatttgctgccatgacactcagatcagaactggacaacgagaacgcttcacttgtcgcgttgcagcagggagaggctatggcatccgttgctgtttcttcactagaagctgagctcaaccggacgaaacaagagatagaatctgtcaggtccaaggaggcagaggcccaagaaaagatggtggagcttcccatggttttacagcaagcgactcaggaggccgaggacgccagggtagcaggtggggcgggccacgaggagctgaggaaggcgaaggaggcattcgagcaaaccaaggctgccgcagctgcagcagagaccaggttatctgctgttgtgaaagaaacagaagcatccgtagcatcagagaggctagcacgcgaggcgcttcaagctttgcaagaaagcgaacaggcaagagaaactaaggattctcagcgaggagtggtgcttcctataagcgagtactacgaacttagcaagagggcacatgaagccgaagaacaggcgagcgagaaggtagcagaagcactggcacaggtagtgtcggcaaaggaatcagaagcaatgagcctggagagcctaaaggaagcgtccgatgaaatggacgagaagaaggaagctcttgagatcgccctggagagagccgggagggcgaacgaagggaagcttggcgcggagcaggagctgaggaaatggagagccgaccacgagcagcgccgcagagctcacgaatccgcgaaacgcgcggtgaatcctttgaacggtccgtctagagtatttgtcgaacagaagggtccataccacaaggagcaggaatccaaggtgcaggtgtcggggagtagtagctacgagggcctcgttccaaaccaaaagatgcagaggaagaaatcgctgttccctctgatgggctcggttctatccaggaagacccgggcacagacgtgaggtaaacgagatcctataggcacctggggctttgccattcacattgctgtacattggtgtaataagctgttttcttttctcggtcttctttggaaagagcctttttgttttgttttaaaggttggtactatcctgtggaaggtgtaatttatttgcgggtataaacagcgtagaacacattggaatactttttatatgatttttttggtaactcggt

SEQ ID NO: 14679 - DNA, 637 bp, Zea mays
  unsure (1)..(637): unsure at all n locations
  Clone ID: MRT4577_113376C.1
gacccacgccgtccggctctgcntggnnagcctgtncnngttgtggtgggacccgcaccacnntcggtggcngnnagtgcagnncagcgggcttccgnnccgtgtnncggcgtcncccgcggccaggnnatgatatcnnngtccggggtggcgccctccatgtcnnggagatcgtgagnncctgccacnnggctgcgnnngccgcggcganngggagcgnngctgtcggnagggagggagaaaatcggnncggtggctttgcccatttcgcacggcggnccccggcgcggtgnngttcgccgggccgcgccccagcggggggcaccgaaaggagcaccgagnnctgtccacgtcgtgnngcggcggagcattgaaatggtgtgtagaaattcaaatagggtaccggnngtggttgaaaatttgggatgggtggagttagcancggtagggcccattttacgaacctcatcgtatatcgatgagttgttggaatcctctagcatagactcgagcatgggagtaatcacctcacaccactcgattgctttatgattgatgcacccgactaaagatgtaaaatggtttagaaattnnnnaanaaannnnannannanannnnnnnnannnnnanananaa

SEQ ID NO: 14680 - DNA, 198 bp, Zea mays
  Clone ID: MRT4577_113377C.1
tggctggctggtatgaaactgggctctgctgttgtggattgcaggggccagggggaggaggagggaaggggagtacggacacgatggaagccgactctgggaagctcttcgtcggcggcatctcgtgggagacggacgaggatcgcctccgcgagtacttcggtcgcttcggcgatgttcccgcggtcgttatcttgc

SEQ ID NO: 14681 - DNA, 110 bp, Zea mays
  Clone ID: MRT4577_113378C.1
cgactaatgaccggctcacctacttacaagacagacggacaaccattgggcaattgctgcacaaggctcagttctgcgtctcgaggcaaccacacccatgtctaatgggc

SEQ ID NO: 14682 - DNA, 108 bp, Zea mays
  unsure (1)..(108): unsure at all n locations
  Clone ID: MRT4577_113379C.1
gggatccgcagatgaagatcattccggtcccttgtctggatgacactatgcctggttaggggtgggcgagagcaccaagaaggcagggggcgntgaccctgtggaacc

SEQ ID NO: 14683 - DNA, 282 bp, Zea mays
  Clone ID: MRT4577_11337C.1
aaaaaaaaagaaaaaaaaaaaaaaaaatataaaagaaagaaaaaagattgcaaaaggaacggggtgataaaaactgtgcgtgcgaattcctatgctccattatgatgccccgtttatttgatccatggggcgaagttttacatctacgcgacggggaaaaccgtggcgttgcccaacttattcgcctcgcagatcatgcccgtttcgcaagctggagtaatatctaataggcctcgtccgttggcctttgccaacagtagcgcagtctgattggcgtttggg

SEQ ID NO: 14684 - DNA, 401 bp, Zea mays
  Clone ID: MRT4577_113380C.1
ccgcgcacgcgtgcgatgacgcgttggagctgcgtaccatcactacctgcagctcgccggagaccataggaacagacacacacgcactagatcctcgggggactgatctacatgatcataggttaagtatccgtgaggggaaccggataaatcttatatagcgaacccatagattcaattgagtgttcggctctttacaacgccccgagtggaaatagcccatgatggtacccaatttaactcatcttgcggcgagacccacctttcgcatgctggagctgtacggaaagaacccgcacaacatttctgttgctaatacgtgtccaggctgagtggagaatggtactgtccttgtcacaggccattaacgccgtcctgtgcagccggttaccacatattgg

SEQ ID NO: 14685 - DNA, 463 bp, Zea mays
  Clone ID: MRT4577_113381C.1
cccgcccttttttttttttttttttttttgacacccctttttctttggttatatggctacggtgttgatgttatttcacaatttcttctttctcaaaatgaaaggggtggggcatgcaactgtcaccggctgatacagggtcacgggaccccttctatgaggctgttgtaaaacccaaccttgttgtttacaaagtgtcctatcccatcaaggggtagatggtacggtccttaaacggacattttttttagtggacagcccccgtacacaaagaacttggcccgcaagggggcgttgaccctttctgggtgttctaaaggaaaaaaatggtgtccatcacaattgcggatagtggcccaataatcttcgtgcgcgccaagctcaaaaaaactcacccgcccccccgccctctcggtaataaccatccatggtaaaataaaggcgcacatctcaccccctgccc

SEQ ID NO: 14686 - DNA, 294 bp, Zea mays
  Clone ID: MRT4577_113382C.1
ttttgaatatttttttgtccgaaattaacccagcccaaggggggcttaaattagcttgcaaccaggctcacttggggaggacgtccatccgcgcatctttggctgcggccaagtatatcccggcctccggggggcccttgaactctgcgggatggtcaagatcgttgttggcgctgaagagcttgcctgtgagactctcgaggctctgctttttctgcgtgggctaggaagcgaagacggtctgggacgtcgcacctccaagaaggaggcgccacactgcggacgtcagaggtg

SEQ ID NO: 14687 - DNA, 315 bp, Zea mays
  Clone ID: MRT4577_113383C.1
atataaacttacatttgtgccagacgcaagctagagctaatttattccagaccaaaacttaatgtgtgtgctgagcagagagattacacaaaccatgggagggacaaactgctccctatgggcaatatgctaaagaaccagagtggaggaccgacttctactgaaatgaaggcttggccaaccggaactggtacccatttgaggcaaatacagcaaaagcctggggatcactcacgctgagtaacactagacgagtgatactggacgaccatcgttggacgagtattctatgaccgaggggttggtagaaataac

SEQ ID NO: 14688 - DNA, 1892 bp, Zea mays
  Clone ID: MRT4577_113384C.1
gtaattttcatacttctttacattctttttacattctacacgagtgcagagtgcagacttcagctgcccttttatgtattttcataattccatgcaacctttcagtcttcagctcgggctccatcaccgctgccggcgatcagctccagcgcggagtccacgatggcggagaagctctcacggtgcttgctgatgccgacgcttcctgagaaaacgtggtagcactccagctccgacgtggtgtcagcgatggactctagcagccgcttcatgcccacctccctgaggagctgaacgtacccgccgctgtggtcaccgcctccgcccgaactcgtcatcagccagatgacttgctgcaccacgaaccgtcgcattcgtgggaccctgatgtccggatacctgtactgcttcaggatgctcgccagcagctccacgtatgcgcgttcgtccgccacgccggcgccgcgcagctcggcggcaaactgctcgccgtcgatgaactggcagatctccgtcgacaggccgacggacacctcgagtattctgtctttgtccaccttggtggcgttcagcaccgccggcaaggccttggtcaccacgcgcagccgctccctctgctgttgccccgagtacgcgcacaggttccgcaggaccctcgccgcgttgaggcgccgccgtgcgtcgccgtcctgcaacgccgacacgaactggtccagcacgtcggtctgcctgagtatcgccgcgcatccggcctcgctctccagagccagcatcgccagcgcttcgccggcctcgcgaccgagttccgtgtcttgggacttgaagaatatcgaaagcagcagcttgacgacgcctcccgtggccacgatggcctccttgccgctgtcgtgcatggccagcccagtgagcacgtccgtggcaagcttctgcagctccctgtgctgctgcccgtaccgcagtatgccgcgcaggttgctcaccgtgaagacgttctccgcgacgctctcccggagcgccttcccggtgctacccgtcgtggacacgagcatcttgaccaccttgagcgcgcgcttcatggcgcgcacctgcgagtcggtgacgtgcgggttctggaggagagcccgcgacgcctgcgtgaagttgatgaccttggcgagcaggcctcgcgcgttaccgatcttgccgcagttgtcgtggtccctggcgagccttttgaggatgagcaggcccagcaggttgaactgcaggtggtcgtagccgcggctcgccgccggcggtgaggctccgtgctcggcgggagcaccgggcagctgcgggtgcgttccggacacgggcggactcgtggcggtgtagagcagggacgtgacggactcgatggccccagggatgccggacacgcggagcgcgttctgacgcttgctggcgagcttggacacgatctcggcggcgcacagtcgcacctcatcctcttcggtccgcttccagttgagcatctcgacgagccggtcgatggacctcggggtggtgccgaccttgcgcagcgtgtcgctcgcggagcgctcgctgttggcgaactgctgcaggatgcgcacgccgatgatctgctcgtccaggaagtccgagaggatgaggtcctcggcgaaggtgacgaggtccatcttgatgccgtcgaagatgctcccggcgatgcaccgcgagtaggcgtcgtagaagaagcgcttgagggagacgagcccgtacgggcccagctcgcactcggcgctcacctggtggagcagcttgcagacggagaccttccacgtccagtacgccttctcgaacaggaagagcgacgcctccacgagcgccagggtgtagaagagcaggagcgccggcctcatgttgcggctgtc

SEQ ID NO: 14689 - DNA, 1443 bp, Zea mays
  Clone ID: MRT4577_113385C.1
gccggccggtccggaacctccacaccgctccctccgtctgcatccctcccatacccaccaaaagccccaagcggccaagccaaatccgccatggctatgctcgcccgcgcgcgcctcccacctcccacccaccttccccccatcaccaccgatggcggtggcgccggcgtggaatttcgccgtaagatccacttcctctcttctgagctgcacgtcgacccgttcccgctcctcgccgtcaaccccatgctccgctcggcgccgctgccgctcctccgcgattccctccgcctcctcacctcccacggcctcacaaccctcgacgctgcgcgcgtcttctccgccttcccctccctcctcacctccccgcccgaggagcccctccgcttcctctccgccgatgcgccgctccctccgccgctcctccgctccgcggtggtccggtccccacgcctcctggccgcatccgttcctgacacgctccgccccgcgctgctcttcttccgccgccgcgtatcgctccgtcgggagccgctccctctcgccgccgcgctgctccttgctttcaacgttgagcgcaccctcctccccaaactcctattcctccgtgacgccacggggctccccgactctgccgtctgtgcggttctcaggcgtgcgcccgccatcctctcctacgggatcgagaccaacctcaggcctaagctcgagttcctcgcggagcgcatgcagagggaccctgccgcggagctagccgagttcccgcactactttgcattcagtttggaggggaggatcaagccgaggcacgaggcgttgagggaaaggggcatcgagatgccacttaaggatatgctaacaagcaacgatgacgatttcagggagcggctggtcaatgtgacgctgtcagacactaaggcaaggctgtgagctggcattcagatgcaccctatgcctttttactgcattgcgtatgaaatatcagtcctttgagtttgggttctgtgaagcaagattatccaacaatgtcaccaaatggaaccggcgacaatttagaatgtatttatggttcgcatgtcaattcgaagctcagcctttgtaatgttgagatacatggagttcacctggagaagcctgattgaatctctgaatggatattcacttgacatataagcagcgaaggtaggttaaagttgatgtacagctaatggtcccattgaactctaagttatgtttcctacaacgtggagtaagaatgggcctgaggcttagttgttcgagaacgaaggacaattatgagcagctgtggatctccctaaacataggtgcttagtaatcagccaaaggagtttagtagtagcattctgcttcttattttctttcttttaatttttatttatggacatgaatttaagaatgaatacccaaatttgtttttcctcc

SEQ ID NO: 14690 - DNA, 1185 bp, Zea mays
  Clone ID: MRT4577_113386C.1
ctccgccataccgacgctgactccacaccggccgccgcgcgagccccggcaccatctccgcacggcctccctcgacgtcgccggcgcgggggtggatctccgacctgaactttctctgattcctgattctattgagcagaaatgggggatgcgtgtttctcaacacagctaattgatggagatggggtcttcaacgtctctggattggagaacttcatgaaggatgtcagattgggtgaatgcgggctctcctatgctgttgtatcaataatgggcccgcaaagtagtgggaaaagtacacttttgaatcatctttttggcaccaattttagggagatggacgccttcagaggaaggtcacagactaccaaaggtatatggttagcgaaggcccagaatattgaaccatgcacccttgtaatggatttggaaggaactgatggaagggagaggggagaggatgacacagcatttgagaagcaaagtgcattgtttgctttggccgtttcagacattgtgttgattaatatggggtgtcatgacattggtagagaacaggctgcaaacaagcctcttttgaagacttgttttccaggcaaggagttttatgagtattattttgatgcagcttttttaccatatttggcctttgtttgatgtgaattggcatttgaggcatttaccttgggattttcttttttttttcttatgtgtaggtcatgatgaggttgttcagtcctcgtaaaacaacattgttgtttgtcattcgtgacaaatcaagggtaagggcttgctacatgtagtttaggctgcttagaataatacatgtgaacaactgcccgcatttctattttcattttcatatctaattatactaactattgcctccttttggtttctgaaagacacccctagaaaatcttgaaccaattttaagggaagacattcagaaggtatgggttaggttgatatcctgttttgttttgagacatttgtgttttctgtggcctataagctgtttacatttttgctgcagatatgggatgctgttccaaaaccccatgcccataaagaaactccacttagcgaatttttcgatgtaaaaatcatgacttaaacttttttttcaaaacatgttttatattgaagtttttttcattacaaagtgcttttgtttttcacccg

SEQ ID NO: 14691 - DNA, 405 bp, Zea mays
  Clone ID: MRT4577_113387C.1
ggggggggaaccgaacctggtaaaagtccttgggaagcaagcgtttggggggtccattaggtccaagggcaaacatgcctgcggggaccaacgttcctgaaaatgaaacagcaaacatagggctcaacggggggctcctggccccagataaagggggaaccaaattttaaaaaaaacccccgggggggggccccggggaacaaaacttgggatagggcatgcctcgggggggtctttaattttgcaaaaaaaattactggggcccccttatgaggggaagaagaggaccccccttaaaataaagctggtggtggtgcccctgcttcggcgaccccccctatagctgaaaactttgctctacccacaccccaaggcaagtagtttttgtagggccgcggggcaacc

SEQ ID NO: 14692 - DNA, 273 bp, Zea mays
  Clone ID: MRT4577_113388C.1
ttggtttttttttttttttaaaaaggggggacacaaccttattgtatttcaatctagcgcaataaatgtggatgcctgctaactggcatttcgataattgacttctatcaagctcaccaagagggctgacacactaagacatgctgtgcgagcatcagaagaaccagactgggatactataccatgtcctccagactgacaggcaacaccattagcctgtaccaaagatctgactgttactctggaacaactgaatgattgctggaagccctg

SEQ ID NO: 14693 - DNA, 678 bp, Zea mays
  Clone ID: MRT4577_113389C.1
gtgcggcgctcaggcggcgtcatcaaaacacggacagtcagagttaattcctacccagcctatatctcgctgtctgcatgattctatgcttcctgtccgccaccaccgagtagccgcccgcgctgtataagaccacagggaagaaagatttcgatgctcaaattcccgccttggcggtgtgtatgagcatgcattttgtctgcgcgctccctaggtactatgactacgtgatccggtgctctgtatcttgagaacacgagcaggagtgagtctccttcggacgatactgtaggtcgaggatatacctcacacgaataaactaagcgcatctcatagtcaaggcatgcgtactcttcacacccctacggagatcgaggcccacaaagtactgatccctcaccgagtgactcatcgatcagagggttactcctcactcgatggccgcgggattaggctatgactccctgatctggtagtgacttgtcctgttatcaacgatggaacggtattggagtagcaggctcacacttgaacaatcgcatgctccaggatgagaggtcccaatagtagtaattacaatgcatgcgatagcgagacctccacaagttgacaaaatcagcgacaagcagcttgacaattgcgtgatgcatgacagatgcgggtgcaccattctctgat

SEQ ID NO: 14694 - DNA, 451 bp, Zea mays
  Clone ID: MRT4577_11338C.1
aaaaaaacacagatatatatatgcgctctatcaaaatacacagaagagcactctccccgtatatctttgggggaaaattatacacgccgcacaagaggggtgtgtatatatagatgcgcccgacccgcaagacaaagagcgccagaaaaacaaacacgtgggaacaggggtctatagggggtctgtttttatacctggggccctaaaacagagagccagtgcccccgtggcgggggggggcgtctgcggcgtctgaagaaccgggcgcgccacaccggggtctcaacaggggcgcagaaaactgtgaccccgtataataaatgttttgtccccggggccacagggacaggggccgcggggtgtgtgcgcctcttctctccggggatatgggcggtgtgagtgtccctctcgggggcgccggccccagccccgggggggggggggggggcgc

SEQ ID NO: 14695 - DNA, 379 bp, Zea mays
  unsure (1)..(379): unsure at all n locations
  Clone ID: MRT4577_113390C.1
ttgtccattacgttccctctcctcacaccaatgacattttttacatctcacctaccatcaaatcncgnaattcaatcaacccttcaacctataccataaatataacaacttcttcatcactaccaattatcttataacacttattctcctcctcttccttaaccataccaagccatatctgcacaccataatcaactacttcaaattctcattcaaaatttactatctactccctcaaccctcataaaaccactccattccaacaataatatactcctatacagacaactagcatatacattcctctcgaataaattacaaatacaactaactattaacttctaaccacaaaaattttcattccatttcaaattataac

SEQ ID NO: 14696 - DNA, 155 bp, Zea mays
  unsure (1)..(155): unsure at all n locations
  Clone ID: MRT4577_113391C.1
gacccactcgtccgccaagacaatatgcaatactgcagtatcccagcctcnttgagctgctgctaaccaatgaaccacagaaggctttagttaaccacattcccaacgaaagttgactgaacccaaccacctttgccgaatttcctaaaccattt

SEQ ID NO: 14697 - DNA, 173 bp, Zea mays
  Clone ID: MRT4577_113392C.1
cggtccgcgcctgcgtagccgggcgcaaaagtgcaagcgacgaggatgtagcagatggtggccccttgccagccttaatgaacattgcaaactcagtgccaacggccacaggggagtccccatctggaaatgctaacaacagggcctgacgatgaacaacatacgtgcaccca

SEQ ID NO: 14698 - DNA, 428 bp, Zea mays
  Clone ID: MRT4577_113393C.1
gggaaccgacaacgggggggggattttgtgggacatttatccaaaagtgggcgagaggccttaagtaattcaattttttcccccgggggtttttttgttttattggcttttaccggggggaacacatccatttaacctttggaattggggggcttgaccattttggggcctcccccggggaataattttttaatttaattgtcccccccgggggggaactggttatttatcttgagggggcccgcccggaaaccccggcccttggggtgtatggggttaaacccccggtgtatttccaagtcccagccctcttttatgaaatgggtcaaaaatcttacttgggtggaccccccccccgtagtggttggtaacaaaaaaaaattcccctacctgggctttactgtggggcttcccggcccccataaggg

SEQ ID NO: 14699 - DNA, 448 bp, Zea mays
  Clone ID: MRT4577_113394C.1
aaaacacgggcccggaattttttgggttcttaaacaatcctttacagggacagaaaaaaagggggcaggggttccaaaagttacaagcgggcaaaacatgcccggcccatgctttcgtttcggcgccccttgagtcggccaggggggcccgccttgatgaaggggaaaagcaagcaggctttttccggcgctagctaaagggggaaagccccaaaacacgtgtcgggggggggaccccttcaggagggcatgggggcggggccccctttattttggggctgccggcgaggcctccctgacaacctcgaggatctcgacccggggggggggccccttcctgatcttgatggccacctcctgggggctgaagggggggcccaacacaaagacccggccgggctttttgtcaaacagggggctctccaacccttccatttggaggagcgcc

SEQ ID NO: 14700 - DNA, 519 bp, Zea mays
  Clone ID: MRT4577_113395C.1
cccctcctcgagtttttttttttttttttttttttttttttttttttttttttttttttttttttttttttttttttttttttttttttttttttttgaaagggggccccccgggcccagttcctaaaaaaaccccaaccctttgggggaaaaccccccccttgggggaaactttaaattttaaaagttcatagggggaaaaacaacccccccccttttttttcccccaggaaaaagctttattacttcttaacaaaacccgggggtttcccgacccttaaggggggttcctgggggaaggggggggggaaaaccaaaacccttttccaccctttgggaaaaaaaaaaggggggattttaggggggaccccaggaaaaggcccgggttgccgaaaaatttggccccctattttttggggggcaaaaaaacccgcctgggggtttttgaacaaattttgggggccaagggcaaccggaccataggcatggccctgggggttttgggggcccccaaagggg

SEQ ID NO: 14701 - DNA, 142 bp, Zea mays
  unsure (1)..(142): unsure at all n locations
  Clone ID: MRT4577_113396C.1
accaattggagattgcacggtaatgatantttttgggaacncagttaccggattatcttgtacagcgtgaaataaaaggtcggcattcagattgaaaaaatagaaaaaatttatcggaactcttcattagataaaagaaacg

SEQ ID NO: 14702 - DNA, 319 bp, Zea mays
  Clone ID: MRT4577_113397C.1
cggacgcgtgggaaaaaaaaaaaaaaatattttaaaaaaaaaaaaaaaaaaaaaaaaagagaagaaaataaaaaaaaaaaaaaaaaaaaggacaaccaagtggtcggcctccctgctggctcccactttcctcccgcgtgcttgcttcttctatcgctcctctctaagtccaacctaatttcaattcatttgtccgcttttttacatggtaaaacctgggaaaacccctgcttaccccacttgaatccccttccactttttccccctttcgccatttcgcttagtcccgaacaggtcgcccttgatagcctttcccaac

SEQ ID NO: 14703 - DNA, 141 bp, Zea mays
  Clone ID: MRT4577_113398C.1
cacatacacagactgacaagaatttttcacaaccctagaagacacactgccagagagatctcttcacaaaggcgtcgagcctctccactcggccatactcaacgacaacctcaactccctcgacaatcacggcttcaactc

SEQ ID NO: 14704 - DNA, 366 bp, Zea mays
  Clone ID: MRT4577_113399C.1
ggcaaaacttcatgggacaatgggttgccatcgtttggaagtgactcatggcaacccttttcgagttcaacactatcagttcagaatgcaggtggagaatcagaagctgatccatggtctaagaaaacttctgccaaagatgattctgatccatggggtaagaaaactgatggtgattctgatcgatggggtaagaaaactgatggtgattctgatccatggggcaaggaagcggtatctgctgctgatggtgattccaatccatggggtaaggaaacagtaccttccgctgctggtgattctgatccatggggtaagaaagtggtgtcttctgctgatggtgattctgattcatggggtaagaaa

SEQ ID NO: 14705 - DNA, 656 bp, Zea mays
  Clone ID: MRT4577_11339C.1
ccggccgggccgggatgcatctcatataccactaactctatctatctatcgacagtatgtcgtctcctaatcctactagtataatctcgataccatgccttcgatgcagatatgatggactgcaccgcctcaggacagaacacgtcgcgggacttctggatcctgcaaaagcgcacgcgcacgtcgtacgcggggaccacgccgtcgtcggcaccccctacaggacctacatgctcaagactacccctggaaacgcaccggggactgaccattgatgcactctgaaggactcctcaaccatatctcttctgagaatcagggtgctgtgcgtggatggccgacgactgactacatcccggggtggacgagaagaggaactactacctgagaatcaactcgctgctactcccgtgaacgtgagaaggccactacatcacttgagagtgtggcgcacgtacacccgcattctctgctcctacgatggatgcccccacgaccgccgcggctgcctcctatgcagataccacccctcacattacgattacctccagtgctcgttgctcaacctactggcttgtgcctcttacaagcatagtaccccgactgcatgcaatgcgcgcacgcatctatgagcgcttgccatgcctactctgata

SEQ ID NO: 14706 - DNA, 175 bp, Zea mays
  unsure (1)..(175): unsure at all n locations
  Clone ID: MRT4577_1133C.1
aataaccacgtcttaaccgtgcgccttgacnactttattttatctccacttctcgagtggggagagggaccacccatatcaaacatngcccaaaacaacaagaagctagccttaaattgatgggcctgcccgcttnnngtagcaaggcgggaccggaccggaggaagcactggaa

SEQ ID NO: 14707 - DNA, 222 bp, Zea mays
  Clone ID: MRT4577_113400C.1
caccaaaggacgtattctgagtctaccgaattagcatagctataccttcctatggcacagcattccagttttgcttgctcccgaaacagaattccttttttctcttttttgttcctagactatacggaaaattacatgcttattcatggtactcaatagagccccacagttttttgggtcctacttattctcattgactccggaatagtacaatatttcaat

SEQ ID NO: 14708 - DNA, 1196 bp, Zea mays
  Clone ID: MRT4577_113401C.1
gcacgaggagtagagaggtccaggccttcgcccgagccccgccagccactaccaacttgggacgggcaggccggccagtgtcacatacaggcccagaagccgtcagaagacatccggccctaggctaggcgcacgggaggcagacgaggcgagaagtggcaactggtacctttggggaggcgaggaaggacacgagatccctctctccgaaccccgccgcccgccgcagatccgaaggtcattggcagccatgatctcgtccagcaagctcaagtccgtcgacttctacaggaaaatacctagggatttgaccgaggcatcactatctggcgctggattatccattgtagcagcattagcaatggtttttttgtttggaatggagttgagcagttacttagcagtcaatactaccacatctgtgatcgttgataggagttcagatggggagtttttacggatagatttcaatatgagctttcctgcgctttcatgtgaatttgcatcagttgatgttagcgacgtgctgggaacaaacagattgaacataacgaaaactgttcgaaagtattcaattgatcggaatttagtaccaactggatcagaattccaccctggccctatccccattctcaataagcatggagatgatgttgaagaggatcacgtggatggtgcattttcattgtcatctcgcaattttgatagcttttcacaccaatatcctgttttggttgtcaacttctatgctccctggtgttactggagcaatcgactgaaaccttcatgggagaagacagcaaaaataatgagggagagatatgaccctgaaatggatggtagaatccttctaggcaaggttgactgcactgaggaagttgaattgtgtaggagaaaccacatacaaggatacccatccattcgtgttttccgtaaagggtctgatataaaggagaatcagggtcaccatgatcatgaatcatactatggggaacgtgatactgagagtttagtcgcggcaatggaaacatatgttgcaaacatcccaaaagaggctcatgctttggaagacaaatccaataagactgttgatcctgcaaagcgccctgctccaatggccagtgggtgcagaatataaggctttgtgcgtgtcaaaaggttccaggggagtgttgttatctcagctcgatctggat

SEQ ID NO: 14709 - DNA, 212 bp, Zea mays
  unsure (1)..(212): unsure at all n locations
  Clone ID: MRT4577_113402C.1
ccggccgggcaggatagtttggctaccctcgtcgtcttcttactcaccccgtcttcacgcctgcctcaccaaatagaggtaccggccttgtacgacattgcacagtggctacaggaaataagtggccatggtctanatttcggcgacgaccttcaccagncatcttatgcgcactcttatgtgccgcatctgcaccgacggagaaacgacct

SEQ ID NO: 14710 - DNA, 941 bp, Zea mays
  unsure (1)..(941): unsure at all n locations
  Clone ID: MRT4577_113403C.1
ttgggaccctcgaggccggccagtgtcacatacaggcccagaagccgtcagaagaatccggccctaggctaggcgcacgggaggcagacgaggcgagaagtggcaactggtacctttggggaggcgaggaaggacacgaggtcggcgcgttcgtgcgtgcccttctcactgcacgccgatccccctctccgaaccccgccgcctgccgcagatccgagggtcatcggcagccatgatctcgtccagcaagctcaagtccgtcgacttctacaggaaaatacctagggatttgaccgaggcatcactatctggcgctggattatccattgtagcagcattagcaatggtttttttgtttggaatggagttgagcagttacttagcagtcaatactaccacatctgtgatcgttgataggagttcagatggggagtttttaaggatagatttcaatatgagctttcctgcgctttcatgtgaatttgcatcagttgatgttagtgacgtgctgggaacaaacagattgaacataacgaaaactgttcgaaagtattcaattgatcggaatttagtaccaactggatcagaattccaccctgggcctatccccattctcaataagcatggagatgatgtcgaagaggatcacgtggatggtgcattttcattgtcatctcgcaattttgatagcttttcacaccaatatcctgttttggttgtcaacttctatgctccctggtgttactggagcaatcgactgaaaccttcatgggagaagacagcaaaaataatgagggagagatatgaccctgaaatggatggtagaatccttctaggcgcaaggttgacggcactgaggaagttgaattgtgtaggagaaccacatacnaggatacccatccattcgtgttttccgtnagggtctgatataaaggagatca

SEQ ID NO: 14711 - DNA, 843 bp, Zea mays
  Clone ID: MRT4577_113404C.1
gttccagttaatcaaagtttatataaattagagaaacaataatcgttccgacccaccaatccagcacaaacgaaaactgaaccgtccgttagcagagcacaggcccttccattccatccagctgaactgaacactcgccatcgtataattcgtccacattctcaccaatcttggttgcgtggtgttgcagcggcgagaaggcattctgcagcgccgactgccgggaccaggagatgcagctggaggaagaggaagccgagaacagcacgagcggcgcgtccccgctgtcctcctgctcctcctcctcctccttccacgacgacgacatcttcatggccggcatggtggtcgcgacgtgatctccacccggccggccggccggcgcaccgcgggcgttcccccctctctccccacttctccttgcacggcaacgccaacggggcaggcgatcgtagccgatcgttcactcacccaacccaccggtgcacgtcgccgccgtcagtctgttccttcggtgcagcaaactgtacgtgacggaggagccgagaagaaacggcgctgtgctctgctgctctgctcatggtgggtggggcattgtcgctactcgctagtcctggtaatccgcagagatctgcggggttttttttatcagaaagagagggagagagagaggatgcctcgtcggcctcgcctgtgtgcctgagcctgccactgtagttttgatccaaaggctgccggctggccggccagtggtgcgccccccatcattcctttcctagctcgcttttcttctcgctttcttcctactcgtagcagcagtgactgtctctatccgtgtgtgcg

SEQ ID NO: 14712 - DNA, 2393 bp, Zea mays
  Clone ID: MRT4577_113405C.1
cggccgggggcaactggtacctttggggaggcgaggaaggacacgaggtcggcgcgttcgtgcgtgcccttctcactgcacgccggtgagaattgagatcccagcaccgagacgacgacacaagtctcacctccatcctcctttactcctcatcccagatccctctctccgaaccccgccgcccgccgcagatccgagggtcatcggcagccatgatctcgtccagcaagctcaagtccgtcgacttctacaggaaaatacctagggatttgaccgaggcatcactatctggcgctggattatccattgtagcagcattagcaatggtttttttgtttggaatggagttgagcagttacttagcagtcaatactaccacatctgtgatcgttgataggagttcagatggggagtttttacggatagatttcaatatgagctttcctgcgctttcatgtgaatttgcatcagttgatgttagtgacgtgctgggaacaaacagattgaacataacgaaaactgttcgaaagtattcaattgatcggaatttagtaccaactggatcagaattccaccctgggcctatccccattctcaataagcatggagatgatgtcgaagaggatcacgtggatggtgcattttcattgtcatctcgcaattttgatagcttttcacaccaatatcctgttttggttgtcaacttctatgctccctggtgttactggagcaatcgactgaaaccttcatgggagaagacagcaaaaataatgagggagagatatgaccctgaaatggatggtagaatccttctaggcaaggttgactgcactgaggaagttgaattgtgtaggagaaaccacatacaaggatacccatccattcgtgttttccgtaaagggtctgatataaaggagaatcagggtcaccatgatcatgaatcatactatggggaacgtgatactgagagtttagtcgcggcaatggaaacatatgttgcaaacatcccaaaagaggctcatgcgcttgctttggaagacaaatccaataagactgttgatcctgcaaagcgccctgctccaatggccagtgggtgcagaatagaaggctttgtgcgtgtcaaaagggttccagggagtgttgttatctcagctcgatctggatctcactcgtttgatccatcccagataaatgtttcgcactatgtgacacagttctcatttggcaaaagactttccccaaggatgctgcatgaattcataagacttactccctatcttcgtggataccatgatagactagctggccagtcttatactgttaagcatggtgaggttaacgccaatgttactattgagcactacctacaagttgtaaagactgagcttgtaacacagaggtcctcaaaggaactgaaagtgcttgaggaatacgaatacacagcacacagcagcttggtgcacagcttctatgttcctgttgtgaaattccattttgagccttctcccatgcaggtcttggtaactgaagtcccgaaatccttctcccatttcatcacaaatgtctgcgctatcatcggtggggtcttcacggttgctggaatactggattccatctttcacaacacactcaggatggtgaagaagattgagctaggaaagaacatttaaatttcgacgccgctgcaagtttaggcggatgcactaggtagccattgttttgttataactaggtaatgactcatgaaaatcggtatatgaaagatggcgtgctgaattgacggttgaaattcggggggtcatgaactcatcatataaataactagggatctcactgtttcgctaaaccactcacaataagacagtggattgctgctagtgtgccactgtgataagtaaccgagttggataatatattcagtatattatcttgccgtgcttgaattgcgcgtagttcgggttgcacagcgtcacctcgatggccacctcagctccggtgggaggacgacggaggtggatagcctccgccgccaccagcggcggcgggcgactggccccccggagcacggtgaggtagaacgcgacgcgtgtgaagttaggatgataccagcggctaccagcacgtcgcagcattacatcggccttcttgattgttgtcgtttgcgaagcttgctttacattcaggaagcaggagccacgcaaaaaaaaaaagttgtgccgtttctgggtgtgtaatgtgttattttatgcgtttggtgcacaatctcattgtgagtttgtgatatgaagacgattttgtgtccgtgtgtgtaagtattacttcttgttaaaagccaagaggaattggaggctcctccgcgttcgacgcgtcttccgtcgatcgcgtgctgacgc

SEQ ID NO: 14713 - DNA, 688 bp, Zea mays
  Clone ID: MRT4577_113406C.1
gaatgaaaaaaaatatgttaaaatcgagctagacaacatgctgcatcattaccaaataccatcgttttttttattagaggcggttccaagctgaacaatgattaactgaaccgtccgttagcagagcacaggcccatccattccatccagctgaacttgaacactcgccatcgtataattcgtccacaattctcaccaatcttggttgcgtggtgttgcagcggcgagaaggcattctgcagcgccgactgccgggaccaggagatccagctggaggaagaggaagccgagaacagcacgagcggcgcgtccccgctgtcctcctgctcctcctcctccttccacgacgacgacatcttcatggccggcatggtggtcgcgacgtgatctccacccggccggccggacggcgcactgcgggcgttcccccctctccccacttctccttgcacggcaacgccaacggggcaggcgatcgtacccgatgccgatcgggacgccaggcaacccaccggtgcacgtcgccgccgtcagtctgttcctttggtgcagcaaactgtacgtgacggaggaaccgagaaggaacggcgctctgctcatggtgggtggggcattgtcgctagtcccggtaacccgcagagatctgcgggggtttttatcagaaagaaagagagagagaggatgcatc

SEQ ID NO: 14714 - DNA, 790 bp, Zea mays
  unsure (1)..(790): unsure at all n locations
  Clone ID: MRT4577_113407C.1
cgattcggcacgaggtcgcgctcatggccccagttcgcgctcatggcccccactgctgtggatcccggtcccagcgaccaccttctagcgccggcgccggctgccatggctggaggaggggatggcggtgatggacagatggaggtggtgttcaatgtgagcagcagcgacaccgactccgatgacctcggcgccggtggtggaaagaggtcgcggcccgtggcggggcaaggtggtggcagggatcgagaggacaagaaggccagaatcttggccgctgccgccacggtcccagccggattcctagagccgctttcgccggtgaggttactccccccgccggcgccgggaaggagcgtgacgaagcagttctggaaggccggagactacgtcggcaagccggatcacctgcttgccgtagtggcggctcagtattctgttgttatgtctttgctatcgtcagattctggaatggatcacgttcgtgtgcatcccaaatttctacattccaacgcgacaagccacaagtgggcactaggggctttcgccgagctgcttgacaactctctttgatgaagttgtgcatggagcgacatatgtgaacattgacatgatagaaagtaagaaggatggaactccaatgctgcttgttcaaggtgcgataggaaacccccaatttgcatgggtgacttggcatgctttcatgaactgattgaagatccttttaataatatagtgggatggtgtttctgntgtgctcatgctacatttcntagcatgcttttatgct

SEQ ID NO: 14715 - DNA, 256 bp, Zea mays
  Clone ID: MRT4577_113408C.1
tattggggggttttttttaggaatggggggggtaaacccccaggcaaaaaaggcgggaaaaataggaggaaaccacagaacatcaaaaaggaggaaaacgggaacggaggagaggaataaaacgggtagacccaggtccaacaccagaacacggccgtctaaaaagaaaaaggaaacaaacagcctttggtaaaaaaaccccgagcaaaacaaggagggcattagaaaagagcgtaaaaggttgaaccagcagaac

SEQ ID NO: 14716 - DNA, 272 bp, Zea mays
  Clone ID: MRT4577_113409C.1
ggtcgagcacgcgtccgccgggtgcaggaccaggctcgcggaagaccgcctgtcccgcttcgagaagcagtagcagctctagataaagctattagttagcacaggatcgaccatatgtatgcttctgtatgtcagttgtcttcgcatgcatatgggcgtttataacgtgctagctcgtgtcgtacgtacacgtgtatgcacgcatggtgcaccacacatgaatggtgtcgtcatccaatatcatcccacttttctttaaaaaaaaaaagaat

SEQ ID NO: 14717 - DNA, 276 bp, Zea mays
  unsure (1)..(276): unsure at all n locations
  Clone ID: MRT4577_11340C.1
ggtctttccaagtcccagccgcaacgggnggnntgtgnagttngcnttcnggggtgccgnagagcaagaggtngtnaacatnggccgtggttggggtttcctngaagnttcnnggcttgnaaggtcggcgggncttcctttnaggggcaagnttcggcgggnttncgtttgntcgntancggaatttggcacanngccggtcggnggcnaacaatcttcggaggttgagtacgnngccccgtagggaggttttcttgcanngattngggggtcgtt

SEQ ID NO: 14718 - DNA, 245 bp, Zea mays
  Clone ID: MRT4577_113410C.1
aagccattgaactaggtgagtgcttaattgatcgtgctcgatgtaaatgaaaaagggaagtactaatactaaacaaatcgcatggtatattacaataaacttgatagactaaactaagtctaatagcaatcggaatataatcaagaaagatagattcatggaatggaactatcttgacaattgaaggaaccaccgtacatccacaagaccttgtcattgataaacactggaatgcacatgccaaa

SEQ ID NO: 14719 - DNA, 378 bp, Zea mays
  Clone ID: MRT4577_113411C.1
ggaccacggaaacccccctttgttttaggcccccccaaaaaaaaaagggggggaaaagggaaaatgcaagggacaaccgtttaaaggggttcccaacccaaccaaacggggttccagggccccaccccaaaaaaggggggggacaccggggccttgccagggaaaatcccttagggggggcccccaaattttacgggggaaagttataacaggggtacaaggggcgcacccaaaaaaccagggcccaaaacacattggataggggcattggacaggagaaaacacttgctacttttttttagggccaaaaaggcggttttactgcccctaaattgagtcccgtttgggcgcccccctaaatttttaaaagggggcccc

SEQ ID NO: 14720 - DNA, 135 bp, Zea mays
  Clone ID: MRT4577_113412C.1
ggcgtacagcaacaactggtgggccataacaacgctttatagtgggccatgctagttacttgcaccatgcgtctgctccgggtaacgcgcaagccgcacgggcgattatgagcggagaccgtaccttctcataca

SEQ ID NO: 14721 - DNA, 702 bp, Zea mays
  Clone ID: MRT4577_113413C.1
gtttcagaaggtcacaagtgctttgaaagcatgggaagagaccacggcattgaacctagcatggatcactatgcctgcgtagttgatctgcttggaaggtctgggaggtttgcagaggctgagcaattcatcagggacatgcctgtccgtcctgattcaaccatctggggacctcttttagctgcttgccagcttcatgggaatgttgatcttgcagaaaaagctgccaaagaattgtcggccttggaaccggagagtgacatatggagagtatccttgtcaaatacctatgcctcggttgggagatggagagacgctgcaaagattaggtctgaaatgaggagagttggattgagaaaagagactgggtggagttttgtagacgttggaggggttgagggttttaagtttgtgtcagcagatacaaggcatcatgatgctgaaaaaatatattcagtatggcacagtatgaacaggcacatggcagatctagctgctgatgtgcataaacttaatccaattagtgcaatttagtcgatgcacgagatgtttatagatctagctgttgatgtgtctaggtccaactagtgatgaaatggaccttttgtagttatgagcttataacttaaaattacagttgatccgttgttttgaatgctgaatatagttaacaagaagagtgaataaacagaacacacatgg

SEQ ID NO: 14722 - DNA, 514 bp, Zea mays
  Clone ID: MRT4577_113414C.1
ccggccggagcccagtcgcgccgacttgctctctttttccttctatgctgctgcctgatctgctccgaagctgctgctactgacccagttttcgaccctcttcatccaagcaaacagcaatagcaatgagactctatctgcaaccgcaactgccgactgagaaactggaagtctaaagggctatcctagcaagaggggaaggtgccatactgggctatttcgcatttcttgtactgtgacgcatgacatcttatgctgaaggctggcgagtgggatatgtataaaacactctcttgatgaacatataaacactcttttcgtggaacagagccaaccttgaatgccgtatctacagcgtgcatatcggtgaaggagcattaatgaagaagctaagctctgtgaaggatgactgcgcatgataaggcacatatgatgaatcggagggcatgactacagaactagtaccggaaacgggtgcaaatgctccaactattgctccgtttggaaagagact

SEQ ID NO: 14723 - DNA, 306 bp, Zea mays
  Clone ID: MRT4577_113415C.1
gggaaagcactagatgatgatttaaacagcaacaacaagttaggatcacacaataaaaagctacagaactcatatgggcaatgcccaagtacaggttgcaaacgtatttagaattaccatgcataatcgtgggaagccaacatacaacatcatttatcggctaaaaatggtcaagacgtgcctgaacttaacacaaacctctgagatgaccacgtctatggaaccgaacatttatacaagcctatcatgatgaaggccaccagaagcaatcctgtattttgttcgacggcaagacaccgaaaggac

SEQ ID NO: 14724 - DNA, 960 bp, Zea mays
  Clone ID: MRT4577_113416C.1
cggccgggccggggttttcgcgtacccattagttcatgagcgctcttagttcattaccatatgtactcgtgttggtgcgttcgccccgtagcagccgtcgggcttctctgccttgtacttgcgatcgagtccagacctgcggagggagatctactagtcgaccgatccggatccttcccttccgtctcacgctgcttgctcgggacgggaaccggaggtggggttgcgatggcgctgcagtacgtggaggcgcagcggcagttgcgcccggacctctccgactggtacgcctccctcgccgacctctaccagcggaagctatggcaccagctcaccctcaagctcgaccaattcttacagctccaggtcgcacagaccggagacactatcattcagctctacaacaatttcattgtcgactttgagaccaagattaatctgctcaaacttgcccattttgcggtgataacttctcgccagtaccctgataaggatgctgcaattactttcttagagggggtgatcacaaagctgcgtgagacaagggagtcacggatcaatgaaccaattctctatgtgaagatgcaaattgcagctattaatcttgagaaaggaaacaaaaaagagtgcaagaatttgttggaagatgggaaaaccactctggatagtatgactgatgtcgatcccacagttcatgctagcttttactggatatcatctcaataccacaaggcctgccaagaatttgcagagttctataagaatgctcttctctatctggcctacacaactgtggagtctctatctgagtcattcaagctagacttggcttttgatctatctctagcagccttgctgggtgataacatttacaactttggggagttgttagctcacccgattatcaatagtcttattggaactaaggggggagtgggtttatcatatgttacaagcatt

SEQ ID NO: 14725 - DNA, 874 bp, Zea mays
  unsure (1)..(874): unsure at all n locations
  Clone ID: MRT4577_113417C.1
cattgggtacctcgaggccggccggagcagccgtcgggcttctctgccttgtacttgcgatcgagtccagacctgcggagatagatctactagtcgaccgatccggatccttcccttccgtctcacgctgcttgctcgggacgggaaccggaggtggggttgcgatggcgctgcagtacgtggaggcgcagcggcagttgcgcccggacctctccgactggtacgcctccctcgccgacctctaccagcggaagctatggcaccagctcaccctcaagctcgaccaattcttacagctccaggtcgcacagatggggatgcctgacagatggattacagacgccttcgttcataaggcggatctcgccgcaaacccaccccgcctcctagacttcccatgttttaaccggagacactatcattcagctctacaacaatttcattgtcgactttgagaccaagattaatctgctcaaacttgcccattttgcggcgataacttctcgccagtaccctgataaggatgctgcaattactttcttagagggggtgatcacaaagctgcgtgagacaagggagtcacggatcaatgaaccaattctctatgtggagatgcaaattgcagctattaatcttgagaaaggaaacaaaaaagagtgcaagaatttgttggaagatgggaaaaccactctggatagtatgactgatgtcgatcccacagttcatgctagcttttactggatatcatctncataccacaagggcctgcaagaatttgcagagttctataagaatgctcttctctatctgggctacacaactgtggagtctctatctgagtcattcagctagactgggcttttgatctatctct

SEQ ID NO: 14726 - DNA, 301 bp, Zea mays
  unsure (1)..(301): unsure at all n locations
  Clone ID: MRT4577_113418C.1
ccacaggcaaaacaacagcgcgcggagagccaacggacccngccgacagcgcggcagcccggaacgaagaagccaagggcccacgagggacaaccgaaggngcgggggggggcgggcaaggccacggagaaacacgccgcacagccnagcggacgggcagaggaccgcgaccagccgcgacacgccaagccggngaaggcgcaccgcgccgaacacaaagagcaccccgccaccggccccgccgccaagaccccaggcgagagggcggggccccgcaagaacgaccccgacggcaaggcaa

SEQ ID NO: 14727 - DNA, 271 bp, Zea mays
  Clone ID: MRT4577_113419C.1
atctgcaacgggcaaaatataaaccactaacacatcaccgattaccattcatcacacatttcacaacacaaacctcccaacacatccaacacctaataatcatgtctcgtcatgacccacacctatcaatacttcctacacattttccgaatcttcaaatccttttgaatcatccttataacctaaacctccattacctactacacagtatctccatatactcctgacccacatattccgacttcctcctaccaatttttctccaaaaccc

SEQ ID NO: 14728 - DNA, 503 bp, Zea mays
  unsure (1)..(503): unsure at all n locations
  Clone ID: MRT4577_11341C.1
ctctanacgcccccttggtggtgttttttttaaaatttttttttttttttttttttttaataaactnctttttttccccaacttatcatcttccggcgtacactgagaaacctgttttttctttttttttttggngngaacaaacattttttgttagacanggggtctttcttnaacncanaantctacaattcaaaaacctcggttaaaccccnaacatttcanagggtttttttctgctactgttaattcgactatagcttgcaatacattttttagcaaaggcaaacttttacccacatctgcttgcccccccgtttcacttaactttttatcagagacttccttatttcctccacaatcgcacggggtttcccttttctcagttttaagaccctttctcttacttaaatctctttctctttcgtgttctacccacaaaaggctatcctatttttacactatcattcctatatcgtttccctttcttccttttttaccaa

SEQ ID NO: 14729 - DNA, 293 bp, Zea mays
  unsure (1)..(293): unsure at all n locations
  Clone ID: MRT4577_113420C.1
cccggggcggagataattgtnctttgttcagcctggactgaagaccaggctcacaactcttttctgctccagcaataatggacgctcgctccttcttatctccgccgaacttggtcgagtgagcagaggtccttgcagaagcgctgctgctgctggcagcgggggccggaaacgcatcggcggaggctagctgatgctagtgacgtcgtcggcggctccgagcatcctgtacgctatgggcaccacggcgtctccctcctcggtgtgctgctagagagggcactcgctcaaca

SEQ ID NO: 14730 - DNA, 362 bp, Zea mays
  Clone ID: MRT4577_113421C.1
cgggcgcgtggggcatgctattagcgtttgatgggcctctgctgccagactggggggcggattatcgcggtagactagtccattgctaactgactacatcatcgactcaggtgatgctatcgcacatcaagacaaatgtagccactgagccttgatcgatccggggtttggtgtggaggcaatgaatactcttagtgggtattctaacaggagatcatacactacactttatatgggaactggaactgagggtgggattacaagtgctagaatcagggtgccaaatgtaggatgtgaaggattcatgtgctcaagtcatctgtcaatcactcaaagaaattcaagattgatccattctacta

SEQ ID NO: 14731 - DNA, 771 bp, Zea mays
  Clone ID: MRT4577_113422C.1
tctttcgattctaagatataggtcggagttggattccttgcatatacataaacagataaagaagcaaccggtttataacaaaaatatgtcttctgttttgcctgttgcccaattctcttttagtgtagcctacttacaataattaaaagaagagttggtgtctgtttgagtagacagctaagtgcatatataagtacgtgcatgattttgattactaattgtgattttgatgatctttcttttgaagacggtctaacatataagcgcatgatttagatgaacggaattactattgtgccatttctgaagaatcttactattttctcttgccttcttagaacaacatgggaagaagtgatgatgacagtccatcgccgccaagaggtcacatgagaagaactcgcagcccaagtccttgtggtagttatggaggccatggcaagcgccccacaactaatcttatggtgacgaatcttggtccagattgtaggattccgactctcatcaagtgactcctcccctcacgatgactttgcggacagatgtctcaattatagtggtggagctacgaacaacaatccgatgtcctgatcgagagcgatggagctaatgtttgaacttgtgtgtttgaacttgtgaactaaaaatgtgaactatggatgtgaacttatgtgaatttgtgaacttatgtatttgaacttatgtgaatttgtgaacttatgtatttggacttgtgtgaatttgtgatatgaatatatatccatgtgtttg

SEQ ID NO: 14732 - DNA, 855 bp, Zea mays
  Clone ID: MRT4577_113423C.1
cattgggtacctcgaggccggccgggaaaaaaaaaaaaggttaccgtaatcttcctcgaattaacgcgaagccctcgtacagacggcagaagtcgccaataccgcaacctctacgggctatctccttagaactcacatcgccttttgacgtaaaggctggctgtcttggtccccctatcccgagtttcagataatctggcaagagagttacagtcagcgagcctacaagatctccaagaccgtgttcttactctgctgagggttggcgagaaagtaccctagctgtctcttgcctggctgcgaaataaacgatttccaaaaagctctcggtatttcgcaaagaaaccgattcactcattatctctaccatcatgtcttccacttccactactacaacctctacctctgcctcttcttctggatcatcatcttccggaggtagtgtaacgaactctgtcatggacttggctatggaggaaaagcaacgcattgtagatggagaggtcgatactacagatacaaaagcacgctacctgggtcttatcggtagaattcgtcctgtcttgcttccagctgccagatatctagcgtacactagcgacgttggagaggctttccgtccaatcatcaatcgaaaggtcgtcactgcagcatacggcgtctcgatagcctacgttgcaggggatataggctacgaaggctataaagcgcatctcgaccgtcaagacaggttactgaagcaaagtacatcaggtagcaaagaacccggccaagcagaaatcaacgcagcgacggagataggcctaagggtagctagaaagaccgtcttccagggcttggcgagtatatcctacc

SEQ ID NO: 14733 - DNA, 367 bp, Zea mays
  Clone ID: MRT4577_113424C.1
ctccagtttcattctttattgacattatccagcttgctacgttgcatgttaccatccttcactggttaatctcatcgttatattcaagacaaattcagacagtagcatcattgtggcgtcttttcagagggcgcaaatggaatcctcttaggcagaggttagatagttatgactacacagttgaacagcacgtggttggttccctgttgtttacaccaatcctacttcttatacctacaacttctgtattctatgtattcttctctatcttgacaacaacggttatctgggtgtgtgtgatgctggaaattgtcattgctctaatccaatccactccttatgctgagttaactctatgggtgatgag

SEQ ID NO: 14734 - DNA, 440 bp, Zea mays
  Clone ID: MRT4577_113425C.1
ccttcaggtaccgcccctcatttccagagtccaccctctcttctttttaactgttaattcatcaaaggatgggtttcttataacctaaagaggccctcccctctttcgacatacatactttcccttcatattataaccaatacatcaacataatctttctattcaatctaaactcttattctttccttactaatctccattagaattactgttattatttgctttacattatcaatatcacctactttttcattttcacccaccattaacaagattacactctgtaattctagaatactttacttaacaaagttagaatgttttttctcttttaaacatatccactccaatctttatattatataccatttcttttttttcttaatatatactattcacaaaatataaataatattcattattcttccatttattaaatt

SEQ ID NO: 14735 - DNA, 278 bp, Zea mays
  Clone ID: MRT4577_113426C.1
acttcttattacccttttaccaagcactccttgggatagggatccttagggatttgtggaggggcgatggttgaaggttgatgtggagtaccattatttcgtcggccggtcttgcctgggccaccagcaacgagttgctggagaatgccttagacttctacggcgagatcctagactgcaagggcatcatcgaccgtgagacggagaggttttgtggctacggcttagataccttttacttcaagaactccatgcttgtacgttttcgagaacatgaa

SEQ ID NO: 14736 - DNA, 361 bp, Zea mays
  unsure (1)..(361): unsure at all n locations
  Clone ID: MRT4577_113427C.1
aacacgnactgancaccagccactggtttcaattttaattccaaaatccccccttccaccctgcaatacatgcatcgattttacaacattcacaataccaataatccactaacaacaaactactgattaattaaaccattcagattaccattccacatacagttcaaccgatcgatcacctcccctttatatctgctaactactagaaaaactcccccgcagtagtgattgacacaactaacacggcaccgtcatacataactatagatccgccctccgccaagacaccaactctattgccgtaactgtctcctccctcggccaaattatcatcctgcaccatcattacatacttaaagtt

SEQ ID NO: 14737 - DNA, 168 bp, Zea mays
  Clone ID: MRT4577_113428C.1
aacttgcccaaaattttgagtcgaattttaatcactctcaggtcagactgaattttccaaattcgtattcgtgcgagtgatgaatttttaaataattaccggatacaccgattttcggaacaacgatgttccgaacatcacgaaaatttaggaagagtccggatagat

SEQ ID NO: 14738 - DNA, 303 bp, Zea mays
  Clone ID: MRT4577_113429C.1
gggccaaaaaaccggggctgttttttttttttttccgtataaaaaaacctcccctttttgccctgccaatggtcatcaccccggggggcttttttgacttttggttggaattttttaaaaagcgccgcaatttaaatttcgggttttcggggccgggtgttttccccgcttttaaagaaataatattggtcctttttcggccggggcaataataataatggcctaccccgttttggcctacccgccccccggcggggggggctttttccccaacatttttggttgtcctacgattgggggggg

SEQ ID NO: 14739 - DNA, 440 bp, Zea mays
  Clone ID: MRT4577_11342C.1
gtgcaccatcaggcgccacgtggacctggagactggtgaggtccaggctggactggtgggtccggcagctacgcctcggcgaccgagttctaccgcgacctgctccttctgtgcgccaacgcgctggtcttctacccgcgcggctcgcccgagcgttccgccgcggcgcggacgcgcgcgctcgtcgccaagcacatgtccaaggatcagccggggccctcggggaaggctgtcgcggggccggcggcgtccaagaaggccaaggcggaggccgacgttgggtcgctgctggagaagacggcgcccatcatcgtgtgccggaagcggagctctatcgccaaggccgccgcggcggccaccgccaaagaggagagatcggagaaggcggagtccgacaaggagggcgagaagcagcaggaggcggtgggcaagaggaaggc

SEQ ID NO: 14740 - DNA, 125 bp, Zea mays
  Clone ID: MRT4577_113430C.1
agctatgaaaacggtggcctctggctagccatctcactgagcgtagctctatctcgctcctaaggccggacaggaggatggtgcgacaaggagctgatactgaccttttgtgaccggcacaaagt

SEQ ID NO: 14741 - DNA, 563 bp, Zea mays
  Clone ID: MRT4577_113431C.1
gctggagaccagctacctgttgtttacccccattaattttgttcagttcagccaatgggcagcattgaactgtcctcgtcatattgtacagcaatagcgagtactatcatttagcacatacatagctgctgtgagccctgctgccttattgatacaacacacagttgttgccagttctacctgcacgctgcagcctaacgctggcaccctcttacaactgcaacaattgctgccattcaaccaacttgctttgacaaacccagcagggttctaccaacaacccatcattgatggtgccctcttttagatttcttatgagtgatagttcactaacaaagttttttgtctgaaaaaatacaaaggactgtgatcaccatggtccttcgggcgagacccctctatgggccaatcttagtgcttttgcttacattgaccctcgcccctgcttgcgtataacggaacaggcctccacctatagcatttccaacaacatgcaatgcccgagcggaaacagcacccccccgtgaaccccgctgtataccctcaactggttgggtttaccc

SEQ ID NO: 14742 - DNA, 491 bp, Zea mays
  Clone ID: MRT4577_113432C.1
accccgggcggaccacagccttccgacccgtttgaagttgaaggcccttttgaacttccattcccaaggttgcaagtccgtccatggggaaggtgtgcctgttaacgggcaacaaaagcatcctcggggcgttggccttggtggccgtcgccgctttgatgttggtggccttttggttgccccggccgggccgccggggttttttttggaagcacggccacggcccatggccggccaagccgttgttccggttaaaagtcgtcgttggaggtttatgatcggttaaaagtcgttgtgacccgccagaagtgccatgcctggtcaatctggaactgtttgcttttttgtaccccgggtagcatttgttggttctgaaaccattatgcttttgacagttcatgtttttgggtttgggaaaaaatatttatttttttttaaattttttttttttttcaatattttttttgttaatttatattttttttttattt

SEQ ID NO: 14743 - DNA, 463 bp, Zea mays
  Clone ID: MRT4577_113433C.1
aaaaacacaaaccattcatcccgaaaggtgaagccaccgcctgcaaaacatgttgggtttccctggcccgggggtaaaacaaattttcaggcccccccgtcttacaggggggggggctttccttttattcaaaaaattttcctagcagccaccgcttcctttcacaggggtttttttgcgggggggccccaatctgaagggccccgggcggggtatgccatgcatttagggccacttggccatgtcccccctgggggtgacggggaaaccccaaagccccccctcctttttgttgaagccccaaatgtccctggagttgtaacccgcgaaaaacttgtcgggggcccccccctccattatgtaaaccccccgctcaaaattgggcggcttggcgggcttgccccttttggggacccaaaacccccccataaaaaccgccccccccaattacaggtcccccccc

SEQ ID NO: 14744 - DNA, 290 bp, Zea mays
  Clone ID: MRT4577_113434C.1
cccacgcgtccgaacactcgttctcaaggtcgtctctgaccatactcccacggccgatcggcgtgcgtgtctacgtggacttcctccaaaccctcatgaaagaaagagctgaagatctggagagctgtcagctgaagggcaaacgcattgtggcaaagaggggggtatagaaggatctacttccaggaagagcaggtgtggctttttgaacattggattgaggatcacatgcacgctgctattatgcagaccactactttatggagctggctgtgggaagaaagctaata

SEQ ID NO: 14745 - DNA, 493 bp, Zea mays
  Clone ID: MRT4577_113435C.1
ttgggtacctcgaggccggccgggatccgctcacctacctccctagaatcagccgtgcatccctggttgccgtctgctcctcatcctctactctatccttgctgcaaatctgaaatcaacactcgtagacttttgctttcgtatctaaagcaacgtgattcctcgtcgtcactgaattagtgaggatgccgcagatcagtaggccgagaacgaccacttaatctccccagattattgtgacttacattcacgactcccatgcaaggctgcgaacgtcaactacatctgaacaccttatgcccatatgactccaactgactctatcttagatcaaactacttgctccgacatgtgcacatcgaataacatcaacgaaatctaccattggtgctgatgactacctacactttgtgaaagaccaccgaagtgttgacttacgtggactacactattcctgatctcatctctccatgctacaacgtgaaggtatctg

SEQ ID NO: 14746 - DNA, 241 bp, Zea mays
  Clone ID: MRT4577_113436C.1
gcacgagaagacggagaaatagtgaaagatttcatcgacagattctttgggtttacccatgaccacttgggctatgcagccactgccgtagttggtttcacgggtctcttcagtttcatgattgccttctccatcaaagtgttcaacttccagataagataagaacacatctcaaacggattcagctgtgattactgattacgctcacctttgtaataccaggatacaatgaggtgctgtt

SEQ ID NO: 14747 - DNA, 430 bp, Zea mays
  Clone ID: MRT4577_113437C.1
gaaacggagcgcattatttttttttgttcccagaaaacctcccaaacagggggcactacaagagacaccaccccacggttcacccaggcggggggggccaacaaggggaccccccatagggggaaacagggctggggacagacaaacaccattgttgaaaacgcgcgaacacaaacccccacggcccaccccgaggaacaagccgctccatttccacacccccccggcgagatccataggaaacaaccatgccccgttccaccccggccggacaggagctcagccgtcccctcacccgggcgagctaacggggaaacgggcctaagggacccagcactcggggacgaggggggggaagcgcgcccacaccaaccagtggttctagagcaaggtgagctcccacacccccaccagcttggggctttggggg

SEQ ID NO: 14748 - DNA, 121 bp, Zea mays
  Clone ID: MRT4577_113438C.1
gccgagagctagtactggatgatggaacggtataggtgttgggaaccagttggccgggatgacctggttggcaccagcgtcttgccggactcgttgggtgatgcgcggtgagaagggcgcg

SEQ ID NO: 14749 - DNA, 698 bp, Zea mays
  Clone ID: MRT4577_113439C.1
tccccacgcgtccgcaagctagttagctagaggcaataaggtagctgcttgaagtaaaccggctttgttgattcttcagctagctagtttcatcaccttgtcctagcttggagctagctagcagcaatggccattgaaatgccatgcaaccgtatgagcacagtggctctagtggtagtagtcctgcttgtcgtagcctgtcaaatcgctccagctcattgcactgctcctaccacggtagcaagtactcctagaagcagatacccgctggtggtgcagtcgtcagcgaccactgctactgcctattccaccacaaaagcaggcatgatcgagggcacagtcactccctcagaaggcggcgctcctggggcgaccgaggacgttcgccctaccaacccaagccacagcccgggcatcggccatgcattcacccacaacaagatcgggaggaagctgcttgctgcgatcagtcaatgagagggttcgttcgacagcaggcatgcagcaggctgcagttgcaagtagcttagttgtttatttgttcgtttatcccagctctttcgtacgtcttagcttgtttgtggctcttcctccttgatcgatcgtccttcttcttattagtcaccctttgtaatactagtaatttggcatatctatatcattatcatgtgaaaatttgtcggaataaaaaaaaaaaa

SEQ ID NO: 14750 - DNA, 137 bp, Zea mays
  Clone ID: MRT4577_11343C.1
gggacggtgcgggtcacgggcagcgacacgagcaccgccgtcaccttccggtgcgggtcctgggtgcggtgcgacttcgacagcccggagaagcgcatcttcttcagcgtcaagtcgtacctggactccgacacgcc

SEQ ID NO: 14751 - DNA, 227 bp, Zea mays
  Clone ID: MRT4577_113440C.1
gaggcatttgtgggaaaatgccgcctcataaccaaagtgacaagtttttgcgaacacaaaccaatttactaaacatatattctgatttctatatttgtagtatatctacaacaaaatcattatgttgcaacttattagctcctagcctcctacctcttgtatatgcacatagtctaaactttactcaatggagtgcagctttgcatattcacatcggaatgtttttg

SEQ ID NO: 14752 - DNA, 706 bp, Zea mays
  Clone ID: MRT4577_113441C.1
gttccgagttttctccccaccctcctccgcggctgccagtcccgccggagcgcagcgcgtgctgctctacggacgccgcgcgccgttcgcgggagcgctcctgtttttcagcatcggcgccgtcagcgctgcggtcgcgttcaggacaggggcaagaggtctcagttcaactagaatggagtcagcttcgaccacagtgccatacattgtcgtgtatgtgacagttccaaacagggaagcagggaagaagctgtcacagagcatcatcagcgagaagcttgctgcttgtgtcaatatagtacctggcattgaatccgtgtactggtgggagggaaaggtacaatctgatgctgaagaattactcatcatcaagaccagggaatcacttctggatgccttgactgcacatgtcaaagccaatcatgaatatgatgttcctgaagttattgctctgcccataactggtggtaacaccaagtatttggaatggatcaagaacagcgcccgggacaagtgatctctttttttttttttggagctcgacataatgcgatgatcgaagtgcccatggcctccttacctcttccagtggtttgcacacaagggagtaacctctcttgacctggacatctcaattaccttgctgtaccgaatccatatctaccatcttcaggtaacaagtgatttggtgtcccgtgtgggtaat

SEQ ID NO: 14753 - DNA, 262 bp, Zea mays
  Clone ID: MRT4577_113442C.1
gccgctctagctctctctcctcttgcatggcggctacaggagaccccctatgcccgcatagtttgccgctctagctctctctccccttgcatgccgctctagctctctctccctccagttctggcgtgtcactgttcatgcgccctaacactatttggtactgcagcttatcgtcgccgtagaactgcagctggatcgtctcctcccgctgctcctgccgcctgtggtgctgcctgccgccgacgaggaacacgcagagggt

SEQ ID NO: 14754 - DNA, 1119 bp, Zea mays
  unsure (1)..(1119): unsure at all n locations
  Clone ID: MRT4577_113443C.1
gggtacctcgaggccggccggggtacaaaagcggttatcgaagctaccggagatgccactccccgcaccgttccgagttttctccccacccacctccgcggctgccagtcccgccggagcgcagcgcgcgctgctctacggacgccgcgcgccgttcgcgggagcgctcctgtttttcagcatcggcgccgtcagcgctgcggtcgcgttcaggacagggtgcgccatctcacaccgacgtccccccttcctcggggcaagaggtctcagttccactagaatggagtcagcttcgaccacagtgccatccattgtcgtgtatgtgacagttccaaacagggaagcagggaagaagctgtcacagagcatcatcagcgagaagcttgctgcttgtgtcaatatagtacctggcattgaatccgtgtactggtgggagggaaaggtacaatctgatgctgaagaattactcatcatcaagaccagggaatcacttctggatgccttgactgcacatgtcaaagccaatcatgaatatgatgttcctgaagttattgctctgcccataactggtggtaacaccaagtatttggaatggatcaagaacagcacccgggacaagtgatctctttttttttttggagctcgacataatgcgatgatcgaagtgcccatggctccttacctcttccagtggcttgcacacaagggagtatcctctcttgacctggacatctcaattacgttgctgtaccgaatccatatctaccatcttcaggtaacaagtgatttggggtcccgtgtgggtaatcccaaatgcatgcattgctctgagtattgacaggttggctagtgtaacgtgtaagtccaaaccagatcgtatccaaacatgcgtattgttggtctttgatcgatatttgggccgagttttctgctggtgtgcctgaaactgatgttgcgtcaccgactgttcaattactataacatgttcgctttttnaaaaaaaaaaaaaaaaaaaaaaaaaaaaaaaaaaaaaaaaaaaaaaaaaaaaaaaaaaaaaaaaaaaaaaaaaaaaaaaaaaaaaaaaaaaaaaaaaaaaaaaaaaaaaaaaaaaaggggggc

SEQ ID NO: 14755 - DNA, 986 bp, Zea mays
  Clone ID: MRT4577_113444C.1
cattgggtacctcgaggccggccgggaccgttccgagttttctccccaccctcctccgcggctgccagtcccgccggagcgcagcgcgtgctgctctacggacgccgcgcgccgttcgcgggagcgctcctgtttttcagcatcggcgccgtcagcgctgcggtcgcgttcaggacagggtgcgccatctcccaccgacgtcccccccttcctcggggcaagaggtctcagttcaactagaatggagtcagcttcgaccacagtgccatccattgtcgtgtatgtgacagttccaaacagggaagcagggaagaagctgtcacagagcatcatcagcgagaagcttgctgcttgtgtcaatatagtacctggcattgaatccgtgtactggtgggagggaaaggtacaatctgatgctgaagaattactcatcatcaagaccagggaatcacttctggatgccttgactgcacatgtcaaagccaatcatgaatatgatgttcctgaagttattgctctgcccataactggtggtaacaccaagtatttggaatggatcaagaacagcacccgggacaagtgatctcttttttttttttggagctcgacataatgcgatgatcgaagtgcccatggctccttagctcttccagtggcttgcacacaactacacaagggagtatcctctcttgacctggacatctcaattacgttgctgtaccgaatccatatctaccatcttcaggtaacaagtgatttggtgtcccgtgtggggtaatccaaatgcatgcattgctctgagtattgacaggttggctagtgtaacgtgtaagtccaaaccagatcgtatccaaacatgcgtattgttggtctttgatcgatatttgggccgagttttctgctggtgtgcctgaaaactgacgttgcgtcaccgactgttcaattactataacatgttcgctttttacgtgatgattttacaaaaa

SEQ ID NO: 14756 - DNA, 1301 bp, Zea mays
  Clone ID: MRT4577_113445C.1
cccacgcgtccgcgccatgcaggtagagataagcatagggagagcacaaggaagggcagaggttccgagcttgctgagcatgatctccacagatcgagcaaaaggaggtgtgaagaccatgaaagccatcgcagtgggaaggttgaaacaaaagaagtgaatgaacaagagagtagtagaggtcatgcagcattatccaagaagggccagaatcctcagccagataattcattggtgaatgaagtggaagaagatgccatatcagatgacgaaaaccacgaggattctagaaggggtcgctctaagttggagcgatggacaagccacaaagagatagaatatagtaatatggatgatgatagtacacaaacatttccgaccatcaaagctgatgttgaagccgatgaggtaggtaaatctcaagtttctgctgcagctggcaactcggacatcaatagcaatgttgatactgggcagacatctgataagatgactgaagaatgtgagcgtgaccgacatctagaccagttgagaggctcaagagacgaagtgagcgtttcaaacttcccatgcccggcgagaaggatgcacctcaaggcaaaaaggtagataccgaagtgcagcctccccaaaatgaatcgtcagctgctgatatggaagtgaagccagagcggccagctcgcaagaggagatggactgggagttagttgaactggaacatttccacttcatcaagaaatttcagcagattccatggcagttgcttgcacttcggcatgtttcttccttacagttgaaagttgggttgatgtatggttttactgtttaacttgtaccagcaaagtgtaaaacttagttgttttgtggctgggaactggatactgtactaaaattacatccattttcccaccatgattcgggattccggtgacccttgtgtggcacaggtgccactgtactcaggatagttctgaggctgttacgagaagcagtggcctcggaaatatctgggttcggaatgagctgcattttgaagctggagtgcccctgctgcaagttgattttgtttgaagtgcaggtggcctggaagcactgggtcttgtaacactcttgtgctggtgggagatacttgcaagctgtggtggctgaatgtttgccatgtgatgctgtcccacggagcaatataggtgatagaaaccaagggctagagatttcagaactgatataatcactaatttgtatgcttaatactatattagccatgtacattctgataaacatataactgtcgtgcatgagtt

SEQ ID NO: 14757 - DNA, 1678 bp, Zea mays
  Clone ID: MRT4577_113446C.1
cggacgcgtgggcaaagacactcgagaacgtacaaggcaaaatgaatcttcgaggagaggtcagggtgtggaagaaaacaacatgcagaataaagggcgttctgatgtacatccacgtgatgacagtttaaacagtgagaggaactccaggcaagaaaaacaaaacaataatcgtctatctggcagttctgatgctcgccatgcaggtagagataggcatagggagagcacaaggaagggcagaggttctgagcttggtgagcatgatctccacagatcaagcaaaaggcgacgtgaagaccatgaaagccatcacagtgggaaggttgaaacaaaagaagtgaatgaacaagagagcagtagaggccatgcaacattatccaagaagagccagaatcctcagccagataattcattggtgaatcaagtggaagaagacgcctcagatgatgaaaatcacgaggattctagaaggggacgctctaaattggagcgatggacaagccacaaagagatagaatatagtaatatcgatgatgataatacagagacatttccgaccatcaaagctgatgttgaagccgatgaggtgggtaaatctgaagtttctgctgcagttggcaattcagacatcaatagcaatgttgatactgggcaaacatctgataagagtgaccgacatctagacacagttgagaggctcaagagacgaagtgagcgtttcaaacttcccatgcctggcgagaaggatacgcctcaaagcaaaaaggtggataccgaaatgcagcctccccaaaatgaatctactgctgctgatacggaagtgaagcctgagcggccagctcggaagcggagatggactgggagttagttgaactagtacaacgtttccacttttcagcagatttcatggcagatgcttgcgctttgccacgtttttcctcgtacagttgaaagttgaattgatgtatggttttactgtctagcatacacatgtacgtgtaaacttagttttttttttgtggctgggaactggatactgtactaaaaccccatccattttcccactatgattctggtgacctcaatgtgtggcacaggagccactgtactccgggtaagttccgaggctgttatgggaagcagtggcctcggagtttcccagttgaatatctgggttcggcatgaactacattttgatgaagctggagtgcccctgctgcaaggttcttttgtttgaagtgcaggtggcctgaagcaccgggtcttgtaacaatcttgtgttggtgggagatacttgcaagatgtgatggttgaatgtttggcacgtgatgctgatgctgttttaggaaccaccaataggtgatagaaaccaagggctagagatttcagaactgacataatcacagatttgtatgcttaatactatattagtcatgtacattctgataaacgtataaatgtcgtgcatgatttactggagtaaggtgtctaagtctagtgtgtagagctccacggtgcattttttgggtcgagcaatacatatatatgtacctgtagagagggctaggtagcaagaacatcattgtttgcttgatgtaggtttgcggtgtatgtaactggttcgtgtagaattttgctaaccatagagttttgaatggcatatataatattattg

SEQ ID NO: 14758 - DNA, 1066 bp, Zea mays
  Clone ID: MRT4577_113447C.1
cccacttttccgcccacgcgtccgcggcgcgggcgctcggcaaagagagcgtggtgatgtggttttgaatcgccgtgaaagtttggacgattctcatatcaagagaaataaggacgatgagaacttgcggaggttgaagcctgaaaatgaagacatggtcatggcgcatggtcatgggggaggagatgataataacagaagaaaaaaagagaggggcgatgaaattgatcaaaaaagacgagatgatagtggtagactgcaggagaaggttgatgaccgttatcatgccaaacaaaaggatgacaactggagacaaagagaaagggaggatagacagaggcccaagcatgaaaatgtgttaacccttccgaaggaagaaggaagaggaactggtcggggtaatcggatgatggatgataagttggtcagtggtggtaggaagaagggtgaaccaagatcttctgtattaagcaaagacactcgagaacgtacaaggcaaaatgaatcttcgaggagaggtcagggtgtggaagaaaacaacatgcagaataaagggcgtactgatgtacatccacgtgatgacagtttaaacagtgagaggaactccaggcaagaaaaacaaaacaataatcgtctatctggcagttctgatggtcgccatgcaggtagagataggcatagggagagcacaaggaagggcagaggttctgagcttggtgagcatgatctccacagatcaagcaaaaggcgacgtgaagaccatgaaagccatcacagtgggaaggttgaaacaaaagaagtgaatgaacaagagagcagtagaggtcatgcaacattatccaagacgagccagaatcctcagccagataattcattggtgaatcggtgaggccccctcagaggatggatagcgcgggggttcttgcacgggcctgaaaatgaagacatggtcatgaggcatggtcatagagcaagagatgataatagcagaagaaaaaaagagaggggcgatgaaattgatcagaaaaaaaaaaaaaaaaaaaaaaaaaaaacacccccccccccc

SEQ ID NO: 14759 - DNA, 286 bp, Zea mays
  Clone ID: MRT4577_113448C.1
tctgccaaatggaataacatgcttttgttagcattttagagcccaatgagaaggtctgtgaacgggttctgaaacaacaaaggtggatatatgacttgaatttaggtgataggcaatgcttgagtggggaggcaattagtttgtggattaaaccagcaaaagctgtcaagcagagctgctgctcatgtactagactgccgtatagatggtgcagtaagtccaaaagtgatctttgtagggaaatattgttttaaaagaaaaacttttatacacgtgcccacatttg

SEQ ID NO: 14760 - DNA, 299 bp, Zea mays
  Clone ID: MRT4577_113449C.1
gactcactcacttagccactcttcttcctcctgatcaatccgctctcagcacttgttcggaagaaaaagaaggtagaacacgctaacgagacaacaaggatcatggggcgcgggcgcggccacctctcatctttataaagacgataccctatgtattagggatgtgtagtttattgtctatccactacatgccaacagtacgctgcaaataaatcggtggccaaattgctgaaaccagaaacgtgaacagtactgctttctttgtttctggagaagagcaaatggatgcttcaagacag

SEQ ID NO: 14761 - DNA, 340 bp, Zea mays
  unsure (1)..(340): unsure at all n locations
  Clone ID: MRT4577_11344C.1
tcctctccccctttaatantacccccacaggaacacgacacgaccacaggggggaattttttaccaggcactgacagactaataaccatgggtgagcatggacatattgctcgtggcacacactcatacacgaaagcatatgtgaagcaaaagctacaccaggctcagggctcacagcttgagcccacaaacacacaccctacaggggccttggcccccctaataaggccagttctagggcacttgggcaaagatctagagcactgggtcagggcggtatcctcccaaaggtgctgctgctgcaagcgagcgccgttgtgaaagccgtgctgcccgatga

SEQ ID NO: 14762 - DNA, 203 bp, Zea mays
  unsure (1)..(203): unsure at all n locations
  Clone ID: MRT4577_113450C.1
tttttttttttattttttattttttacccccacacccaaancacacgggcgggttcaagtaacctnaattgacccatccatgcccgcccttcaaaataatctatcactgttaacaaactttatctccacaattctttattactaaactcatgagctgcctttattatttaaacaggatgtaccggcataagctgtaggccttc

SEQ ID NO: 14763 - DNA, 2100 bp, Zea mays
  Clone ID: MRT4577_113451C.1
ccggccgggatctttctcctctccttggttttcggatagtccaaagcgcatctctttcttgctcaattcgtccaagtttcttgctccaaccgccttacctgccgttgactcgcttgctgcctcggctcatggggcgctactacctgtaggatcatggggcgcgggcgcggccacctcctgctgccggcagcagccgcctgcctgtgggcgctgtcgtgcgcgctgctgctgcgcgcgtcccctcaccgcgctggcgccggcgccggcgggctgctgagggtcgggctcagcaggcgcggcggcgggctcgaccagcgcgcgctggcggcggccaaggccgcgaggcagcaggaggcaagccgtctcggggcctccggcggcggcgacgtccctctcgtcgactacctcaacacccagtactatggggtcgtcggcatcggcacaccgccgcagaacttcaccgtcatcttcgacaccggcagctccaacctctgggtcccctcctccagatgctacttctcgattgcctgctacctgcaccacagatacaagtcggccaagtctagcacgtacaaggcggacggcgagacctgcaagatcacctacggctccggctcgatcgccgggttcttcagcgacgacgacgtgctggtcggggacctgaccgtcaaaaaccagaagttcatcgagacaacgcgcgaaagcagcgtaacgttcataatcggcaagttcgacggcatcctcggtctcggataccccgagatctccgtcggcaaggctcctccgatctggcagagcatgcaggagcaggagctgctggcggaggacgtcttctccttctggctgaaccggagcccggacgcggacgcagcgtccggcggcgagctcgtcttcggcggcgtcgaccctgcgcacttcagcgggaaccacacctacgtccccgtctcccgcaagggatactggcagttcgacatgggggaccttctcatcgacggccactccaccggtttctgcgccaaggggtgcgctgccatcgtcgactccgggacttccttgctcgctggcccaacggccataattgcccaggtgaacgaagcgatcggggcagacgggatcatcagcacggagtgcaaggaagttgtgagccagtacggagagatgatcctcgacatgctcatcgcacagacggatccacagagggtgtgcagccaggttggtctgtgcgtgttcgatggcgctcgatctgtcagcgaggggattgaatctgttgtcgggaaagaaaacctgggctcagatgtcatgtgctcggcctgtcagatggctgtcgtgtggatagagaaccagctccgcgaaaacaagaccaaggagctcatactgcagtacgctaaccagctgtgtgagcgtctgccgagccccaacggagagtcaacagtcagctgccaggagatctccaagatgcccagccttgcgttcaccatcgcaaacaagaccttcaccctaacacccgagcagtacattgtgaagctggagcaaggaggccaaaccgtctgcatcagtgggttcatggcgtatgacgtgccaccgccgcgtggtcctctctggattcttggggacgtcttcatgggagcttaccacacggtgttcgacttcggcaacgacaggattggcttcgcggaatctgcatgagtgtggagagcactctcatctttataaagacgataccctatgtattagggatgtgtagtttattgtctatccactacatgccaacagtacgctgcaaataaatcggtggccaaaattgctgaaaccagaaacgtgaacagtactgctttctttgtttctggagaagagcaaatggatgcttcaagacatgcatgtccgatgtgtattgagaaatagagcgatgagtgctgctcgatcgtcttgaaatttgtttgttcatggtagcacagcttatcacttataaaataatttgtggatcgccttttataggaccaaaaaaaaaaaaaaaaaagcggccaaaaaaaaaaaaaaaaaaaaaaaaaaaaaaaaaaaaaaaaaaaaaaaaaaaggaaaaaaaaaaaaaaaaaggcggcc

SEQ ID NO: 14764 - DNA, 2077 bp, Zea mays
  Clone ID: MRT4577_113452C.1
cattgggtacctcgaggccggccgggatggactacggagtagtacgtggacgatgccaatcccagcgtttgtcacttgttcggaagaaaaagaaggtagaacacgctaacgagacaacaaggatcatggggcgcgggcgcggccacctcctgctgccggcagcagccgcctgcctgtgggcgctgtcgtgcgcgctgctgctgcgcgcgtcccctcaccgcgctggcgccggcgccggcgggctgctgagggtcgggctcaccaggcgcggcggcgggctcgaccagcgcgcgctggcggcggccaacgccgcgaggcagcaggaggcaagccgtctcggggcctccggcggcggcgacgtccctctcgtctacctcaacacctaggacgccgtcgcagaacgggccgtcggttccgacaccaggagctacaacctgcgggtccaacaaggctcatggggcgcgggcgcggccacctccggcggcggcgacgtccctctcgtcgactacctcaacacccagtactatggggtcgtcggcatcggcacaccgccgcagaacttcaccgtcatcttcgacaccggcagctccaacctgtgggtcccctcctccagatgctacttctcgatagcctgctacctccaccacagatacaagtcggccaagtctagcacgtacaaggcggacggcgagacctgcaagatcacctacggctccggctcgatcgccgggttcttcagcgacgacgacgtgctggtcggggacctgaccgtcaaaaaccagaagttcatcgagacaacgcgcgaaagcagcgtaacgttcataatcggcaagttcgacggcatcctcggtctcggataccccgagatctccgtcggcaaggctcctccgatctggcagagcatgcaggagcaggagctgctggcggaggacgtcttctccttctggctgaaccggagcccggacgcggacgcagcgtccggcggcgagctcgtcttcggcggcgtcgaccctgcgcacttcagcgggaaccacacctacgtccccgtctcccgcaagggatactggcagttcgacatgggggaccttctcatcgacggccactccaccggtttctgcgccaaggggtgcgctgccatcgtcgactccgggacttccttgctcgctggcccaacggccataattgcccaggtgaacgaagcgatcggggcagacgggatcatcagcacggagtgcaagggaagttgtgagccagtacggagagatgatcctcgacatgctcatcgcagcaaccgacccacagacggtgtgcactaatgttggtctatccttggatcacgcgaatcgatctggcagcgaggggattgaatctgtcgtcgggaaagaaaacctgggctcagatgtcatgtgctcggcctgtcagatggctgtcgtgtggatagagaaccagctccgcgaaaacaagaccaaggagctcatactgcagtacgctaaccagctgtgtgagcgtctgccgagccccaacggagagtcaacagtcagctgccaggagatctccaagatgcccagccttgcgttcaccatcgcaaacaagaccttcaccctaacacccgagcagtacattgtgaagctggagcaaggaggccaaaccgtctgcatcagtgggttcatggcgtatgacctgccaccgccgcgtggtcctctctggattcttggggacgtcttcatgggagcttaccacacggtgttcgacttcggcaacgacaggattggcttcgcggaatctgcatgagtgtggagaccactctgctcttcatgcataaagataccctatgtattagggatgtgtaaacagtacgctgcaaataaatcggtggccaagaatgctgaaaccagaaacgtgaacagtgctttctttgtttctggagaagagcaaatggatgcttcaagacatgcatgtccgatgtgtattgagaaatagagcgatgagcgctgctcgatcgtcttgaaatttgtttgttcatggtagcacagcttatcacttatataataatttgtggatcgccttttataagccc

SEQ ID NO: 14765 - DNA, 1012 bp, Zea mays
  Clone ID: MRT4577_113453C.1
tgggcaaaggagccgcgtcatctttgcatggctggcatataggcagccgcaactgctactgcttgatgagccgacaaaccatctggatatcgagaccattgactcactggcagaggcgctgaatgagtgggatggtggtttggtcttggtgagccacgatttcaggctgatcaaccaggtcgctcaggagatctgggtgtgtgagaatcaagaggtgacaaggtgggaaggcgatatcatggatttcaaggcacacttgaagagcaaggctggtttatctgattagaatgcttttctagtaaccatgaactttttaactctgtatgatgaagtccctgttttacagtagcgaactatcaaatatactgttagggatagtttggtaactacaaatccggagggggttggaggggctagaatccccttcttattcaattttgaataagtctattctctccaatcctctccggttttctggctcccaaactaaccccttcgggattgaagggtattgaagaggaaattagttcatttccaccttaattccctcccaatcccgaaggggatttgaggttcacaaagtagcgaatgtgtcagactcctacttccctcgcaaccatactaccttgtactacctgaaatttttatttatatatatatttgaaatgatattatgtgttcgatagtttgggaaacacaaaatctggagggggttggaggggttagaatcccccttcttattcaattttgaataagaagagtattctaatcccctccaatcctcttcggttttctggctctcaaactaaccccttcgggattgaagggtattgaagaggaaattagttcattttcacttcaatcccctccaatcccgaaggggatttgaggttcacaaagtagccaatgtgttggactccttaagacttccctcgcaaccatactaccttgtactacctgaaaattttatttatatatatatttgtatttgacatgtcattatgtgttccgt

SEQ ID NO: 14766 - DNA, 2032 bp, Zea mays
  Clone ID: MRT4577_113454C.1
tgggaccctcgggcccacgcgtccgcacaggccagggggggatggacgacggagtagtacgtggacgatgccaatcccagcgtttgtgtttgtcgcctagacgtctcaaggccctctttccccctctccgccttgactcactcacttggccactcttcttcctcctgatcaatccgctctccagcacttgttcggaagaaaaagaaggtagaacacgctaacgagacaacaaggatcatggggcgcgggcgcggccacctcctgctgccggcagcagccgcctgcctgtgggcgctgtcgtgcgcgctgctgctgcgcgcgtcccctcaccgcgctggcgccggcgccggcgggctgctgagggtcgggctcagcaggcgcggcggcgggctcgaccagcgcgcgctggcggcggccaaggccgcgaggcagcaggaggcaagccgtctcggggcctccggcggcggcgacgtccctctcgtcgactacctcaacacccagtactatggggtcgtcggcatcggcacaccgccgcagaacttcaccgtcatcttcgacaccggcagctccaacctctgggtcccctcctccagatgctacttctcgattgcctgctacctgcaccacagatacaagtcggccaagtctagcacgtacaaggcggacggcgagacctgcaagatcacctacggctccggctcgatcgccgggttcttcagcgacgacgacgtgctggtcggggacctgaccgtcaaaaaccagaagttcatcgagacaacgcgcgaaagcagcgtaacgttcataatcggcaagttcgacggcatcctcggtctcggataccccgagatctccgtcggcaaggctcctccgatctggcagagcatgcaggagcaggagctgctggcggaggacgtcttctccttctggctgaaccggagcccggacgcggacgcggcgtccggcggcgagctcgtcttcggcggcgtcgaccctgcgcacttcagcgggaaccacacctacgtccccgtctcccgcaagggatactggcagttcgacatgggggaccttctcatcgacggccactccaccggtttctgcgccaaggggtgcgctgccatcgtcgactccgggacttccttgctcgctggcccaacggccataattgcccaggtgaacgaagcgatcggggcagacgggatcatcagcacggagtgcaaggaagttgtgagccagtacggagagatgatcctcgacatgctcatcgcacagacggatccacagagggtgtgcagccaggttggtctgtgcgtgttcgatggcgctcgatctgtcagcgaggggattgaatctgtcgtcgggaaagaaaacctgggctcagatgtcatgtgctcggcctgtcagatggctgtcgtgtggatagagaaccagctccgcgaaaacaagaccaaggagctcatactgcagtacgctaaccagctgtgtgagcgtctgccgagccccaacggagagtcaacagtcagctgccaggagatctccaagatgcccagccttgcgttcaccatcgcaaacaagaccttcaccctaacaccccagcagtacattgtgaagctggagcaaggaggccaaaccgtctgcatcagtgggttcatggcgtatgacgtgccaccgccgcgtggtcctctctggattcttggggacgtcttcatgggagcttaccacacggtgttcgacttcggcaacgacaggattggcttcgcggaatctgcatgagtgtggagagcactctcatctttataaagacgataccctatgtattagggatgtgtagtttactgtctatccactacatgccaacagtacgctgcaaataaatcggtggccaaaattgctgaaaccagaaacgtgaacagtactgctttctttgtttctggagaagagcaaatggatgcttcaagacatgcatgtccgatgtgtattgagaaatagagcgacgagtgctgctcgatcgtcttgaaatttgtttgttcatggt

SEQ ID NO: 14767 - DNA, 211 bp, Zea mays
  unsure (1)..(211): unsure at all n locations
  Clone ID: MRT4577_113455C.1
gaaggccgcctccgtgctgcagagcttcccgttcaaggcggccgtgctcgcgctctgcgtcgcgctgctgccgctcctccccacgcaggcgccgngacgtcggggccgggggacccggccaggagttcctcgccaaagtgtgggagctgctgcacctgctgttcgtcggcatcgccgtctcgtacggcctcttcagccgcaagaacagcgc

SEQ ID NO: 14768 - DNA, 673 bp, Zea mays
  Clone ID: MRT4577_113456C.1
gcatggctggcatataggcagccgcaactgctactgcttgatgagccgacaaaccatctggattcgagaccattgactcactggcagaggcgctgaatgagtgggatggtggtttggtcttggtgagccacgatttcaggctgatcaaccaggtcgctcaggagatctgggtgtgtgagaatcaagaggtgacaaggtgggaaggtgatatcatggatttcaaggcacacttgaagagcaaggctggtttatctgattagaatgcttgtctagtaaccatgaactttttaactctgtatgatgaagtccctgttttccagtagcgaactatcaaatatactgttagggatagtttgggaaacacaaatccggagtggattggaggggctagaatcccctttttattcaattttgaatcagaagggtattctatcccttccggttttctccggttttctggctcccaaactagcccttaatgtgtccgactccttaagacttccctcgcaaccatactaccttatactacctggaatttttatttatatatatttgaaatgttattatgtgttcttatgtgttccgtaagctttgtaggttttgtaagtttggatttgtcaaggttactgcattttatgatcattgtaacaaaaaaaaaaaaaaaaaagcggcc

SEQ ID NO: 14769 - DNA, 1984 bp, Zea mays
  unsure (1)..(1984): unsure at all n locations
  Clone ID: MRT4577_113457C.1
gcgttcgccgccttgcgtccctgacttagccactcttcttcctcctgatcaatccgctctccagcacttgttcggaagaaaaagaaggtagaacacgctaacgagacaacaaggatcatggggcgcgggcgcggccacctcctgctgcgcgcgtcccctcaccgcgctggcgccggcgccggcgggctgctgagggtcgggctcagcaggcgcggcggcgggctcgaccagcgcgcgctggcggcggccaaggccgcgaggcagcaggaggcaagccgtctcggggcctccggcggcggcgacgtccctctcgtcgactacctcaacacccagtactatggggtcgtcggcatcggcacaccgccgcagaacttcaccgtcatcttcgacaccggcagctccaacctctgggtcccctcctccagatgctacttctcgattgcctgctacctgcaccacagatacaagtcggccaagtctagcacgtacaaggcggacggcgagacctgcaagatcacctacggctccggctcgatcgccgggttcttcagcgacgacgacgtgctggtcggggacctgaccgtcaaaaaccagaagttcatcgagacaacgcgcgaaagcagcataacgttcataatcggcaagttcgacggcatcctcggtctcggataccccgagatctccgtcggcaaggctcctccgatctggcagagcatgcaggagcaggagctgctggcggaggacgtcttctccttctggctgaaccggagcccgacgcggacgcagcgtccgggggggagctcgtcttcggcggcgtcgaccctgcgcacttcagcgggaaccacacctacgtccccgtctcccgcaagggatactggcagttcgacatgggggaccttctcatcgacggccactccaccggtttctgcgccaaggggtgcgcgggggggggttnctggttttccttgctcgctggcccaacggccataattgcccaggtgaacgaagcgatcggggctgacgggatcatcagcacggagtgcaaggaagttgtgagccagtacggagagatgatcctcgacatgctcatcgcacagacggatccacagagggtgtgcagccaggttggtctgtgcgtgttcgatggcgctcgatctgtcaggtgagaggctctgttttgcttgacacagcaagcatgttcttgttcttctcatgctagtggtaaactatcatcagatcacgcgaaaactttctgcagcgaggggattgaatctgtcgtcgggaaagaaaacctgggctcagatgtcatgtgctcggcctgtcagatggctgtcgtgtggatagagaaccagctccgcgaaaacaagaccaaggagctcatactgcagtacgctaaccagctgtgtgagcgtctgccgagccccaacggagagtcaacagtcagctgccaggagatctccaagatgcccagccttgcgttcaccatcgcaaacaagaccttcaccctaacaccccagcagtacattgtgaagctggagcaaggaggccaaaccgtctgcatcagtgggttcatggcgtatgacgtgccaccgccgcgtggtcctctctggattcttggggacgtcttcatgggagcttaccacacggtgttcgacttcggcaacgacaggattggcttcgcggaatctgcatgagtgtggagagcactctcatctttataaagacgataccctatgtattagggatgtgtagtttactgtctatccactacatgccaacagtacgctgcaaataaatcggtggccaaaattgctgaaaccagaaacgtgaacagtactgctttctttgtttctggagaagagcaaatggatgcttcaagacatgcatgtccgatgtgtattgagaaatagagcgacgagtgctgctcgatcgtcttgaaaaaaaaaaaaaaaaaaaaaaaaaaaaaaaaaaaaaaaaaaaaaaa

SEQ ID NO: 14770 - DNA, 546 bp, Zea mays
  Clone ID: MRT4577_113458C.1
cacccaacttttaataaaaacagaacgggagcttctttacatcgctctaactagtcactctgggttcttgcccataaattgtagctacacaaactgacctacactgcatgaatatatggggtcactttctatcataccaccctatttgaacctactggtgatacacagtaccacccaaaagagatcgaatctccacttacgcgatatcagaataggcctctatgttgttgcaagtttcctgacctcgttagacagcaccacatccgccccctttagcttttgtacaggaggttgagccattaatccacacaaatgtgacctaaatagaacacccggaaatttgtcacgttaaacttgatcaaaccgaacatgcctctccaccagattgccatgagatttgggctgcccacaagaaaaacacttattccttctattaagaacaataccagagatcattttcaaagatgcgtctgtgggatcagcataaagttaaagatgaccatcatgcgggcctatagatccttgatgtaattgactccaacatca

SEQ ID NO: 14771 - DNA, 332 bp, Zea mays
  unsure (1)..(332): unsure at all n locations
  Clone ID: MRT4577_113459C.1
ctccgccgtctccacaacgcaccgcacatcgccaagatacatacgtgacagctgtaccaccacgcccttcaccaagagaagtcgtcggaactgctgtgcgcggttgaactacgaatgtccggagcaaaacaacggcgcggcggagaaacaacagcctccgacctcgtcagcggcatgggtgaccactccgccaagtgcgcgcagctccgccggaactattgaaagaaaaagngagcatgtatgccagaaggttctttactatagatagaatatgctataaatctcctgctaccaggaaagtcaagaaacttaactgcacatgacatgcctcc

SEQ ID NO: 14772 - DNA, 406 bp, Zea mays
  unsure (1)..(406): unsure at all n locations
  Clone ID: MRT4577_11345C.1
attattactacgatgctagtactatactgttactactagtgccgctaggctagctctacacggtacggtggcaagtcggcggcgggtctataggtggccgttgtcgccggggcggtcgccggccacggagacgggggggaggcggctggggcggggccgggcggcgccggcgccgacgccgacgcggcggcggtgctgcgccgtggtggccgcgagcgcgcggcgcgcgcactggccgccctcgacggcgccgttccgcaccagcgcgctgcccatccgcctgcccgccgcgcncngtcggctggtggtggtctggggcggcggcggggtggtcggcttgccgtgcccgtgcggcggcggcggctttcgtcgcgcgctccttgtgctggctgcagcgtgtcgtgcc

SEQ ID NO: 14773 - DNA, 400 bp, Zea mays
  Clone ID: MRT4577_113460C.1
gtccaggcgtactccccgccttgcatcgagattgctaggtatgcatcgacattgcaacttattcaaatctgaagggtatatcaagaattcctttgtaaagtccttctgcagattgttgtgctaacaagaactgacgtccatgattgtatgtgctcctatgttcatgaactacatagaatcccataaatttaactgcatttcttccttttccttttgctcctattcgtgtagctgcattctttagtaaaagacaaaggaagagttcgctctgctaataaatatttccaggaaggtgctagacactgaataagttggtggcatttttcatgaaaaaattgttgacttattattagccatctgtctatacaggtcataatcgaagggtttacagggaggagat

SEQ ID NO: 14774 - DNA, 246 bp, Zea mays
  unsure (1)..(246): unsure at all n locations
  Clone ID: MRT4577_113461C.1
gtggggggggtggggtttttttttcctcctcttcctcgttaattttattgccatatcaccaaattgctgatgtgacagggctgctcttagctccttacctgtaagccaactaatcagggtcaacatgctctttattgagtgtaggatttgtggggggggggctcgctcnaccacctaattaaacagttacagttacacgccgaagtggaacctaacccactgtcacagaagcgacccctgtccccc

SEQ ID NO: 14775 - DNA, 508 bp, Zea mays
  Clone ID: MRT4577_113462C.1
cgattctaggctcgtggttgcagttgcttctgatgcactgaagaagacggctcttgctctttcggtgggcaaggcgggttcgagtgtcatggaggtggagtcatctgctgcggttgtctccgttccaattgctgacagtggccatcacggtctggaggctgagctgcagagatcatctgagagttcatgctggagcagtgtgcctagtgcaactggtttccttgacactggttcacagaggagtgctggatttgaaaggaacgtgttggtgccaggtacgcagcgtttgctacccaagccaaggatgatttctgccattcgccgcttcccacctggttgcgggagggtccgagcgtctctggttgctcgaggagtcagtaaagtgcgtttgccattgctggggaaggtggaagttatgcctgctaaacaacaagttgtgaaggctcacgcatctagaaaaaagcgcgtccgaacagaaggagatgttgctgccacaattaggaactcc

SEQ ID NO: 14776 - DNA, 370 bp, Zea mays
  Clone ID: MRT4577_113463C.1
gtcaactccctagacacataacacgtgccaaccgcaacaacccacctttccaccctcatcatgcatttcaccaccgctttcatcggcctcctctcggttgcctcctccgccctggccgcacccgtcgacacccaggccgacaccatcaccgcccgcgctccccctccgtggatcatcaagtccttcaagcggtcctgcaatgccgccaacaccgagtgctcggtgtcgtttggggtcgacacccagatcagccccgtcgtcaactgctcgtacagcgtgaagggcacccaggcgagccgcaagtcgaccgacggcatcgtctgcggcccctacgtcgtcagctcgggctggaacggctcctttggcgagg

SEQ ID NO: 14777 - DNA, 320 bp, Zea mays
  Clone ID: MRT4577_113464C.1
ttatttttttttttttacatttttattttgggagggttaaacaaatagggtgtggtatagcaaactgacaatatcaaacaggcataaccatagaaccatcacgaacacaacaagggcacgctgaaaagggacacaaaggaaactgccatgaaaagaacaaaagagagcgtggaaccaattcccgaaaacaaagagtgcaaaaggaactgcatagctaagacaaaagccgcaccgcagatctgccgagaaaatatggggttgctacaagccaacttaatgggggagcgaaaagcgctcaaatgtgacaaaaatttacagac

SEQ ID NO: 14778 - DNA, 520 bp, Zea mays
  unsure (1)..(520): unsure at all n locations
  Clone ID: MRT4577_113465C.1
tttttttttttttnnnnnnngacccattcctaacgccgaatatcgttgttctccacgcttgttactcctacgtagcccatggctctggcattccccctgctttctgtcgtcaggttgcgtgaggtctgatgccctcagcgcgtgcgctcaaagtagccgcttgacccagcaatggcaacactttgatccatcacccattcgccgactccgaggtacttgtcgagccacttattgacgtccttgttatcgcctgcgatcttgtctgtcttgaaactaggcgtaaggccagtggagcgcttcatgccagcgaggatggtagagatcaggacagcatcaaaagcgtagtgtgtaaggcgtcccacctttgaccatagtccaaacgtcagcaggttgagaaacaccatggttgcggtctagctggtcggagttcgaggagaattacgtcgaagtaatcaagtcgctcgtgagccgagctcttcgagttttgggtaagggttgtgatggtgttcgagggagtcgt

SEQ ID NO: 14779 - DNA, 307 bp, Zea mays
  Clone ID: MRT4577_113466C.1
ggtgaatgatttttgattttttatatttgaacgccgcacaacaaatgcgcggatagtccgaaggctcaaagtttgcgtggggcaaataattccgggtatgatcacttgtggtgcaaaagagcattggcgataccattgtatactatggcccgccacgccccgggcacacacaccactcaaggtccgttggccccattgggggccccggtcgacacgggggtcactggatatgcggtttatgggacatacgtccaaaggttgggggggggggggggcataaatgggttattcttttttccctgaagca

SEQ ID NO: 14780 - DNA, 811 bp, Zea mays
  Clone ID: MRT4577_113467C.1
cgggaagtcgttgcccccgtcgtgtctagatctccgtcgatggaaggcgcaatttcagggatgctccgtggctgccccagccatcctcggcctcgctggcttcgcgtcaaccccgccatcctcgcctcgctcttcgtcgatggaagccaacgaccgcctcctccatcctcgccccgctcaccgccatccccttccatcagcacccctccatcaccgctccacatccacaactgtcgcgtccttccatcggcgtccacaccccatgcacagctgctgtgatcgcccccgccatcctcgccccgctccccgccatcccctccatcgccccctccagcgacccaagcgggctctttgtcatcaacgtgaggtcaccaagggaggttggtgaggtcctcgatggcgaccgactccgtggtagcagtggtggcctctgatctaggcagcatcagtgcgcgtctagaaaaccactcacgctcaacggcggtgatggcatgggagcaggtgtcggacttgatggaggtaggccagtaccaattttttggtgatttccaggcatgaccagaggcgtcctgggaggaggaggcaacgtcagccagtaccagttctatggtgacctccaggcgcagtcgaaggtggacgtcgttggggtggccttttcgaacttctccgatgtctagcaagctctgcctgcagaatccaagtaggatttactcaaggttggatcgtcatggggctttttggggagactattcctaagacggcagggatggacgggcaggtttggggagaggacctagcagtggcaggggta

SEQ ID NO: 14781 - DNA, 375 bp, Zea mays
  Clone ID: MRT4577_113468C.1
aattagatatctttataacataaactagaaaaaaactgacgactatccacatggtggttgatcgaagcaacaatggcctagaactcctcacaatctttatagtagtcttgttctaagcagcaaattcaacaaaaataaattagtacaattatggttggtactcggctaggatgtaagaaaaagtgtagtgtaaggttaatcaagaacaaggttaaggctatagtgttccacattttatataagttgatcaaactttattagcaattgctgagtgttgaacacctgtcaagattcctctggagaaccaaaacagggtgacatgattaaatcaatatgaatcattctcccttcaattacttatgatgattgagtgat

SEQ ID NO: 14782 - DNA, 334 bp, Zea mays
  Clone ID: MRT4577_113469C.1
cagcgcacccgtgtggccgtcaggcgtgggatgcaccacctccgtcgcctcgtccgatctcccctccgccacgtccctccccgcgcggcattctccggcaggccctccgtttcccacggcaacgacgcgtatggtagctcccacgccgccgcttcagacgcgatcgcttgcctcgtcgtcgcaggcggcggaggcctcgaggccgacctcgaccgtctcttctcagccgtcctttcccacgggctcgtctgcagcgtccttcgagcgctcacggaccggggcgtccccgctgagcggttccttcgcggggccctaatccctcgggaggggcttt

SEQ ID NO: 14783 - DNA, 922 bp, Zea mays
  Clone ID: MRT4577_11346C.1
gggcaaaatccagttgtctccattcctcctgccatgtttatccatccaagaaatccaaactggacactcgcatgcatcccatcatctgcaattctatgtacacagtacacgtacaagagaaagagagagcctttttccctggatgatggtgatgatccatggaccaggctcccaaaactagtcctgatccagcgctccaacctcccggctctgctctggtcttgttctagttaaccgccggtccaaatttttttattattattactacgatgctagtactatactgttactactagtgccgctaggctagctctacacggtacggtggcaagtcggcggcgggtctataggtggccgttgtcgccggggcggtcgccggccacggagacggcggagaggcggctagggcggggccggccggcgccggcgccgacgcggcggcggtgctgcgccgtggcgggggacgggcgggcggttgccgcgagcgcgcggcgcgcgcactggccgccctccacggcgccgatccgcaccagcgcgctgcccatccgcctgcccgccgcgcacagacggctggtggtggtcaggggcggcggcggggaggtcggcttgccgtgcccgtgcggcggcggcggcttcgtcgcgcgctccttgtgcaggctgcagcggaacgagcccgggtggctggtcggcgagcacatgcaggtccgtcggccccgcgacgacgacgagacgctgacgctgacggactgcccggcgccggagagcgagacgcgcgtgggcgaggcgtagcggtagtgcgcggccgagaggacggggccgctcggcctcctggtggtggtcgcagcagtcgccatgagaggtggcgggttgggttgtgtggggtggagctcccaattgggctgctgcttcctcgtgccgaatt

SEQ ID NO: 14784 - DNA, 206 bp, Zea mays
  Clone ID: MRT4577_113470C.1
gcgccgtcgtcgttgtttaaggttcagactcaccctggagcaaccagtgcacgtgctcatggcgtaagggatgctgacgccgccttggaggggatgctggccgcgttgcccgcgtttaggccgctgacacccgcggcggagatatttatgcatttgcacgctgcgcggcggacaaacagaagtgcggtcggaggcgttgatgattt

SEQ ID NO: 14785 - DNA, 593 bp, Zea mays
  Clone ID: MRT4577_113471C.1
tccaggctctccggggccggcggcccttcctttacgtagctcgcctcgcgcctgcgcgaccacctctgtcatggccgggcagaaggatagggcccggccggcggcggccaagccggccaagcccggaggcgggaagcagacgaagaagaagtggagcaagggtgggcaaacggagagggacagcaacgctgtgctctttgaccaggccacctatgacaagctggtctctgtggtgcccaagcacaagcagatcacccaatccgtcctctctgagcgtgtgaggattaatggatgattgatacggacggcagtcaaggatctgatggcagggggactcataaagatgatctatgtttattccatccagccgatatacacccgggcaaccaacacatgaaggctggctggcatgttgtcggcgggctctatacagatgaatgaaggtattatttaatgcatatttagatcatggatgagtcagccttactgacgggtggaatgaaggaatgaatgtagataactgaactgactaagctcatgtaggtatccaaacattcatctatgaggaataccaacctgtctgtgctctatct

SEQ ID NO: 14786 - DNA, 558 bp, Zea mays
  Clone ID: MRT4577_113472C.1
ctgcgcctatagctgaggacagcagagcgctacccaggagtgacgtacgacgacgacaacacaggagccgcaatggtatcccacttctacgccgccgtgccccggacccacggactccggggctacgacgcgcccatgtccgcgttggcgtcgctgccgtccgcgagggcggccaggaagagcgctgccctcccagggcatccgctgcgactacatacggctccgccaccaacctgataatggtgacgacgacgacactaatgctgttcgcggggcggactcggctggcgacgtaggccaaccgtaaggcgactgaggagatgtagttggatgcgccccactccggcctgcagacggatgaccccgtcgtgtttaccctcgtctacatgttgccctgcggagacgtcggacacatcttcagcgtctcgtatcggatcgggataaagaacaccggccgtcctctacaagaattttggcctaaatccctaccccgaccgttgttaacatcagcactcctcagccttcgatcgtcgcctcacggcacggtcagtaggccgc

SEQ ID NO: 14787 - DNA, 362 bp, Zea mays
  Clone ID: MRT4577_113473C.1
gtttacctcacggtctctcgtgagcgtcgctttatgacgagaaccgcgcctctctttaaacttccagggattgtctgcgaccattcctttggagaagaggatcactgtcgacaagcttgcatccgacgatgagtgtgtgcacaatagagcggctactatgcactttcgctggcgtactctgagaatcggctttatggaagttggggtcgtgtatacagcaccgaggatgccaaggagacctgtgctaacaagtacgagtaccctggtgaatacaagctatacgacgctaaggagatacggtcggatacaagcaggggagatagctgagtgcgtccatgttctccctcctgaggacatggact

SEQ ID NO: 14788 - DNA, 706 bp, Zea mays
  Clone ID: MRT4577_113474C.1
caacatggggcccaaactagaccacacccacccaagttgggcagagccgacccatggctgacagctcgcacccacgccgtgcgcgctttgcaaaaagaaccttgttgcccagacaaatccaaacgagcccgagccactgttaattggtgtcactgacagtttcgcttagacccctcgacttcatctcttttgcacaaactcagtcgcgacaccgtcgtgctcaaccccggcggtcagacgtccaatccgccatggtggtgtgatctagtcaacgacgacgacaccatcacgatccccaggcaacggtggactccaacctgtgttcaatcgaccgcggggacactaagacctaactaccgatggcggcggcgacaaacccagttcagtgggctcaattctatggggacggtctggagcggcgcgaccctgttccggtcaacacaagacggtagaactgaaaataccaatgggaaaaccttctctgaccttagaagaacgtggaacgagggtcatgcgggctggtcactccttgagacgtcttggccacggcgaggtaggcagtcagtgggcgtggtcaccactgacagaaggatgacatactagaccctgggactgggcaaacttgggcaggggagaggtgaacactggtgcggacagaagacctaccacactcacacacgctgcaatctggctggagcttgaagat

SEQ ID NO: 14789 - DNA, 287 bp, Zea mays
  Clone ID: MRT4577_113475C.1
ccctttatttttacgctatgctgaacaaagtactacaggagacagttttgccaaagggtggcgccattgataaattgcaatctcgtctggcattttcacttaacatccaagatgttatgagaaatgcgatccaaagagcccaggatgaacttatttgcattacccccaaagctaagctgttgctgcttcatgtatcatgtagcccctgcatattttatatcctactatcctaaccacactgccgcatattctttttatctaatcaaacttgatttggggcccttttc

SEQ ID NO: 14790 - DNA, 273 bp, Zea mays
  unsure (1)..(273): unsure at all n locations
  Clone ID: MRT4577_113476C.1
acagcgagggggagccacaagcngancngcaagcncaggaccgngcacaaagaanaggncaaaagaaagaagnncaagngnnccgcnnnngcacngagnacacnannngaggaaaaggggangggaggagggggggaanaagcnagcannggangcnaaagaaaancagcaaggacgaagggcagagcagaaaacngagaaaaaggangagcgggaggaaaaggagcggaggaggagcgaaaaaggagaacagggagaaagacaaaagaaaaa

SEQ ID NO: 14791 - DNA, 139 bp, Zea mays
  Clone ID: MRT4577_113477C.1
gctcggggaacgataagctctggttatagcataacatttggacaactgatcagcgagcagacaaccaatgttgggcgaacaaaaacaggttatatacctgcccgggggggggctcgagccctgatagtgagacaaattt

SEQ ID NO: 14792 - DNA, 278 bp, Zea mays
  Clone ID: MRT4577_113478C.1
accgagatgcggaggctgctccccgagctccttaagaccctagcttcagacggctcgcgcggcctctccaccgagaaggctgttggtgcagtcgtcggcataggcagacacaccgctaagcggatgcatgacacgagcaagaagtatccaatggaactgttctacgaggtacctcatatcaaggatgacgcacgcattgctgtctgtgaaggggctgctgaaggcgtattacttgcacacccaatcgatgtcatgggctgctgctcgggcgggaccta

SEQ ID NO: 14793 - DNA, 547 bp, Zea mays
  unsure (1)..(547): unsure at all n locations
  Clone ID: MRT4577_113479C.1
gttcttnctccttttttgggttccaaanagcatgtatacctaatgctagattgaacttttaccaattaagttcaaaaaacaagaaaagtcgacatcatgaatcgaagtggcaggnngatgaaaataattttatagactactacaagtagaaatattgtggggcatactcattgaccattagtttaaaataacaaatgagcggtctctaaacttgcatgaatcccaactatcgaattttaatgtctaggcccctgaccttatattgaattttgatattttgttggcactggtcaaaacaggcacctgctcatgcattgatatggcatgctgactaggtgttgacttggcatgttacgtccacatgtcaagtctgcgtcaacacacggtcagcgtgacatgctcggtcccaatgcgcttgtgacaattgtggagacccagatatcaaaataggggactcggatgaggccgttgtgcgtttttagggactgctcatggattttactctttaaaaaatgtcaggcttgaccaacatatacctagtcattca

SEQ ID NO: 14794 - DNA, 316 bp, Zea mays
  Clone ID: MRT4577_11347C.1
attcggctcgaggctcgtcaacagcttttttagtggctcttccacctgtccgactcggtggcgggtccagcggcgccttcaccaccccggtcgtggggcattgcggcttcctcctgcgacacctaggcggtgatgtccgtgccttcaaacagaggcatcgctggaggagagaaaggcggaaggtgctgaaggacattgcgggcgcacaggatgtgacggaacacgcctcatatcataagccgactgtgactggcgccgctgtacgccgacactcttatgaagaggcatggcatgtccggctagaagggggtgccct

SEQ ID NO: 14795 - DNA, 116 bp, Zea mays
  Clone ID: MRT4577_113480C.1
gtgggtctcccgcgtcatgttctacccggagggcttccagcccatcattgactccaaatggcgggactacaccgtcgtggtctagagccttaacacctggcagctggccgtcatcc

SEQ ID NO: 14796 - DNA, 317 bp, Zea mays
  Clone ID: MRT4577_113481C.1
gctcgctcggcctccagcgctgcccgctgccatctgctgtagcgtcacaccgctgctgtggagggaccgagggagcagagcaccggagtagccaccgccggctggggaatttccatcgcctggagtagccgtacagacaagcaacgatggtgtgcagcagcgcgtggtggaggccctccgacctccgatttgaccgtcgctccaagccctctgcacaccggcgcgcccctctggctcggttttgcccagcgatgtgcatcctcctctgcgcagactgctcatctccctcctctgctcggcgcgtccctggctctagc

SEQ ID NO: 14797 - DNA, 1578 bp, Zea mays
  unsure (1)..(1578): unsure at all n locations
  Clone ID: MRT4577_113482C.1
tgggtacctcgaggcgggcggccgcccgccacaagaacactcctagctgaagatctcgagtgcaacgcaacgttgtgcagcaacgttggcgcttggcggccagtagtagcagctaatttagcgtcgctccttcctactagacgagagatcgagaaaccatggccaagctccaagtcactcctggcgccgcgttcaccgagtatgaactcaacttccagggcctgtacatgtcacgcccctgggtcccaaggccaaccaagctgcgatcctagagagcaaggccaagatcggcatcggtgccaccgtggttaacaactgggcagtgtatgacgggccagggccaggcgctaagctggtcggccgtgcgcagggcttgcacatcctagccggaaactgggtcaactcattcaccctggtgttcgaggatgaaaggttcagtgggtccacgcttgaagtgaggggcataacggtcgaaactggcgagtgggctgttgttgggggcaccggccagtttgctatggcgaacggcatcatctccaagaagttccacgagcagagaagcgacgggaacgtcatagagcttagtgtccatgctttctgcccgctgctcaaagggaaaaggggcgctgtggcaaaggttgggccatggggcggaagcggagggtctccaatggagctgacagaggcagagacgcccatgcgtctggagagcatcaccgtccgcagcggcgtggccgtcaactccatctcattctcctacgtcgactctgccggccacaagcgctctgctggtccctggggtggttccggtggacagcctgatcaggtccagctcgccgagtctgaggtggtcacacaagtgtccggaacatacggcaccatcgacgacgacgaccgcaccgtgataacctccattaagttcgtcacgaaccttgacaagacctacgggcctttcggagcgtacggggacggcgacgacacctcctttaccgtccccgtgcagccggggagtggcggcgatcgtgggcttcttcgcccgcgttggcggggccggggactacctggacgccattggcgtctacgtgcgccccctctaaaaaagctttgttttgtgatgtgaatcaagcagctgcatgcatgctgctctactccacacagagtcgagtccatcaccacctgctgcttgaaatgcgtgcgtgcgtgcggcttccagttgctttatttcgtacctgagtgttgtgttgtggtgtgtttgctcatgtacttcggtacgttgcttgcttggtaaactgtggtcagtgttgtgtgtgtttgcctttgtcatgaatttcgacggaataataaagacctcgtgtagaagaggtcagggttttatcaaaaaaaaaaaaaaaaaaaaaaaaaaaaaaaaaaaaaaaaaaaaaaaaaaaaaaaaaaaaaaaaaaaaaaaaaaaaaaaaaaaaaaaaaaaaaaaaaaaaaaaaaaaaaaagggggggccgcttttaaggaacccaagttttacttcccggtggcttggcaaagtaataactttttttttggggngcccctaaaattaaatt

SEQ ID NO: 14798 - DNA, 268 bp, Zea mays
  unsure (1)..(268): unsure at all n locations
  Clone ID: MRT4577_113483C.1
tcgttccctcctctgtgtaccggccagnaattttttnaacccacagcgagaaatggcggcgggagcgctccatccggctagagggccggggaaatgcctatcaataggatcgccctggggagccaccatgaggtgtaccaaccgggcgccctgaaggggtcgttagctgagttcatatgatccctttttttttaattttcaccaacattttgggggggggggccttcataaaacttaccaacaaactacccttcatcccctttttttt

SEQ ID NO: 14799 - DNA, 323 bp, Zea mays
  Clone ID: MRT4577_113484C.1
aaggttaatgatggtagatttggccagcctaaccatgaacaatacaacaacaatcatacagtgggctgaaagttttaaaaggccccaaggaacgaacagagtcccctatagggagcaaaagggagatgaaggtacatcatgaaatgctcctctgtgtatctacgtcacatataagaaataatgcttatcttgaaagactagaacacatgcatgcctaatttactacactggagaaggtccatcggagcttcaggaaggccgagttgggtcagacacctgcacaaacagtgggactagacgggccaaccatggcagaaaactgt

SEQ ID NO: 14800 - DNA, 180 bp, Zea mays
  Clone ID: MRT4577_113485C.1
ttgtagtcgcggagacggggtgctggtttgcgtcgtagtctcctgcagcgtctggggtttccgttgcagtcctcggaaccaggactcggcgtggctagcgagttatggcgacgaagccgtgtgcgtgctgaagggcgacggccagtgcagggcatcatcaatttcgagcagaaggaaagt

SEQ ID NO: 14801 - DNA, 157 bp, Zea mays
  unsure (1)..(157): unsure at all n locations
  Clone ID: MRT4577_113486C.1
cggncgcgtggggnaagttcaaaaatgatttacaaaatgcttagccctgcttagatcttgtggttagaggttgtcttttgcgttaagggccttgctcagggggttatcctgggaggaaagaggcttncttacctgcaggtatatattttcattttgg

SEQ ID NO: 14802 - DNA, 1972 bp, Zea mays
  Clone ID: MRT4577_113487C.1
gtgttcctatttgcagacttccggaggcgggggtcattcagcaccacgctgtgagcggtcgcgcagagtggaaggttttggaaggaggagatatccgccagcgattcgacctgtgagcggtcgcgcagagtcgaaggttttggaaggagcagatacccgccagcgattcgacggaggagagccaccaaaggactgcacgctctgaggactgaggtaaagcttgtcaactcccgcggtctttcgcaaaagtttcttgcgggcatggatcggttcgggaactacaagaactaccagacaaggcgctatgaggatggagacgacgatgcaaagcaaatgctgaggccctgggaagtccccaaaggagactggttcccctctgacttcatcgttggcgctgccacttcagcataccagattgaaggtggttggaatgaaggtggaaaggggccaagcacatgggatcacttctgccacagttttccatctttgatagcggacgggagcaatggggacgttgcagcaaattcataccacatgtaccatgaggatgtaaggttgatgaaggaaatagggttggatccctataggttctccgtctcttggtccagaatactgccaaaggggacgctcgaaggaggtattaatcaggatggcatcaactactacaaaaaactcatcaacttgttgctagcggagggcatagagccatttataacaattttccactgggacacgcctcaagcactggtagacaagtacggtggctttttagatcggaggattgtaaaagattacacagatttcgctatggtgtgcttcgagaacttcggtgacaaagtgaaaaattggttgacatttaacgagccccaaacgttttcttctttttcctatggaatcgggttgtgtgccccagggcggtgctccccaggacaaaaatgtgctaacccaattggaaactcacttatcgagccatacattgttggtcacaaccttctcctagcccatgctgaggctgttgatctttacaacaagcattacaaggatgagaacggacgtatagggattgcatttgatgtaatgggtcgagtgccatacgaaaagtcagcgtttgtggatcaacaggcacaagaaaggtcctgggacattaacctaggatggttcttggagccattggttcgtggtgactaccccttctccatgagatcgttggtgagggatcgactacccttcttcaccgtcgaagagcaagaaaggctagtgggttcctatgacatgctggggttaaactactataccgcaaggttctccaaacacattgatatctctccaaactactcaccggcgctcaacactgacgatgcctatgctagccaagaaacgtatgggcctgacgacaaacccattggtccttggatggggaatccgtggatctacatgtaccctgatggcctaaaggatctccttatgatcatgaagaacaaatacggaaacccacccatctacatcactgagaatgggatgggtgacgttgacaatggcgacctacctatggaagatgccttgaatgaccagaaaaggataaattacctccagcgccacatcgcagttattaaggactcaatggaattgggggcagatgtgcggggctacttcgcttggtctctggtggacaactttgaatggaccgcgggctacaccgaacgttacggcatagtctacgttgaccgtaatgacggctacaaacgctacatgaagaagtcagccaagtggttgaaagagttcaacactgagaaggctggcagcgcctaatgatgtgccatgcataaaagaccgggtctgtgtgatttgaattctatatttttatttgcacctccacaggaggtagtggagtcatgttctccaacaccgtatattgttccagttcactgttaccgtattatgtaataaatgaagtgatcaatttctctgtttc

SEQ ID NO: 14803 - DNA, 2002 bp, Zea mays
  Clone ID: MRT4577_113488C.1
cattgggtacctcgaggccggccgggaggtggtggtctttgcccaaatatccgctcgccccccttctcggcctcgggctctcactcaccctcgaccctcctcgcgcagcgcagccgcacgcgcgccatggcggcgctctgctccgcctccccggccatctccgcggcggcgtccctcgggtcgcccgcgcgcgtggtcgcgtccttcctccgcctgcgcctgcgcctgcgcgccgccaagcgctcctgctcccacgcgccggcgccgtcgtggcgggcgcgacggcgcttcgcggcgtccgcggcggaggcggaggagtgctcgggggtggagacgctgatcccgcccgacaatcgcatccccgccaccatcatcaccggcttcctcggctctggcaagacaactttactgaatcacatcttgactgctcaccatggaaagcgaattgctgttattgaaaatgagtttggagaagtagacattgatggctcactagtcgctgcacaaaccgctggagctgaggacataatgatgctaaataacggctgcctttgctgcactgtgcgtggtgatttagtccgtatgattggtgaattggtgaacaagaagaaggggaggtttgatcatattgttattgaaaccacaggtctagcgaatccagcacccattatacaaacattctatgcagaggatgtagtttttaatgatgtcaagctggacggtgttgttactttagttgacgcaaagcatgctagacagcatttggatgaagtaaagcccaagggtatagtcaatgaagcagttcagcaaattgcctatgctgacagaattatagttaacaagattgatcttgtcaaagaacctgaagtgttgtccttggttgagcgtataaggggtatcaaccacatggctaatttgaagcgagctgagtatggtaaagttgatttggactatgttcttggaattggaggatttgatctggagaggattgagagtgctgttgctgaaaagtcacatgaagatcacgcagagcatgatcatgaacaccatgagcatgagcatgagcatgagaatgaacacgaccatgaccatcatcaccatcatgatcatgatcatgatcatcatgcacatgaccacactcatgatcctggtgtttcttctgtgagcattgtttgcgaaggggagatggatcttgaaaaggctgacatgtggttggggaacctactgctggaacacagcgaggatatatacaggatgaaaggtctgctttctgtcagtggaatgccgcagcgatttgtctttcagggagtccatgacattttccagggatctcctgagagaatgtgggagccaaatgagccgcgcatcaacaagattgtcttcatcggcaggaacctcaataaagaagagctggataaggggttcaaggattgcctactgaagaaatagagtgatttcagaatagtcgggatatagatctccagttttggccttcttcgaatgtagtcagattcacatcaattcatatctgttggagtggattgaagacagtgaagcttgaactaaattctaccccaattcatccgacatatgtagattaaggtgaatccgacaacatctaaacaaggccttcatgattttgagttttgtggccgcagaacttatcctcgatatctgacatgacatgtaacgagagatgtatcgaatcgatagcattattgcaaccttgcatcctcacgaaatagtctatcatagttttattgcacggtgttgcaatgtaaccaatagagattattataggatgtctttgtctctgtgatacgaggaaatcatattgcatggtataatatactattgaatgtgttagcaatcaggagttgtttatgagcatgagaatgaacacgaccatgaccatcatcaccatcatgatcatgatcatgatcatcatgcacatgaccacactcatgatcctggtgtttcttctgtgagcattgtttgcgaa

SEQ ID NO: 14804 - DNA, 1382 bp, Zea mays
  Clone ID: MRT4577_113489C.1
ctggttattggaatccaaaaatttttatgtactcgttttgatcagtataaattcacacttcgctagtccaacaagctgacaggaacgggttctcgacggatcggacggcacacgctaccagctgccgatgtccccgacgcccctgtccatccctctataaacggaggcctgtccagttgtggtcgagacccctcgcaaccgccggccgattcgagcagcgccccagcagcctctgctccgctgcctctggcgaccgccggagcccgaggaggaggaggagggaagatctcgctcgatccaaggaggtgagtacaagatggtgagctcctcgtcgccggtggtcaacgtgtacccgctcgccaactacacgttcggcaccaaggagcccaagatggagaaggacacctccgtcgccgaccgcctcgcccgtatgaaggtcaactacatgaaagaaggaatgcgtacaagtgttgaagcaatcctattggtgcaagagcacaaccatcctcacatactgctcctgcaaatcggtaatacattctgcaaacttcctggtggacggttgaagcctggagaaaatgaaatcgagggtttgaaaagaaagttatgcagcaaacttgctgtgaactcgccttcctttccacctaactggcaggttggagagtgcgttgctgtgtggtggaggccgaactttgagactgtgatgtatccttactgtcctccacatatcactaagcccaaggagtgcaagaaacttttcattgttcacctatccgaaagagagtattttgctgttccaaggaatctgaaactgcttgctgttccactgtttgaactctacgacaatgttcagaggtacgggcctgtcatctctaccatcccgcagcagctttctaggttccagttcaacatggttagctcttagggtgatgatacaagaaaaccaatgtggccaaggcagctcttcggttgctgagctagctgatcaacgtaccctgactgattttatttcattgtgctggatttttttatatagactactactatctagacatgcatttctgattgtattgttgttgaattatcctgttatgtcgcatcccatgggcagatccagtctaggatatgtacacctgataacttagttaaaaaaaagaaaagaaaaccgaaggtagtgtgtgtatagatcgtactgtagtatgcatgtaaccggatcagatccgttttcaggtagattgctctaggttgggttatttattgcattaattgcacaagctagatgccatgtgtactattgtcgaaaaggggttgcaggtcaaccttgcgtagatgttaaatgcagtctcaaatattttatccgaaaaaaaggtgtgttctagtac

SEQ ID NO: 14805 - DNA, 884 bp, Zea mays
  Clone ID: MRT4577_11348C.1
ggcctccacagtttgggcaaaatccacttgtctccattcctccggtcatgtttatccatccaagaaatccaaactggacactcgcatgcatcccatcatctgcaattctatgtacacgtacaagagagagaaagagagagagagcctttttccctggatggtgatgatgatccatggaccaggctcccaaaactagtcctgatccagcgctccaacctcccggctctgctctgttcttcttctagttaaccgccgctccagttttttttattattattactacgatgctagtactatactgttactactagtgccgctaggctagctctacacggtacggtggcaagtcggcggcgggtctataggtggccgttgtcgccggggcggtcgccggccacggagacggcggagaggcggctagggcggggccggccggcgccggcgccgacgcggcggcggtgctgcgccgtggtggccgcgagcgcgcggcgcgcgcactggccgccctccacggcgccgatccgcaccagcgcgctgcccatccgcctgcccgccgcgcacagacggctggtggtggtcaggggcggcggcggcggcttcgtcgcgcgctccttgtgcaggctgcagcggaacgagcccgggtggctggtcggcgagcacatgcaggtccgtcggccccgcgacgacgacgagacgctgacgctgacggactgcccggcgccggagagcgagacgcgcgtgggcgaggcgtagcggtagtgcgcggccgagaggacggggccgctcggcctcctggtggtggtcgcagcagtcgccatgagaggtggcggcgagttgggttgggtggagtggagctcccaatgggctgcgcttcgttctgcttt

SEQ ID NO: 14806 - DNA, 455 bp, Zea mays
  Clone ID: MRT4577_113490C.1
ctccacgcgttcggatcatttttttttttttttttttttttttttttttttttttttttttttttttttttttttttttttttttaaaaaaaccaaaaaacagggggggccccttaaaaaaaacaaaggttcccgccggggaaaaaaccatccctttattgggggggattaaaaccttaattaatttttgggctaggcgttttacaaggggaaataggggaaaaaccctaatttcacaaaattttatagccttgaagtttatccctttttcccggggtggcttaataaggaaatagcccccatttattggctttcccaaaattccccctttttaattgggaaaagtgtccccccctttagattaaaatttaccccaccccccggggagaattcattctacttttccgctccaatggcctttttcttttcacccgctaattggggttttttttttt

SEQ ID NO: 14807 - DNA, 1187 bp, Zea mays
  Clone ID: MRT4577_113491C.1
cccgaacctcaccaaataaaaagcccgcaccacctctcctcccccgccgccaccgccggcaaccaccggatcccgggaagaaagagccagcgcccggcgaagcaaaagcggaggaagagatggtgggcgctccgtcctcgccggtggtgaacgtgtacccgctcgccaactacacgttcggcaccaaggaggccaagatggagaaggacacctccgtcgccgaccgccttgctcgcatgaaagtcaactacatgaaagaaggaatgcgaacaagtgttgaagcaatcctattggtgcaagagcacaaccacccccacatactgttgttgcaaattggaaacacattttgcaaacttcctggtggacggttgaagcctggagaaagtgaaattgagggcctgaaaaggaagctgtgcagcaagcttgcagttaactcaccttcctttccacctaactggcaggttggtgagtgtgttgctgaatggtggaggccaaactttggggctgtgatgtatccttactgccctccacatataacaaagcccaaggagtgcaagaagcttttcattgttcacctatccgaaagagagtattttgctgttccaaggaatttgaagctgcttgctgttccgctctttgaactctacgataatattcagcgatatgggcctgtcatttccaccatccctcagcagctttctaggttccagttcaacatggtgagctcttagacggtgtccagcagtttacccatatagtcatccaaaacattgtttttgtactatagactgcactgttcgcagagtggagtttaaatataggtatgtggatgagtaagctgctgagatagacttagggtgatgacacaagaagatagtgtggccaagacagctgttttgttgacttccgttgagatggatcttcaacatgctgagctagctgatcaacgtgccttgactggttttatttcattgtgctggattttttctatctagacatgtattccgtattatatttttgttgaattattgtgtttcgtatcatctcaaaaaaaaaaaaaaaaaaaaaaaaaaaaaaaaaaaaaaaacaaaaaaaacacaagcggccgcacaaaaaggtaataacttctcccgggcggcagttcgcgctggcgttttacacacacacacacacacgtttaaaaaaga

SEQ ID NO: 14808 - DNA, 1339 bp, Zea mays
  Clone ID: MRT4577_113492C.1
cgggccggccggggcccggtgtcccggaggccggccgggatccctaaacgaagccctgccccgttctgaattgtgatcgagacgagacccttcgaccttcgcaacgcctccccactccccagcaaccactgctccgccgcctccggcgaccgccggagcccgtggtggaggaggacgtggagagggaagatctcgccagatccaaggaggtggggacgagatggtgagctcctcgtcgtcggtggttaacgtgtacccgctcgccaactacacgttcggcaccaaggagcccaagatggagaaggacacctccgtcgccgaccgcctcgcccgcatgaaggtcaactacatgaaagaaggaatgcgtacaagtgttgaagcaatcctattggtgcaagagcacaaccaccctcacatactgctcctgcaaatcggaaatacattctgcaaacttcctggtggacggttgaagcctggagaaaatgaaatcgaaggtttgaaaagaaagctgtgcagcaaacttgctgtgaactcgccttccttcccacctaactggcaggttggagagtgtgttgctgtgtggtggcgaccgaattttgagactgtgatgtatccttactgccctccacatatcaccaagcccaaggagtgcaagaaacttttcatcgttcacctatccgaaagagagtattttgctgttccaaggaatttgaagctgcttgctgttccgctctttgaactctacgataatattcagcgatatgggcctgtcatctccaccatcccgcagcagctttctaggttccagttcaacatggtgagctcttagaaggtgtccagcagtttactcatatagtcatccaaaacattgtttttgtactatagactgcactgttcgcagagtggagtttaaatataggtatgtggatgagtaagctgctgagatagacttagggtgatgacacaagaagatagtgtggccaagacagctgttttgttgacttccgttgagatggatcttcaacatgctgagctagctgatcaacgtgccttgactggtttcatttcattgtgctggattttttttatctagacatgtatttcttattatatttttgttgaattactgtgttacgtatcatcccaggggcagatccactttaggtcacatgtacacctggtagcttttgttttttctttttccattttaaaaagcgaagttagtgtgtataaagcatatgcatgtaactggatcaaatcctcatgcaaatagcttgactttgggagggtttgaggtactcggtttaggcgtttaggccctctccaactgatttttcgt

SEQ ID NO: 14809 - DNA, 174 bp, Zea mays
  Clone ID: MRT4577_113493C.1
aggcaaaaaaatatttcacagagttcaactaaaaccaccccggcatgctgatcgcgcgttacacagatgaacagagcctagctttaattgcaacccattgatccccctttcaaaagagacttttaaatcggggaagggaaaaagggaagaattgaatttttcgttgacccaaaa

SEQ ID NO: 14810 - DNA, 539 bp, Zea mays
  Clone ID: MRT4577_113494C.1
ggccgcttttttttttttttttttctttttttttttttttttttttttttttttttttttttttttttatataattttttgttgtcctgaattataagaatgggaaaaaaacaaatattaagaaagaaaaaacaaacatgtttgtatataaaatatgtaaacaagacaagactatatttcttcccgcaggaacggacgggcatttaggtagttattaaataagttgatggagatgctgggtagggtcattcagattgaacaaacggactgaccaaggcagggaaaacaaaaattcttgccgggcgaaagatccctggggggggaagcaacatactgtgtgggacaaaatgcaaccagggcgcgcttacttccatacgaacacctatatttccctccggccggccggcgggggggggcccacacacccacttacttgtcggaaaaaaagtgggtggggtcccccccttcctggttgttggccgggtcagggagggggccggggaggttatcgatcgctcccccgccgcggccggtgggcc

SEQ ID NO: 14811 - DNA, 377 bp, Zea mays
  Clone ID: MRT4577_113495C.1
ctcaacaaagtaagagggtgtacccagcactagaaactaccacattaggtggactccaggcctatagggaaaggaattcctaggcaaccttgtctttgcttattttgcaaggaggctgattcaaacccaggaccttgactccttgaggacataagtggaggcaaccattgtgcccagcccacccttgataaaccttttcaacaaagtacttgatgaaagaaaggaactaccccttctattccataatagttcaattaggccttgtcctcagtccaactttgaccaagtctttagaaaagagcattaaagtctacaagttcaaataagagcaaattccctttgtgccactaaaaattataggacttccgaattccttc

SEQ ID NO: 14812 - DNA, 254 bp, Zea mays
  Clone ID: MRT4577_113496C.1
tcgttaagacgaggcggcgcgcggacacaacaggggcaggtaggaccacagggccacacagcccagggtgaagaacctgacgggcccggagcagcgcgccgaggcggcaggccacgaccaaagtctgctgccgaagcacaagggcgacgccaagcaccagggacgcgagcaacgagaattctgcactcaagctacaacgaggaccggctgggcggcaacgccacggccgacataataagcacggccaggcacga

SEQ ID NO: 14813 - DNA, 509 bp, Zea mays
  Clone ID: MRT4577_113497C.1
gaaaagggacgtttctctcgcttttaatgaaagctttcagttgatataaacttacgacctaactaaatacatctctttatggtactacaatgggcaaaagaatggtaaaaaaggggtcaatatgccacttagctccatcacaacggtagcaacaatggagatggcaatacacggttgacagaactctggcagcctgatttgttgaatggtagcccgagtagaattgaagcactcttaaaagatgagaatgctgttgctcagtttggccaatatattacttcgacagtcaactgcagatgatgcaccttcatacacagaatggtatagctgatctcaataaaaaaaatatggcagcattgttgtccagatgcaaaaatcagtccccggtccacttcttctgtcaaacatgaaacaaaattctgcctaatactcaaaatccaacatgatgcctagcagtagatcatgtcagtaagagaatggatgggctagtctgctatattgcctggtgc

SEQ ID NO: 14814 - DNA, 260 bp, Zea mays
  Clone ID: MRT4577_113498C.1
gagtcaggggggcacacatcttcaaccttaccctattactgcttgtttgcgttctcattttattcacaggggttaaacttcggatgggaacaatatttaaagggacagattcgccggccatgtaacttggagacccatctgagacccaatcctggaggcggcactacagaagggactcctggtgtgcactctttctggacaggatgatgtccaatccacggccgggtggcttcaaataggtctaacacgcacccgcgaaa

SEQ ID NO: 14815 - DNA, 497 bp, Zea mays
  Clone ID: MRT4577_113499C.1
ggccgcttttttttttttttttttccttttttttttttttttttttttttttttttttttttttttttttttttttttttttttttttttttttttttttggaaaaaaggacttttttattttggggaacccccaaacattaggaaaaaaactttttttttgaactttaacttataaaaaatttaaaagggggcccccccaatggggggttgttggaaaaacccttttgggttttcaaaaaaaagggggttgaaagggaccaattgttgcagttttaaaaggggtgccacatgttagccccaagggctttgtaaaacggaaaaaactggggttgtacaaagaagggtggggggcccacaccaactaactgggtaaaaaggaataacttggtggtggtgtaaataagccggaagatttaatgcccccccctggttgaatgaaaaaaaatagggggggaaggcaaaaaagaacttgctgaaaaggaaaatttgtgtttc

SEQ ID NO: 14816 - DNA, 900 bp, Zea mays
  Clone ID: MRT4577_11349C.1
cggaattcctttgggtacctcgcgtccggccggggtacaaaggaaaccatagcactgcttccccaagcctcggctaactgcacgtacagcccgttcctaacaaatagcaacagcaagcttcgtttcatcagctgatcaattaataattgatctcatcctcttccagccacgctaatgatggcagccagcatctcttccagcccgatgagcctccccgtcggcgaccgttggctgtcgccgaccctcttccaacgacgacagtcgcctccgacagggtaccggtggttcttctcgggtaatgcggcgctgaacatgtcgcagcgccgccgtcctcgtcgtcgttcttgtcatgccgtcgccccggtcgccaaaaccacaaccgaccgcgaccacgcgacgccccttgtcatggacgtggaccgcgtctctcatccggccgagacgacgtccgggcgctccgacgacggggaaggggaactggccgcgcggtggcgggagatccacggcagcgaccactgggtggggcagctggaccccatcgacgaggtgctccgcggggagctcatccgctatggcgagctcgcgcaggcgtgctacgacagcttcgactacgaccgcttctccccttactgcggcagctgcaggttcccggccaagaccttcttccatgacgtcggcctcggaggcgccggctaccaggttagccgctacctctacgccacctgcaacgacctcaagctcccccaacttcgggggccggaagcacagctccgccgccaacggcaagctgtggagcgagctgggcacgttcatcggctacgtggccgtgtcgacagacgaggagacggcgcgcctcggccgcgggggacatcggccgtgtcgtggcgcggcacgataccc

SEQ ID NO: 14817 - DNA, 516 bp, Zea mays
  Clone ID: MRT4577_1134C.1
gccggccggtccgggacgcactccgccactctcttacacgtgtgccgcatcttgcgccatacgctctcttctttacaactttaatttgcctatacctgctcaccatcctgcgctgctcgtggtgcagggctcctgcactcgcagctcaaacagtcctgatcaccgggtaccattgactgactacactatagaatgatggaggatgttgaaactatcagtccatcgtgacgaagcacgactggccttcccgactgctgacacatgtaacctcccccatgtggcactcatctacaaaaaatgtgatctcttgcctcgtccattggatgtgagaagcttgcacgcaaatctcatccacgaggtgcggtgtaacacgagatacatgcggatatatatattcttagtagctcaagataatacaaatcttgcaatatacttccatgtcattgaaactgacagaatgctctcactattatatatattctttacgccgaaaaataacaaaaaaaaatgccccta

SEQ ID NO: 14818 - DNA, 286 bp, Zea mays
  unsure (1)..(286): unsure at all n locations
  Clone ID: MRT4577_113500C.1
tttcagacgaacctgctgccactgcttaatgatcgcaccgcggggagaggcggtggtttggcgctttccttctcctatgctcgtgcgctcgtcgtcgtgcggacgtntcgtactaaggcggtacggttccacaatcgggagcgcggaagacatggacaaagccacaaagcagaaccggtaaagccgttctgcgtgttctagctcgcccctgcgggctcctaattgcctaagctagtggcaacccaccgcttaaatccgcgtgcccctgaagtctctcgcttctgtc

SEQ ID NO: 14819 - DNA, 840 bp, Zea mays
  unsure (1)..(840): unsure at all n locations
  Clone ID: MRT4577_113501C.1
ggngtggntggtagnaaggnanananagaccacactatgtcgatcgcttggcttccatctacaaatcccgccgccggcccgctggcgatcgctgaggcggtccccatctcgatctcccttgtccagttcttttcgccggagtgcactatgtcggcactgccgccggcagaggaattggatgcgtcgcatcagaagaagcggcggaggagggaaaaagcacagggagcaggtggaggctatagcggcatcctcggagcctcctccacctccggcaagcccggagtccaagcccaagtcaacaattccagtcgctcccgaaaccctaacctcagcggcggtgagggagtctccccgacctctgggaaacccggaatctaagtccgagtcgccgctactagtcgctcccgaaaccctagcctcggcggtgatggcagcggcggcagtgaggctggttaaggagcgcgagaggaagaatcaggtggtgccaccggcatctccgttaatggaggagcccgtgtggaaggaggaaaagcagcgtaagaaaaggaaacacgtgggcgccgcactggtggttccatcgccgccgactcctgatgcggcccaaaacttgcggatggaagccaagatgatggctgagggggcgacggtgaggaagaagcagaggcggctgaaggcggggcaggagcaatccggcgagccaccattttcaattgatgtccatccacaaggaggggaagaagctactgatgatggtggcgttggcgtcatggtcactcagtgtgtcaagaggagcaaaagcaagaactcccgggttttgaagacgcagcagacactgcccca

SEQ ID NO: 14820 - DNA, 1035 bp, Zea mays
  Clone ID: MRT4577_113502C.1
cattgggtacctcgaggccggccgggatacctctgcccttccccggtcgtcgggactttccggcctccgcttcccatcccgatcagcctgccgcagtgccgctccttccctccctctacccgtcgccgctgctgccatggacgaagtcgtcagccagattttggagaagcaagtgctgtctgccgcgaaggcggtggaggacaagctcgatgaggagatcgccgcgctcgatcgcctcgatccggacgacatcgaggcgctccgcgagcgccggatccagcagatgcgccgcgccgccgagcgccgcgccaagtggcgtgcgctggggcacggggagtacaccgaggtccccgagaaggagttcttctccatcgccaaggccagcgagcggctcgtctgccacttctaccgcgacaactggccctgcaaggtcgtggacaagcacctgtcggctctggcaaaacagcacgtggagacacggttcgtgaaggtccacgccgagaaggcccccttcctgacagagaagctcaggatagtcgtcctcccgaccctcgccatagttaagaacgccaaggtcgaggactacgtggtcggcttcgacgagctcggcggcaaggacgacttcagcaccgaggacctggaagagcgcctggcgaggtcccaggtcgtcttcctggacggcgaagggtccgcgcacgcgtcgaagcaggccgccgccgccaccaaacggagcgtccggcagtcgggcaccggcgactcgtccgactccgagtagctctcgtgtgttgttgttgttgttattattatatatatctaaatgggtacacagcacagacatgttttggttgctatgccaacaggcaacattagcattgcaaggatatgcgtcttattgggacctggaagcaaaagtggttgtggtttgagttgctgtacagtgctgcggcgctgccgtgtggatcacatctgatctgaatatctgattgggtgggtcttgctctagtggttttgtttgccctgtaccgccaggaggac

SEQ ID NO: 14821 - DNA, 499 bp, Zea mays
  Clone ID: MRT4577_113503C.1
ggaaataaggtttcaaccatttggccttcctggtggtaaacccgggaatggtggttttgggggggacccaaataatttggtttttttttctttttggttccaaggtaccattgccccttgggggtttgggaccaccggttcaggcaattttacctgccgaggttccggacctgggaatctggtccgttatttcgggatcagatcggttccgggaccaaagtgggttcccttaaaatacctttaccttggttttcacttgggcccatggatgcccggattgggccgcaattgcggaccagccttgggatggggccccgggggcagcaaatttttacccttttttttgggttccctggtccaagcaagggtttttttaaggcccccgttttcctgggggcctgatttgccggccccgggaccagttcccggccccgggattaaagtttctcttcccttaaggggaaggtaccttggggccactttacctgaaccttccacc

SEQ ID NO: 14822 - DNA, 378 bp, Zea mays
  Clone ID: MRT4577_113504C.1
atttcttcctctgagatagcgctctctcacatacaatcccgctcaccccaagatcccccagcggacgaccgcaatgccggatccgtgaacgaccacgccctccatgctgacctgcggcttgcgcgacttactgacaaccctttatgccgatgacatacacaccgacgcgccagggctccaggcactaccatcagaacatcaaccgctctcgcgctgcctctccaaccacactccacaagcctccagtgaccaagagcaaagctcgtcaacctgaaaagagacgagcaacctctgacgatgtctcgccatcgacactcgtcgctgctcatagcgaagatcgtccctgtcgcgttccagcatccggcagacgtgtcttgc

SEQ ID NO: 14823 - DNA, 957 bp, Zea mays
  Clone ID: MRT4577_113505C.1
gggtacctcgaggccggccgggccgggactttccggcctccgcttcccatcccgatcagcctgccgcagtgccgctccttccctccctctacccgtcgccgctgctgccatggacgaagtcgtcagccagattttggagaagcaagtgctgtctgccgcgaaggcggtggaggacaagctcgatgaggagatcgccgcgctcgatcgcctcgatccggacgacatcgaggcgctccgcgagcgccggatccagcagatgcgccgcgccgccgagcgccgcgccaagtggcgtgcgctggggcacggggagtacaccgaggtccccgagaaggagttcttctccatcgccaaggctagcgagcggctcgtctgccacttctaccgcgacaactggccctgcaaggtcgtggacaagcacttgtcggctctggcaaaacagcacgtggagacacggttcgtgaaggtccacgccgagaaggccccctttctgacagagaagctcaggatagtcgtcctcccgaccctcgccatagttaagaacgccaaggtcgaggactacgtggtcggcttcgacgagctcggcggcaaggacgacttcagcaccgaggacctggaagagcgcctggcgaggtcccaggtcgtcttcctggacggcgaagggtccgcgcacgcgtcgaagcaggccgccgccgccaccaaacggagcgtccggcagtcgggcaccggcgactcgtccgactccgagtagctctcgtgtgttgttgttgttattattattatatatctaaatgggtacacagtacagacatgtttggcaacattagcattgcaaggatatgcgtcttattaggacctgaagcaaaagtggttgtggtttgagttgctgtacagtgctactgctgccgtgtggatcacatctgatctgattgggtgggttttgctctagtggttttgttt

SEQ ID NO: 14824 - DNA, 409 bp, Zea mays
  Clone ID: MRT4577_113506C.1
cctagggacacggccgtcagtgtgctaggtttgtggcctttgcgtggtggggggggggggcgcgggtcttttgctcttaagttctggggacgtggcatgccgggaggacgagatgctgcgtgtgttttggtgtgtggtgcggggatgcggtgcggcgttcgttggcctgcctgggggatgttcgtagatgggagaactctgaaacggggggggagtgctgacgatggttcatctgctatggctggtgaggttggctggtgtgctggtgactgaggggtggggctgctgcctctagctttgaggcgtgggatgtgggtgatgtgcctgctcgggcgggtcggtcgagggggcgagtgtgtgcgggtatccatggacactgggggggcggtcgagcgtggcagggtagagg

SEQ ID NO: 14825 - DNA, 263 bp, Zea mays
  Clone ID: MRT4577_113507C.1
cttccccacggcgtcttcgtcgtttttgcttcctgcctccttcgcccgagaaaggagagagtggggagcagcgaggagggcgttaccgcctacggcgagaacacctacgctgagctggagagggtgccccactggtcgagtgagaagctgaggatctcgattactgaggactggcggtttcattggagcccacatggctcgccgacagaagaacgagggccattacatcatcgcctctgactgcaagaagaacgcgcacacga

SEQ ID NO: 14826 - DNA, 255 bp, Zea mays
  Clone ID: MRT4577_113508C.1
gcggccaagatgaatgcatttttcgggtcgttcattcgtatcagtccgtcgttgggcagcgctggtctgtttcctactttggcggtacttggccgctccttcctcttcgtgtgcgcatgcctgctgtttttcctgccccttgctcgggggggggggggccattatttttttttcctccgcccgggtgcttgggtgggggttggggcttgcgggctggccggcctcctccctgcggctgtgcggttgggggggtcg

SEQ ID NO: 14827 - DNA, 520 bp, Zea mays
  Clone ID: MRT4577_113509C.1
cactcctatgggcgattgggaccctcgaggccggccgggattctaaactctactaccgtacagtctatgcaacgcctgaagagcacggcgctgcccggagcaggatgcgtgtaaggtgtaactaccgcctactgcagctcaggttgtttctcatagtcttctcttctgccgtccatccggcctgcgcgctcgctctcctgctctcctgcgccaactgggcgaccgccgacgccgacgccaacgccgacgacctacgccaggtgctgggatttttgtcggttccttccgtccttcggcagctttcgtcgcgtccttcgccggcgacgagcactcaccagtctgcacaaattattgggtgtacacccataggtccgctcctgaagaagactgggatattttgcatacacagaggatcatctgtaagttaaatcttctgaaatctggatccaacatttgtaccatactggtgaatatactccttgctttacttttgagccaaaaaaaaaaaaaaaaagcggcc

SEQ ID NO: 14828 - DNA, 816 bp, Zea mays
  Clone ID: MRT4577_11350C.1
atcgaggcttctcctggtagcctctccgtcggagcgctccccgccgcctgcacatctccctggcagtggcggttgcctccaccctcagcgccgcccagatccctcgtcctcacctgttctctatcgcggaccctgatctgtccatgctcaagaatcaatccagagttaagttgtatggatcctgctgatgttccagaagggattgatcccaagagtgcgtgcagagtggaggtcactgtcaattcctacttcactatgcaagatggtagaaaggaatataatcgaggcaagacagtaagctatgttgttgattcagaagaatactcagttattgatttagagaaagatattgcttcagaatttaaatgggggagcgaccaacagcctaatttctgggttctaacaaggggtaatatgacaagcaagttggcttcagatgcacaacttcttgacttgttaagggcatctagagtagtgaagttattaatgatagtgggcaactgtgagcacaatgtaggacatgggcatattcctgctacatggaacatacaagaagagatacctgttgcagtgaacatagaagaagagatgcttgatgcaatggataataatttggaggaagcagatggaggatttgcatgggcagaaatacctgaatatggggaaacaactgcagggccaccaatggctaaagaggaagaaaaggagcactttatcactgttgggtgcgatcctaatggagatagccagctggaataatgaagaatggaggtactttaaaagtgtgatcatgtagctattgatccactgcaaaat

SEQ ID NO: 14829 - DNA, 485 bp, Zea mays
  Clone ID: MRT4577_113510C.1
gtcgacccagcgtccgggaagctaagaaaaaggcccgtctggaacgatttggtcagggcacaaatgttgacaaggcggaagaagaaaaaagaaaggcccgagcagcaagatttggagatacatctagtggatcagctcaggaaaatggcaagacagctcgaagctggacgcagctgctgttacaggcacagcttgatttcagcagtccggctttgatgaggtctcagatattatccgacttttggtgaagccatagcttgtacaccactaactgcatgaacgggcatcacgtgtttcccagtcatgctgagtgatgtttaccgtgtatgactttcttagttgctgggcactggcagtgtggctagatttgctgcctggtttgtggatggccatgtactgatgtaccttcggttgccgataccatttggtggatgatttcatttccatgtaccccagtttggactagttaactgttagaagacaac

SEQ ID NO: 14830 - DNA, 706 bp, Zea mays
  unsure (1)..(706): unsure at all n locations
  Clone ID: MRT4577_113511C.1
acggtgcagatcgtggatcctttccactccactccctcccttgactccctccctctctgtcaccaaccatacaccatttctagcaagctcaagcaccatccaataccaggctaccaagaggaactcggcggaagagatctcatcggccgacgatggcgccgcgacggagcgccgcggagacggcggacgcggaccgagcgcggctgcaccagctggggtacaagcaggagctgaagcgcgggctcagcgcggtctccaacttcgccttctccttctccatcatctccgtgctcatgggcgtcacggccacgtacaacacggggctgaggtacggcgggccggcgtccatgacgctggggtggctggtggtgacggtgttcaacggctgcgtggcgctgtccatggcggagatctgctccgcgtacccgacctccggcgggctctactactggagcgccaagctcgccggcaaggagtgggcgcctctcgcctcatgggtcaccggctggttcaacatcgtgngacagtgggcgggcacaacgagcgtggacttctcgctggcgcagctcatccaggtgatcgtcctgctcggcaccggcggggccaaacggcggcggctacctggcctccaagtacgtcgtgctggccatctacggcatcatccntcgtctgcatgggctcatcaacagcctcccccatcgctggc

SEQ ID NO: 14831 - DNA, 527 bp, Zea mays
  Clone ID: MRT4577_113512C.1
gaattcccggctcgacccacgcgtacgaaatctctaatactagatgggtgccggcgctggcgctgctcctgggacgacgagaacacgacgatcagccgcgcgcgtctatatactgcagtacaagaacacgacggaggcggcggtggacgcggcgcgcatcatcctccggcagtgcgcgctgtccggcacggtgaagcgcgtcatccacacggcctcggtcacggccgcgtcgccgctcaaggaggacggcagcgggtacaaggacttcgccgacgagtccaattggacgccgctcaacctctcctacgaattcaccaacgcttacctggacgtacgtaatacagtgctatataggactaatctatatattgactactcatgtgcatgcacgcgcacgcaggactacgtgcggtccaagacgcttccggaggaagagctacctagccacggattcttcttcctcttctccaaggaagaccaccggaccccgggcgttggaggtggccaccctagcgtgcgggctcgtc

SEQ ID NO: 14832 - DNA, 149 bp, Zea mays
  Clone ID: MRT4577_113513C.1
gggctccgaaatttaccccacatgtatccagcaaacattttaccaaccctatctaaagcaagccttgccaaccgttaattgccccccaaaacacccccccctaaaacaaaacaaaccactgcccctcaccaaactgcaaaaaacccagg

SEQ ID NO: 14833 - DNA, 351 bp, Zea mays
  Clone ID: MRT4577_113514C.1
gcacgcctgcgtgagctgggcctgaggatattggtgggttgtctagcttagttcaccgcggccgtccgttccaccagtgtgcccaagtactactacaggatgtgacaagacaacacgggcctttatggatgtcggctgacataataagtgtggctcgtcacaagcgtgctggtgctggaccaactggcgcgaagcgtggcctactgcttttcgtactgctctgcgacgaatatgaatctttttctttggagcgctgtacatctgatcctacaaccaggtagcagaccctctttcacactcatggctgtggagctgagctggacgactaactctactctatcaagatgaccg

SEQ ID NO: 14834 - DNA, 147 bp, Zea mays
  Clone ID: MRT4577_113515C.1
ccggccgggggcgattcgcttccttcctacctcctcgcgaatccgtctgcatccactagtctgctggccctactgtagcgtctgagaagaatcacggagacgaacgaggcgttcaagctcacgaagaagtggacctccaagtccctg

SEQ ID NO: 14835 - DNA, 115 bp, Zea mays
  Clone ID: MRT4577_113516C.1
gaccgacacgtccgtacagctgcgagaagacgaataatgggttcgagagtgttgtccaaaaagtattcttatggagggtgtgctgtaaagatcaaatatgatagtgggtatatac

SEQ ID NO: 14836 - DNA, 230 bp, Zea mays
  Clone ID: MRT4577_113517C.1
gagtcatgcacacggactggttatgaggttacttgagcatgcttctagtgcgcgtcgatgtatgcagacctcacagaggttgtggtcgcggggacaacttattctcctgggcgcacaacgcacatcttaaggccatgcttgagaagcttcgggctaagcaccccaatgtgagaatcatatatggcgatgactacactccagtcggccagttcatgcttaagcctgagaag

SEQ ID NO: 14837 - DNA, 459 bp, Zea mays
  Clone ID: MRT4577_113518C.1
aaggtttgctgtgttgtgtctcagcaatggagctggcatcaacaatgtccgtggcatggctctggcggcggccatcttcgtcgtcctctgctccgtcgtcgcctcggcacgtggccgccgcgagaaggccctgaagctcccgccgggcccgcggggctggcccgtgctgggcagcctcggcgcgctggcgggcgcgctgccgccgcaccgcgcgctggccgcgctggcggcgcgccacggcccgctcatgcacctccgcctcggctcctaccacacggtggtggcctcgtcggcggacgccgcccgcctcgtcctcaggacgcacgactccgccctcgccgaccgcccggacaccgccgccggcgagatcacctcctacagatacctcggtatcgtgaacaccccgtgcggcgcgtactggcgcatgaagcgcaggctctgcgccaccgagatcatctc

SEQ ID NO: 14838 - DNA, 840 bp, Zea mays
  unsure (1)..(840): unsure at all n locations
  Clone ID: MRT4577_113519C.1
gacgacttgactacaaagcccagatccattcctcggggtcgggcggccgccaatcccgccgcataccgctggccgagtcctcgtcggcgccggacggggtgaagtgaaggccgactgggagaataagaattttgtggatcttatctggtctccatcatggaacatgacggcacgacgaacctggctgtcactgaggctgtgcgctcggtgcagctgctcaagatcgacggctactgcgccaccgctaccatgggggcatcggagttcatcaaattccgatggcacatcgatggccacgagtgggagagggacgacgacaagctgagggtgaacctgagctgccggcttgtatgccccagccccaccagccagcggcggcatctcggtacctgctggtccgaagagaagagggtgtcccatgtgtttgccagcgactcgaaatgctcgcctgaacttctcctcatcctgaagcacgagctaccatcgtcaggttatctcgtggacgattcactgaccgtggaatgcacggtcaccgtgctacgcgacttggacgccgccacggataaggcgctgtcgtccctgccagtgccgccaccctcggacctacaccagcacctcggcgacctcctgcagagcgaggacggagcggacgtcacgttccgtgttcctccggggagtccttcgccgcccacagggccatactcgccgcagggtccccctgtttttaaaggcgagttcttcgnnaggcatggaggaacgcagctccgcttttctgtggaggtcaaaagcatgggaagctgcgctgtgtcaggtccatgcttcgcttcatctataccgaca

SEQ ID NO: 14839 - DNA, 500 bp, Zea mays
  Clone ID: MRT4577_11351C.1
gagctgggctgggctaagttgggctgggccgagccacttcgcggattgaaaacccacgacgcgcgcggaccactaaacagacttaaaacgcgaatcaaaatccggaacggaacgagacgaacactcaacctcagacaaagaaatgtgcttcggcatgatgcaacacccatgacacttaggttttggtttatacatgacacggacacctgccgctatactggtttgaaattgggaagaaggagcaaacggggaaagagaagagagagtaacgcccgaatttggtgagagcaaagaagaaaaaattctacccccaaattcagggcgttacaccttgtctttgtcgaatactccatttccctttcaatctactacttagtatagaaatgcactcagaaacacttagtcgtaggcttggttcaagaataatgagaaatatgcattggtaccaaaatgaaggatatatgatcaaaggtatatgtaaggcccaaaatttgcataaa

SEQ ID NO: 14840 - DNA, 216 bp, Zea mays
  Clone ID: MRT4577_113520C.1
ataacccccgtttccccccaccacagatattatgatgcctgccaaccaaaggcgtactgaagtactactcatcagacctgcgctaaccacaagacagcttattgcgacctgattatatcctgacacgaagccaaagggcccgtgcacccttaccgacggctaaatattgaattaccaggtcctgaaaacatactttagctgcaagctactaaaact

SEQ ID NO: 14841 - DNA, 832 bp, Zea mays
  unsure (1)..(832): unsure at all n locations
  Clone ID: MRT4577_113521C.1
gccggccggtccggggacgacttgactacaaagcccagatccattcctcggggtcgggcggccgccaatcccgccgcataccgctggccgagtcctcgtcggcgccggacggggtgaagtgaaggccgactgggagaattttgtggatcttatctggtctccatcatggaacatgacggcacaacgaacctggctgtcactgaggctgtgcgctcggtgcagctgctcaagatcgacggctactgcgccaccgctaccatgggggcatcggagttcatcaaattccgatggcacatcgatggccacgagtgggaggtccgtttctatcctgattactggtacttcttcgaggacgaggactgcttcagcacttatggcgacgacgatcactccgagtgggtaggtctgaagctcatccttgtcagtgaaccccagagggacgacgacaaggtgagggtgaacctgagctgccggcttgtatgccccagccccaccagccagcggcggcatctcggtacctgctggtccgaagagaggagggtgtcccatgtgtttgccagcaactcgaaatgctcgcctgaacttctcctcatcctgaagcacgagctaccatcgtcaggttatctcgtggacgattcactgaccgtggaatgcacggtcaccgtgctacgcgacttggacgccgccacgnataaggcgctgtcgtccctgccagtgccgccaccctcggacctacaccagcacctcggcgacctcctgcagagcgagnacggagcggacgtcacgttccgtggtctccggggagtccttcgccgcccacagggcatactcg

SEQ ID NO: 14842 - DNA, 328 bp, Zea mays
  unsure (1)..(328): unsure at all n locations
  Clone ID: MRT4577_113522C.1
aactncaattaacgttttgttgtctcaaccgccgcagcgaaagggaaggagggcttgtccaaaagttttttatcattagcaaacgccaaaaccgaattaacagaactacaatacagcatgcgcatacatacctaacgtaggaaacaaaaaaacttaaactacgtcatctgatgcataaacatacacaacaaagtcaccagccctagaggcattcaactcacgtgcacaagaaacaaagcacagaaaggacgggcttaaagaaatagtatagactgcaaacacctgagagcaccaaaaactggatgtcaaacaatacaaaaccctaatc

SEQ ID NO: 14843 - DNA, 529 bp, Zea mays
  unsure (1)..(529): unsure at all n locations
  Clone ID: MRT4577_113523C.1
gggggggggggtgaatagattaatatgtgggtggtagtaaatagaagtattttaggttttggatnttaaaaattattttggaaagaggtgtggantgatttttttatgatggttatataaaaagattnattattttnataaggggggggggggggaangaataaagagtgatttttagattgatgggtggagttgaataantaattgaagaaatgtttttgatgtaatngggaggaatgaatagaaaaagtaaatgtgttatgatatatgagatggggtttggttattgatagagtgaatagatntgagatttgttgaaatatatnttntgattnaaaatngtggtgtaaggtgtatatgatattgttttggttatggaatagatgaaataaagtgtaaaatggatttttgttgaagaatgaaatnttattggaattgtgtagtanagggtttggaaggatataagatgnttggatatgatgaaataagatgaattgagagggtattttggaagttaataatgatgttg

SEQ ID NO: 14844 - DNA, 403 bp, Zea mays
  Clone ID: MRT4577_113524C.1
cggaattccggttggaccaacccttccgttcctttactcaaaccttttccggaaccgtttcaacttctttccttgacccttgaacacagggatggactggttttttaaagggataaagttaaggccaccctccaaagacttgttcaaattgacaagttaatcgatttgttttttcgggggttccaaagggggcccttgtaaactgctgctaactagtctgtccggagttggcttaaacaaccgttagtcttatggagctgttcgtcggaacaaaaatcgcctccctgtttttcttctgggaagtttggattgattaattcctaataaaccggggcatagttggttttaatgtaaagggcttatagcagggcttggtaagcattaatcctgctggtttccaaat

SEQ ID NO: 14845 - DNA, 373 bp, Zea mays
  Clone ID: MRT4577_113525C.1
atgcgggacgtatatttggcaagacgtaccgccggtacgcggggacggttaccaacaggtcactcaagaccgtccacgagctacacatgggaatatgcaagctctacggacaggtgtggggcgtggacatggtacggaacgggttactgctgccgagctggctaccagcgctgctcgccggcaagagcgccaggttcgtctacgtgcaggctgtgccaccgggcgacgactgggtcaccggctacaagctcatatgagagggcgccctgtggtgaacgtcctgtcctgaggagcggaccctgcccctgctgagcggtgtgcgtgaaggagtgaaatgaaggttagcaggttgattataagatgacaacgagcg

SEQ ID NO: 14846 - DNA, 361 bp, Zea mays
  Clone ID: MRT4577_113526C.1
actctaactagttcgcctcctgtctgctgtgcagaacattaccgtgcactcgcctccctcgtcaccattcattcgctcaccccaccaaccaccgaggcagtacaagcactactcactattgctaatgctaacaagcacatgctggtcattggcctcagagattaaatccatcctcagaaacttgacggcatctacatgatggatgtcgtacaactcacggtacactttcaagtgccttgggtcaaaacagcgatccttacaagccgacgtctctatcagcatcaacagtatcactttcacaaatggctgcaatcctgcccaacgcaaagtacactttcttaacgactcagcagctgtcttg

SEQ ID NO: 14847 - DNA, 109 bp, Zea mays
  Clone ID: MRT4577_113527C.1
taggcccttcggggtagtcttgaacaagccaatcaaagccgttattcttggcattgactatagctgcaccggagcaccgggctaggggaagaacggagctgtcggactc

SEQ ID NO: 14848 - DNA, 596 bp, Zea mays
  Clone ID: MRT4577_113528C.1
cctgttctcatatgctgctttacccctctctctatctttctacgtccagctgcgtgcacatcgcacatcggctcctgaaatcccgaccaccgccctgctcttcgacggcttcggtgaggccgctcagatactactgtgatctcgcccagcctcaggttcctattccatcgtcgcaattcggagtattctctcgtccctatccccactgcagcacacggcacagagcgtaaacactttgcccgacaacgcgacatgcagctttaatgccacttccttggaggacgcgttagagcgaggttgaatctgacgaagacgaaagacccgctcactcgcgccggctcctcatacgtgaaggtcggcagcctgtacccaatgttcttcctcatcaccggagggtagtcccccaacaccatacgatgcatgaaccatccgatgaggaaatcgaccatccttgcagctaccgcgacatcggtgtgagtctgagtcctgagatcgtaccaccaaccaagcaagattgtgcctgctccatgaagagcaggcgaggacgagcctcccacatcctgggcgttggtgcctgacccatcttctcaagagat

SEQ ID NO: 14849 - DNA, 462 bp, Zea mays
  Clone ID: MRT4577_113529C.1
ggtacacaccaaatctggcatcaaaaaacattggaccacccccggtctcgaatatttggcgcccgctaggtcatttttgaactaaacagggacaaataaacaaaaaccgaagggggagtttatagggatcaaaataattcacaacatcacaaatttttttacctacatggggaaagccataaactaacactgggtttattcccacataggcatggaaaaaaaatcaactcacagggcttttttccacactcacacaaactttgggtcaataggcgccacgaaactcgctggaatcatccctcccaggagggaccacctttttttccacccgttctggacccttatcctccttggacttcaccggttaatcaattggtagacccccgagggctccagccacaggacccaccggaagcccagggcctggtccataccttccggtcccactggcactaccagggg

SEQ ID NO: 14850 - DNA, 315 bp, Zea mays
  Clone ID: MRT4577_11352C.1
actcgagccggccgggccgggtattccctcgcccacttctgcagcttctgcttgcgtctgtgacatatggacactacagatgagcgacacagacatctactagagagagtagctacgtgggcctcgaacaaagatgttgtccgcgttcaccggtgaggctggtgcacacgtcgactctagctgagtggacaccaccgccgctactgcatctccagatacgaaggcattccacctcgggggatagcttactttccgcatacaagccggtcggatgacttcacttcacttcgaggatcctcgtggactccaccggct

SEQ ID NO: 14851 - DNA, 148 bp, Zea mays
  Clone ID: MRT4577_113530C.1
ccttgggtcgctttactttttttttttgtggtttcaatggggcccaaaaaataatctttgatttgcgggtagctcgtgctaccctaattctgcctgaaagccgagaaccgggtcgagggctccctttcgttccatagcccttatggcc

SEQ ID NO: 14852 - DNA, 721 bp, Zea mays
  unsure (1)..(721): unsure at all n locations
  Clone ID: MRT4577_113531C.1
ggcccggccggggaccgtgactggccggcaattcgacgactgtattttcatttcctcccattatcttctctcattcacgcaacgtacttttaatatctctctccgtttcttccaccatccaaaatgtccgaccaggttcaagagattctcgaggttccctccgagttcgtcagagacggtgttcaattcatgcgacggtgcactaagcccgaccagaaggagtttctgcgactctgccaagctgttggcgttggtttcctcatcatgggcgccgtcggctacgttgttaagctggtgcacattccccttaaccacgccctcgtcggaagcgcataaacggtcacgcgatacgttgatgagattctggatggcgacttgataatccaaaaacccgcaacacgggaacgaggacaatcacacctttcttgcttgcgggtatgcttaacggggcggagttacatgacattatggcgggcacgcgacacacttctacgctgaaattcgaccgagcgccatgggagatgagaaggaggatgtgctttcacgtccaaggcgctatttgtgtggattgagaaatatccactacgaaaaagacggctacagtgattaattgtacaaatatatccattgttatttctgcaaaaaaaaaaaaaaaaaacccgtatgctgaattctgatacaaatcgggctgttccaaaaaaanaaaaaaaaacccgcggcc

SEQ ID NO: 14853 - DNA, 1189 bp, Zea mays
  Clone ID: MRT4577_113532C.1
acacagcgttgcgcgagagagcttattgcaaattactctgtggaccgaaccggtcggtcggaagtcggaacaataagcagcagatagagagagagagagagagagatggggaagctgacgctggggcaccgcggcgaggcgtcagagccggacttcttcaggggcgtcctcggcgagctcgtcctcaccttcctcttcgtcttcatcggcgtcggagccgccatgaccgacggagcgacgacgaagggtagcaccgctggaggcgacctgacggcggtggcgttggggcaggcgctggtggtggcggtgatcgcgacggcggggttccacatctccggcggccacgtcaacccggccgtgacgctgtcgctggccgtcggcgggcacgtcacgctgttccgctcctccctgtacatcgccgcccagatgctcgcctcctccgcggcctgcttcctgctcaggtggctcacgggcgggctggccacgccggtgcacgcgctggcggagggcgtgggcccgctgcagggcgtggtggcggaggccgtcttcaccttcagcctgctcttcgtcatctacgccaccatcctggacccgcggaagctgctcccgggcgcctgctcccgggcgccggcccgctgctcaccggcctcctcgtcgggggcaactccgtcgccggccccgccctgtccggcgcctccatgaacccggccaggtccttcgggcccgccgtcgcctcgggcgtctggacgcaccactgggtgtactgggtcggcccggttcgccgtggccctctcgccgtgctcgtctacgagtgctgcttcatggcggccgctcccacgcacgaccttctcccccacagcgtgcatcgtgcggtgggtagctcgcagtgtgtcttggtttgagctgtcgagggtttgtggttgattcatgggtgtgcagtgtgtgcacagttgcaaacgacttatgggttgtttttacctcatgttttcctttgtttgagaaggctacttctcaagaacaaaactgcagaatttcttgtgggtctgtatgtatgggctgttttttcctcatgttttcctttgtttgaaaaggcttcttctcaagaacaaaactgcagaatttcttgtgggtctacttgtatttttgcataaaaaactaagcttgaaaatatgtttaaaaaaaaagtcga

SEQ ID NO: 14854 - DNA, 365 bp, Zea mays
  Clone ID: MRT4577_113533C.1
ttttttttttttttttttttttttttttttttgggtttttttttttggttttggtttttttttttttttttttttttttttttttttttttttttttttcaccccaaattagcgaggggatctgccacagatgagggaaaaaggggaaacaaaagtgaaaaacatgggcagacttaaaatgaacctggggaaataaacatttatttttggaatacacaagcaggaaccatagggaaaatcggcgttacagacccgggtaaaaaaaaaacccccttttgggggggggggcggggcaaattctttttaaaaacaaaaagcggcaaagctggggaaaaggaaaaaaaaggctcctggttacaaggttt

SEQ ID NO: 14855 - DNA, 335 bp, Zea mays
  Clone ID: MRT4577_113534C.1
gggggggaaaacctaaccccttatattaacacacaaaaactaccgattggccaccaccaaacatgggcgaaacagggtttacaaagggcccaaaagggggggataaaaatgaaaaaaaacaaggtacccttaaacaaaaagggaactggtacatggaaagggagggggccctcaaaccccccaaaaaaaaaaaaaaccctttttcgggttaaaaaccccagggaaacaaaacccccccccctcttttttgggggttccacaggtacctcttgggaaaaaaaagcttggggaaaagtaaaaaccccccattaaaaaaaggggggggacaacaaaaa

SEQ ID NO: 14856 - DNA, 712 bp, Zea mays
  Clone ID: MRT4577_113535C.1
gttaaccatacagttttgaagcagctaagtaaggtggactgcattgtctatgctatgggatcactctttacatcagtctgtccatcactggtattacgtggcattggtgagactatagcatcaagatccatccccaagatacttcttctgaatggtccatatccaagagagactgctgggctgtctgcctctggctttgtcactgcaattaccgattctctaaatcggacttatggcgatcctcacaaaagcttaaagaatcataccaatgactatgtaaatgctatattggttccagaaggaggccaagttcctttagatattgaaaatttggcagctcagggaatttttcatgtggtaaccgtgaagtctattcatgaccctaaagttggcgtcatatttgatgcacggtcattgatccaagccctaaccattctcatatctgaacatatggatatgtgtgtatcaaaagttcagaacgtggtcatgtaactgaaaatgtaaaagttgtaagctgatctttcaagtacaaaaatgaatgtaaagtccctcttaactttattgttttactaatcgatccatagtgcgaatactcatgtttttatttcagctagcactagtgttgcaattctgcctgacttgacatgattaatgaaaaatgagacatgtatttttcaatttctgtaaaaaaaaaaaaaaagggcggccgccg

SEQ ID NO: 14857 - DNA, 157 bp, Zea mays
  Clone ID: MRT4577_113536C.1
attttacagagtatgcaaatacagtagcaatttgtgttgttctctctgttaattaacagtgtctaacaatatattctacctctttacaacatggataaggacacatgtttcatttgattgccaaaaaaaaaaaagaaaaaaagaaaaagaaaaagag

SEQ ID NO: 14858 - DNA, 165 bp, Zea mays
  Clone ID: MRT4577_113537C.1
gggtcgcgtgggctgcacatgctgttcgagagagagagagagagagagagagatttagatgttgcggttctgacaccacaacaacaacgaggctgctccctctgcgtaagaccctgacgaggtgtttaatgatcttcatgtcgggccaacgagaactactgtctg

SEQ ID NO: 14859 - DNA, 259 bp, Zea mays
  unsure (1)..(259): unsure at all n locations
  Clone ID: MRT4577_113538C.1
gacacacacacacaagacacaacacaactcgtaggcatgtgagcgtctctcctcttgctgtcccacgcaccgcgccaaggaaggcacgagagagatcgccgntcctcttctctccgtcggtggtgcggttgaccgncctcctcgagcgagatctcgctgcagtccctcgagatctggccacagatctacccgacaagatggtgaatatctgcggcgggggggctgtctatgtcggtgcctcacccatgcctttccctgc

SEQ ID NO: 14860 - DNA, 292 bp, Zea mays
  unsure (1)..(292): unsure at all n locations
  Clone ID: MRT4577_113539C.1
gcttccctgtagggcgtgaggggccgannagcgaagcggnagctgagcactcggnacgagnagtngcatggccanntggcgctgggcggnagcttcctgcactcgtgaaccctgtgcgctttcttccctcgctttcctgcgctttgcgtcctctcccgngctgctttgcctgttgcttccttcttcagtctcagctcagtcgggggcgtgcggtcnnggcggcgccacttctagagttctgggatcagacttactgggcagtattgggcgaactaactcttcctctgcagct

SEQ ID NO: 14861 - DNA, 608 bp, Zea mays
  Clone ID: MRT4577_11353C.1
ccggccgggatgccccctatacgcgcccatgttgcagtagtagccgcctcctcccccgcacccgcatctgcacgaatcgggggagacaacagctcatgtccatcagcagcactcaactgacagccagggaagcccggactaggtagctagaagcatttgcagatgaacttacataacgataggggacaggcatagtatttggaaatatcatcttccttataaaagcaggaccaagggagacacgacccggtgcccccacctcccgacttattatcccttgatcctctcctccgcctacacctacatctccatctaccgaacatccgacccctccaactaccgttgccgacgcatgaacgacaagatgcgtgagggtctgccgaaaccctcttcgctagggcagggatcgaccatcactcaacactgaagcccgatgctgatcggcgaccgagagcttccatgtcattgtgatctgatacgtgagactttgattatgactatgcataagataccatctctgattaatagtggatgatgagatgtatcttattatgactatggatgacacttttgcgatgtaatcgatgatgacatggcacctgatattg

SEQ ID NO: 14862 - DNA, 313 bp, Zea mays
  Clone ID: MRT4577_113540C.1
gtgacaaactagcaccatagaaagcacaactgtgcaccaacaatggcaggcaaatatatcaggcctaattatgctccttgtacttactgcaagtgctgctactgcgaccattgtaacgcaatgctctcaagctgatataacttgccttaataccgcgaaccttttaccagcggagtcttcggtgtgtgaaaactcaattgttcaaccctacaggatccaacaggctatcacagctggcatattacctttataacccttgtacctctaacaataatgagccctattacataaggtaccatttggtgcatctatt

SEQ ID NO: 14863 - DNA, 171 bp, Zea mays
  Clone ID: MRT4577_113541C.1
ctctctcgtcctcgtcccgactcgcagtttttttatgatggtgaccaacatggtggagggggggtctaacacggtcactaagccgatcgacaccatgctcgccgtcatgggcgacagtcgacgttgactacgacgtgctgggcgctgaccctaacgcagcgccgcttttag

SEQ ID NO: 14864 - DNA, 290 bp, Zea mays
  Clone ID: MRT4577_113542C.1
cggtcgagcacgcgtctagcactatgcaatgaactttacacagtagtccgtgaagttttggatgccattcctccttttgagactacacggtcaggatgcagtcctgggctcctggcattgagttccttgaggatatctgttgagaaagccaagaatttactccagtattgctcagagagtagcaagctttacttggctgttacagcagaaagcgttctaacaaaatttgagaattcaagacaaggacttctggaaagccttcaccaagtagaagaaacaattccggaagc

SEQ ID NO: 14865 - DNA, 1665 bp, Zea mays
  Clone ID: MRT4577_113543C.1
ttgattgcctcgtcgccggccgggaactccatcgatcgatcaagcagctcgctgcaagttgtgaacgaacataccactaccatggcgtcgtcttcatcggcattgttggcgcttccggttcttgtgctttctattgccttctccattgttcatggtactgcagatgacgcgcaaaggtacatggtcgtagcatctagttccctggagccatcagaagtctgctcaggccataaagttacctcatctaagaatggtgccacggtaccactggtccaccgtcacggcccgtgttctccggtcatgtccaaagagaagccttcgcatgccgaaacactcggccgagaccaactacgtgccgccaacatccacgcaaagctttcttctcctcgaaacagtagcgccaaagagctccagcagtcgggcgtgactatcccgactagctccggctactccctgggcaccccagagtacgtgatcaccgtcagcctgggcacgcccgccgtgacccaggtcatgagcatcgacacaggcagcgacgtctcgtgggtgcagtgcgctccgtgcgctgcgcagtcgtgctcctcgcagaaggacaagctgttcgatccggccaagtccgcgacgtactccgccttctcctgcagctctgcccagtgcgcgcagctcggcggcgagggcaatggctgcttgaactcgcagtgccagtacatcgtcaagtacgtcgaccactccaacaccacggggacatacggctccgacactctcggcctcaccacgtccgacgccgtcaagaacttccagttcgggtgcagccaccgcgcaaacggcttcgtgggccagctggacggcctcatggggctcggtggcgacacggagtccctcgtgtcgcagacggctgcgacctacggcaaggcgttctcctactgcctcccgccgccgtcgagctccactggagggttcctcaccctcggcgcagctgcaggtggcacgtcctcgtcgcgctactcacgcacgccgctggtgaaattcaacgttcccacgttctacggcgtgttcctccaggccatcaccgtggccgggaccaagctcaacgtgccggcctcggtcttctccggcgcgtccgtcgtcgactccggcaccgtcatcacgcagctgccgccgacggcgtaccaggcgctacggacggcgttcaagaaagagatgaaggcgtacccgtcggcggccccggttagcatcctggacacctgcttcgacttcagcggcatcaacacgatcagggtgccggtggtgacactgactttctcccgcggcgccgtcatggacctcgacgtttccggcatattctacgctggctgcctcgcgttcactgccacggcccaagatggcgacaccggaatcttggggaacgtgcagcagcgtacgttcgagatgctattcgatgtcggagggagcacccttggattccgccctggcgcttgctaaatttctattaataatttcaagggaatacgggaaattttcgtcccaaaaagtaacgtatttgatgaaaatccatccgaataagcatgaaccatgaatgaacatttagatgatgtctatcaacaacacggctttcgaaattttaatcaagactataaacagatttaatagtctctggtgcagcat

SEQ ID NO: 14866 - DNA, 423 bp, Zea mays
  Clone ID: MRT4577_113544C.1
attcggctcgagctcagaaaaccgtagttttcgccaccgaagcggcctcccagtgtaagcaggagcgttcaccccgacggcgtcatgaagcgcaatacccgagtcacgagctcccgacggaagtgccggaaggagcactttacggacccgtcctccgtccgccgagttcttatgtccgtcgggctgtccacggagctccgtcacaagcacaacgtgcgctccataccgatccgtaaggacgaccaggtgctagttgcgcgctgcacctacaaaggccccaaggagaaggaggggcatgtctaccgacgccgctgggtcatccacgaccagcggatcaccctacagtaggcgaacggatacaccgtgcacgtgggcatctagctctccaaagtgatcgtctctgatctgaagctacgcaaggac

SEQ ID NO: 14867 - DNA, 1960 bp, Zea mays
  Clone ID: MRT4577_113545C.1
gctgtcaattgcccatcttggtccactctgctgaagtacacatgaagctaaaattgcaggcttttttttctcacagtgaaatatggcagctaagcaaatcagctttcgaggataagaagatggacatacataccaagcttatgaggagatacaggcaggtccccgagtggtggttcatctgcatccttgtggctagtgtttcagccaccatgcttacctgcgagtactacattgagcaactgcagcttccttggtggggagtactgcttgcatgtgcccttgccattttctacacccttcctattggaattctcaaagcaacaaccaaccaggtatggactccaaacaaacatgaatgcaggtgcaaaactacatagtatatagcagcaacatacagcccaggagcaggaacacagctaacaacacaagtgtaacaggctccaggcttgaatgtcatcacagagtacatcatggggtacctatatcccggacgacccatggcgaacatgtgcttcaaagtatacggctacgttggcccacatcaagcactagagtttttgcaagattttaagttgggccactacatgaagatacccccaagggccatgttcacggctcaggtcagttcaactagccacaccaactataagtattacactaacaaaagaatgataactacatgctccagttacatctataatgttgtccatattggaaaagaacaggttgtgggcactttgattgcgggctccgtataccttggaacaatatggtggctcctggacacaatacctgatgtgtgcaacacagagcttctcccagcaggcagcccttggacatgcccttacgatcatgtgttctacgatgcatccgtattatggggccttatcggcccacgcagaatatttggtgatttaggcacttactccgctgtgaactggttcttcctgggcggtgccattgctcccctccttgtctggtgtacacacaaggcattcccagctcagaaatggatccggcatgtcaatgcgcctgtactgattggcgcaaccaccttcatgccacctgccactgcagccaactataccacgtggatactcgttgcgtttctgtcaggttacgtggtctataagtaccggcgtaactggtgggagcgacacaattatctgctgtcaggtgcccttgacgccggtttggcgttcatggctgtgttgctctatctatgcctgggactggagaataaaagtttgaactggtggggcaatgatctggacggatgccctcttgcttcatgccccactgcaaagggtataactgtggatggatgtccagtgcataactgagagaggtcaccattcagtatttgagggtagaattacattatctctaaagggacatatgcacagatcactgaaccatacagataattgagaggttcccttattgctgcatccatgcctaggagtggagaacaaaagtttttgctaggacaatggtttggatggatggcttcatgccacgctgcaaagcacattgaacttcacatagatgtctggtgcataattgagagtattctaatcattgccagtactgggggataaaactagattatatcttgatgacaccatcaaagatcaatgtagtctttgccaaattataaaagatctcaactacatgatgaagacacagtcagaagtgtgagtgtatttcagataagaactaaccagattcagattagaactaatcagcaggaatagcagccattaatgaatacaaatggctggagtctgacaggagtagcattgcagcaccactgtaacagttggtaattgtcgcatgtcagctgtcagcacaggtcgatcatctgctgaacactaacgctcccgaggccctccacgagttcatactactccgaattcaatgcttaggtaagggagcatgccacgccatggctaatcta

SEQ ID NO: 14868 - DNA, 484 bp, Zea mays
  Clone ID: MRT4577_113546C.1
cggggacggttgacagtccccaaccccaaggctcgcgcttgagaccctgagcccacgtttgcccccacaccccccccccgcatcagtaacccccatgctggggctttacctttacaacttcgcacctagaacagaccattggttaaggttaccacatagaccgagatgaaggaggaggtcgttatgctagtggttcccctaaaggttactatggtcgaccagacgagtaccttacagactaccgttggggtcgtggaagtccctatagagaaagttacaacttttttcttcttgctcgttaagttggacaaaggggacttttttcccgcgaacactaagtaaggagacaccacaactagtccaaccgcattttttacgaagacatgttaaacagtggtcgccgttatgaacatcaacaagttcgtttcggttatgactttctactttttcgtcgagaactttttttaggacgtcgtattcatta

SEQ ID NO: 14869 - DNA, 644 bp, Zea mays
  Clone ID: MRT4577_113547C.1
taccggtccgaatccccggtcgcccaccgtcgaaattttaatctaataagaacaaacgacttatctaaatatctactaaaagtttgtaacttcactaaattttgtaaaggtaaaatagtcccagtcagacaggaccataatatataataattatattcccaccgatatctcccgtatctgtatagaatacggtggcccgagagagatcgagaaagaaagaaacaaaatgctttcgtgagggcgaccgatcggcagcagcgcctctatctatctatatctatcgtcgtcgcgctctctccttttggttccacgtagtgcacgggcaaaacaaggagcccttccccttctcctacctaaaaggaaactgcagcacacactgctttgatatactccagacaaggacgccgcaaccaaatgcaattctgaaacatagatttatcactggctgtcaaataggataaaataagacagctttttctggtgaagtggtgtaaagttatgccgacatcaaatgttaatattattgcacggagacggtcggcctagaaatggcaacgcatgccatgtgctaccacggttttactctctccacgtccagcacctgtaaaaaatagtgtaaagtgaacactcgaacacacactcct

SEQ ID NO: 14870 - DNA, 297 bp, Zea mays
  Clone ID: MRT4577_113548C.1
gggggctacaaaaccagggattgatacataggagtgttagcgctcaagaacgatgccagacggttattgtgacctataagtacacatcatatgactaagaagactgcaatctgtctggactagccgacacgaggtttgtacacaacccatgtttttggtaacacttattttaaaaccaacgcaaagcgttcgtgcacagagtgacacaaaaaacacgctctatgccacattaagggaccttaacaatgtatcgaatgaagatattcttaacgtgcaccgctaatcggtttcaactcg

SEQ ID NO: 14871 - DNA, 755 bp, Zea mays
  unsure (1)..(755): unsure at all n locations
  Clone ID: MRT4577_113549C.1
cgggaatgtgtggtactctttagggaggcgtgttctgtttattgaaccttccagaatgaggagctatattgtttattcttatcttatcttacaatgcgtgtgtttgcctgtttctgtttggttgtgcgtcccgtggtagcctggctcactacatgcgttgactgggcctctaaatgtatccagttgcccgcatggagatggttgagcacgcatgcatcggtgcagattatgtatttgcggaagtctttaacctgcacctggggatacgcgtgaaagcggcgtatgtgctgggccatgctcgcgtgagcccggctgcatggacgcaggcttccaattaccaccattcttattgctcaagtaccaaataggcttgccaaatttgtgcactatatttcaatctatactggaagcatacatttttcaaacactgtatattcctgtacacagtccttatggtcttttctggctctggctattgatgtccatgctaagtgtagggagaattttgttattgtcataccctgaggttatgttgtcatctggcagtccactgcttgagccatgacatgtctctatgtaactctcttagtgacgctccatatcagaacccgagcatggtgttaaatgggcaagggttgattcaacatccctttggtgacgcgtcgtgttgtgatttgggcacgatgttatataagggatcgagtcgctgctccttagttgngtgctacgtcgctacatcggcgcccgagtgtagt

SEQ ID NO: 14872 - DNA, 355 bp, Zea mays
  Clone ID: MRT4577_11354C.1
cgtccgccccgcgtccgcccacgcgtccgcggacgcgttttaatataaaaaaaaaaaaaaaaaaaaaaaaaaaagaaaaagaaaaatacaaaaaaaaaaaagaccccacccggcaggcgacgtagatgacccaggccggctctcgccggcagggcaaggaaaatccatcactgcaccgacatgtaaaaccaagaggcggccaaaacctttgcactccccaactgaaaaaccaccgccaatatcgaccttaaggcgcttgcagcacttcccaacatcccaccatggatcaatatgacatagaccccaacaccttccatgtccaaaaacactcgcacaccaaaggggcacgggcccc

SEQ ID NO: 14873 - DNA, 179 bp, Zea mays
  Clone ID: MRT4577_113550C.1
cagggatattatataactactaatgggtcatagataagaacacaatttaagggacatcatagtcaatagcacagtgctaaacaccattcacactatggtctgtatgcagttcctcacttagcgaaacatactcttttgttaccaaatatacatcacgtcgccataattcctgtgttatg

SEQ ID NO: 14874 - DNA, 1303 bp, Zea mays
  Clone ID: MRT4577_113551C.1
agggctggttccagatcactggcagtcgcaagtagcaacccgcatcacgagttcacccacgctccccgcacaggcacagctcactagcgaccagggagttcaaacaagaggcaacaagaacgaacccacccaccgccctccggtcgctttgcttggttcgggccactgcaccgccattgttgatctgttctccttctcccttggaggagaaagaagagggggagaggaatgatggggcggacgagcgtggcggcggcggcggccctgctggtgctggcggcgtgcgcggctctgccggcgaggacggcggcgaacaagatcagcatcaactggaagcccaacgtgaactacaccgactggctgaagcagcacagccccttctacaaggacgactggctggtgttctactacacggcggggcaggcggacgtggtgcaggtggacgaggtgggctacaacaagtgcgactccaccaacgccatctacaactacagcaaggggcgcagcttcgccttccagctcaacgagaccaagacctactacttcatctgcagctacggctactgcttcggcgggatgcgcctcgccatcaaggccgagaagctgccgccgccgtcgccgccgccgtccgccagcgaccgctccgccgccgccatcgccgccttcgccaggtcccacgcgcccgtcatctacgccgccgtcgccgtgctcgccgcgctcctcaggatggtctagctgggaagaatctacccgccggcccctttgttggttcgaattgggactccttttttttgttcgttcatcctctccatcttttccgtagtgtgcttgggctctcaagaggagcagtagctggtgctggagtgctgcgttgggttcattaattaattagcggtgtggatttgccgaagcgattgattgagctgagattgatttttcaagtgtgaagaactctagctgccttgctgaattaaagtaactccagccttttcgtctacgagtaacagtgattggagattacatggcacatgagattatgagacctacctatgaagtcatgaagatattgctgcgagtatcatcgcgcgtgcatgacaggtcaatcggcgatgaagatgagaactcacaggaagacgaatgacattgtagctaacatagacgatgttctgaatctttgccccgaggaagtcttaatggagccccaaggttatgacgtgacacacagtcatataaaacgccttgatgaagaattgggtcagtttgcagaagatttaaagcatgaagggaagattcctcaagatga

SEQ ID NO: 14875 - DNA, 392 bp, Zea mays
  unsure (1)..(392): unsure at all n locations
  Clone ID: MRT4577_113552C.1
tttttgatcacaaacaatttgtngtatgatgggagaaatcccgcattttcccccagnccccgggagacgcaaacagcatatgtacagggctactgacatactgcctggtttttgagatacctgaaccatggggcagtaaatgcctataccagaatgaatgggctaaaaattacagtgggacgaacgcgggagcatacaaaaaaaaatggcacactgcaaaaataatttgaaatgttgtatacaccagaaacatctttgtggaggcggaaaccaattcctcttgttggggatgggttatcggccaactcgggggcgttggttgaagggggagagaccgtttctttcctgggagaaacaaacaagtccattccttctcctggttttaactgcag

SEQ ID NO: 14876 - DNA, 691 bp, Zea mays
  Clone ID: MRT4577_113553C.1
tctccgacccgaccgctacccgttggcggacgcgtgggcggacgcgtgtgctgtacgcgtgggcggacgcgtgggtggaagcccgaacgtgaactacaccgactggctgaagcagcacagccccttctacaaggacgactggctggtgttctactacacggcggggcaggcggacgtggtgcaggtggacgaggtgggctacaacaagtgcgactccaccaacgccatctacaactacagcaaggggcgcagcttcgccttccagctcaacgagaccaagacctactacttcatctgcagctacggctactgcttcggcgggatgcgcctcgccatcaaggccgagaagctgccgttgccgccgccgtcccgccgccgccgtccgccgccgccattgccgcctttgccaggtcccactcgcccgtctcccacgcgcccgtcatcttgcccgccgcgctgctcaggatggtctagctgggaagaatctacccgccggcccctttgttggttcgaattgggactccttttttttgttcgccccgcctctccatcttttccgtagtgtgcttgggctctcgaaaggagcagtagctggtgctggagtgctgcgttgggttcattaattaattagcggtgtggatttgccgaaaaaaaaaaaaaaaaaaaaaaaaaaaaaaaaaaaaccccaaac

SEQ ID NO: 14877 - DNA, 680 bp, Zea mays
  Clone ID: MRT4577_113554C.1
ctgtgcggccggcgtacgtgccggcagggaaaccctagctcatttgttgctctgcacgccgcacttcagccgatggtcgacggcacttggccggctcactactctcaaattcttattgtcagtctattctttagtttttgcttttctccccctcctccagtgatggccggtatgggtagccgagtcaaggacggggccctacagtgcctactgccgctgagctcatcccctagggcgggtgtgccgccgtcagtagggtccctggcggtggtccctggttggcgttctgtggtggcaaggtaagttcgaccaaagttggtcgtcttcggtgttgtaccttgtcgtgaactcatggtgaggtaagaactgcggccatcttgtcgtgtctgtgaacacttgaacccggttctaaccccaaaactcgatcccactctgtgatgtatgaatgtatgaaatggatatgatgtaaagtttggggatccagttttggatgttgtttctgcgtggatccagccatatgcgcggttctctgttatttgtttgtgtttttgaccgagatccgttccacaaatgttatggacagtgcttatgcacttcgatcccaaatccaaaaaaaaaaaactgtgacatgcgattctgacctgaccgctcagcggggggaggctagagctaactccggg

SEQ ID NO: 14878 - DNA, 1289 bp, Zea mays
  Clone ID: MRT4577_113555C.1
cattgggaccctcgaggccggccgggaaaaactgatagtatcacaagcaatctagcacttgtcaacctaaccgattcccatccaaccaaccccgcacaccgccgcgggaagcagaagagactggaagagcctacaaaagcttgggggcgcggcacaacgcaggatggtgggcttcctccgggccttcgccgccgcttccgctgtgcccgcagcagctgccgcagcctatactctctttccctcctccgccccttcctcctccaagctccgcttccctcttcctgactccttcctctccgccgccgcctcctcaacctccgggcgcgctcccaacgccgtgcccccgatggccaccgccgctgccacggctgatctctcggctgccgatgataagcagcgggactcggcgcttccggagctcacgacggaattcatggtggacatgaaatgtgagggatgtgtaacagctgtgaaaaacaagctgcaaactcttgaaggaataaaaaacattgaggtggacttgtctaaccaagtcgttagagttttggggtctcttccagtgaagacaatgttagatgcccttcatcaaacaggtcgagatgcacgactgattggccaagggaacccaaatgatttcttagtttctgctgctgtagctgagtttaaagggcctgttgtatttggtgttgttcgtctggcccaagtaaacatggagttggctagagttgaagccacatttagtggtctatcacctggtaaacatggatggtcaataaatcagtttggggatttgacaagaggtgcagaaagcactggcaatgtctataatccgccagatcatttatctgataagccacttggtgacctgggaacactagaagctggagagaacggggaagcccatttctcaggaccgaaggagaaattgagagtggttgacttgatcggccgctctattgctttgtatgcaaccgaggacagatcagaccctggcattgccgcagccgtgattgcaagaagcgccggggtaggagagaactacaagaaactctgcacttgtgatggtgtcaccatttgggaatcaagctaaacctgctaccagcgaattttccatactatttacttccgtatgttgtacgcacattaatgtagaaacaatcaaagtggcaactgaacatttggaataagcttgaatacattgaggaataaaggctgttctcatgtggagcttggacagtcggttagtggacctgttctgcttctgccgctgcgaaaaaaaaaaaaaaaaa

SEQ ID NO: 14879 - DNA, 756 bp, Zea mays
  unsure (1)..(756): unsure at all n locations
  Clone ID: MRT4577_113556C.1
ccggccgggtctcccgagaacaacaaccccgtcaaggacctgaccagccccgacattgtctgcaacgtcaacggtggaaaggctgctcccaagtttgccaccgctgtgcncggtgacgaggtcaccttcgagtggtaccacaacactcgaggtgacgatatcattgatggctctcacaagggtcccatcatcacctacatcgccccttacaccgagaccgatggtaccggtgctatctggaccaagatcgccgaggatggtcttgagggtggccagtgggctgtcgacaagctcatcaaggacaagggcaaggctaccttcactctcccctccagcctcaaggccggcaagtacatcgtccgccaggagatcatcgccggtcacgaggccgatgttgccttcaaggacaacagcgccccgtggtgctcagttctacccctcttgcgctcaggttgagatcactggatctggcactgccgtccccgatgagaacttcgacttccagaccggttacacttacaccgacaagggtattggtctttgacgtctacaacgcccaatcctactctttccccggccccaaggtctggcagggaacctcttccggctctggctctggtcctggctccgctgcccctgcccctaccgncgctgagacccaggctcccgcccctactcctacctntttcaccgttgtcaagccttccgaggaggccgctgcccctactcaggctcctttcactcccgtcatcctcc

SEQ ID NO: 14880 - DNA, 341 bp, Zea mays
  Clone ID: MRT4577_113557C.1
ccggcctggctgcgatatagagagggaaaaaacgtgtcctttttcgtgttaaattctttgacctcccacacgcggccacgccagccgcagacggtgacccgtgcgtcctggctgcagccttgcgttgcggcgcggcaagcttctccgatttgcggcgcggcaattcagcgaacgccttatggcttttatcgcgtggaacggccgtgatgtagagttcgtccgcaggcgctaatgtcatgtcaaacatcctgtaaggctgtaacctgcagaattagtcgatacggacacctttggaatatccgtgcttgctggactacaaaaacaaaaaactacggccccta

SEQ ID NO: 14881 - DNA, 289 bp, Zea mays
  Clone ID: MRT4577_113558C.1
cgtccggggcagcgcgccaggacggatcggaggagacgccatcaatcagcacttgcacgcgcgcggtcggccgcaggtggaggaagaagatgggcctgtgctcgtgctgctgctggtgcctggagctgctgtgctcggtcctcctcacgcccctcggcgtctgcctccgccacggctgctgctccgtgagtcccgctctatcctccgcttccctgcttgctttgctctgctcttacagcccgttgcctttctgggcagatggagttctggatcagtgtgctgctcacca

SEQ ID NO: 14882 - DNA, 2790 bp, Zea mays
  Clone ID: MRT4577_113559C.1
aaaaaaaaaaaaaaaaaaaaaaaaaaaaaaaaaaaaacgggccgggatttttcggtgcgcggcaccaaatcgcagcggggcgggagcgtgctacggcggcggcggcggcacagcaggggaagaacgtacacccgcagtcgaaagaggacggcgagacagctctcttcctatccacattctatataatctatggctaatcaggtagagattagagtgattgagagagcggggaaggaagttttgtacagagaagagaaagaggtagttgatgggaagggtttgatgtgattgccctttcttttctctttgcttcctggacacaacagccgccgccacttcctgccatcctttcgtcgttgattcggtgttcttggatcggatgccttcatctgcctagatcggagctagagcaaggtgcgtggtgtaaatcccgagaggaggaagaggggagggggtccaggccgcttgttcttgccgcgtacggttcttccaagaacccgcggcggggatggatctctacgatgagggagaggagatggccttacaagacggggactcctgcctcgcgccacgggcttcgcggggcggatgcgaggtggacttgcagtgggcggatggcctcctcgaaggcgccgaccggaagcggcgtgcgcgggaaggcttcaaggatgaggtccatttcgtccaggaaatggacgaggtggatggcagcggcaagcgcagcaagccgccgtcgccgcaaccgcacacaccagatattcgtgaagctcatgcccctggccgccgtcgcaccgtggtggccggcggtggggagctcagctgtggcggtggtgatctcataggacaaattggccgggacctgtccatcaactgcctcctccggctgtgccggtcagaatatggctcagtggcatcgctgaatcatgatttccggtctcttgtgcgaggaggggagatctacaggctgcgacggcagaataacatcgcggagcattgggtgtacttctcctgtaatgttttggagtgggatgcttatgacccctaccgcaagcgttggatctcggtgcccaagatgcctcctgacgagtgcttcatgtgctcagacaaggagtctttggctgtgggcaccgagctacttgtgtttggaatggcacacattgtcttcagatacagtatactgacaaactcttggacacgaggtgaggtgatgaattctcctcggtgtctatttgggtcagcaagcgttggggagaaggcatatgttgctggtggcactgattcttttggcaggattctcagctcagcagagctgtacaactcggagacacatacttggacaccactccctagcatgaataaggcacgtaaaaattgctctggggtgttcatagatggcaagttttgtgtcattggtggtgtgacaaacaacaacatgatcttgacctgcggtgaagtgtacgatgtgcagagcaagacttggagggtgattgagaacatgtctgggggtcttaatggagtgagcggtgcacccccacttgttgcagtggttaagaatgagctgtatgctgctgattacagcgggaaggatgtgaagaagtatgacaagcagaataatgggtggatcacacttggtaaattgcctgagcggtctgtgtccatgaatggatggggccttgcattcagggcatgtggtgagaggcttattgtcattggtggcccaagaacaccagttgggggcatgattgagctgacctcatggactcctgatgacaagccacctgtgtggaatttgatggacagacggccatctggaaattttgtgtataattgcgctgtgatgggctgctgagctcgcttcatcaagggtctgcatagtgatgtttacaaagagaggtatgcacaggcaggcttgtttagcttcagcactccttgatgggtttctgcctttgaccttgtagctgatgtagttggcatccacaggaacaggatctttgtaacctttttcatacatcagtttctgccccagctaatccatttctttcatttacatttggatcagtcttatgatctagaagatgataccatgcaaaagatgtcataccaataatctagaaacatcaaatttcagaggctgtccatcattgatgatgacagagcaagttattttggtcattttcctgcaaaagatgtcataccaataatctagaaacatcaaatttcggaggccttccatcattgatgatgccatagcaatttgttttgatcatattcccttatctatgtctgcaacaaaagaagtgaccatcttgttattactgtattattatttttgagttatcatatatgttgcactttcatgagaagctgatgctcatgaactgaatacaaacaaaagatttccatgacacttaaaccagtgactgttgtgagtgctgggctcttttttggacaagtccctctttggactgttcttttttgagtaaggaaaaagggcgctagatttcacatggtaatctgaatttcaaaggattttgactccttgttctcgatggaaatctagctggtttgagatgctccccagtccccattttgtttgacaaaactaactggtataatccgttattggagtcccaccgcaaaaaggtatattcccatgtgtttcgcccgcagcacagggttattgcccctggtagaaatcaggtgctgccccatcactagttccacttgagatttgctctgttttttaaagaataaaacagtgaactcttgcaccaaaaccaaccccccccc

SEQ ID NO: 14883 - DNA, 262 bp, Zea mays
  Clone ID: MRT4577_11355C.1
aataggaccggtttgggtcggggcgcatgggagggaaaggaacagaggctggccacccaagccagacacgccagccgaacccccccctcactaggggcggaggcccagccccccagccagacaagaccgaaaacaaaacctgaagaagaaaaaaaccaatgccccaacaagcgaagggcagggccgaggcctggacatactgaccccccaagaggcaaacccaatctttggcctggcacaccggaaacatggaacaccggca

SEQ ID NO: 14884 - DNA, 351 bp, Zea mays
  Clone ID: MRT4577_113560C.1
gggttgggtttttaaaaagggagcatgatattggaactccaatccttgtgcaaaatgaaacaggcccaaaaaaacatccaacagtatagttggggtaaaataaacgtggacccgtaccatttttcctttttccaaacaaaaatttttttgggccgggagaagacccctaacaggttgaaggggcgattttgccctaagtttcaatgaaacatccggggctcctagtcagttcgaatttgattttcaagccttgttcgaaatgttgttggacagccaatcaaggcctttgaacaaacctttgccagttggggcaaaagggctttggatttaccaatgtccttggcccagggg

SEQ ID NO: 14885 - DNA, 546 bp, Zea mays
  Clone ID: MRT4577_113561C.1
aattcggcacgaggcacgccccctgcacgcgacccgaggccaagaatcgcttccttccgttccgctccgcgccgcctccaatatccagcgagcggcgctgccagcccacgcctctgctcgaatccctcctccttcctggaaacgggatttgctttccctgccccgctaaatcctttcttctccatccagccggttcctacccatcctgccggctgcggctgcctggcgctgccgtgcgtttcagagcgagggcgaggcggagggacggaaatgccggtccaggacccggtcgtcgtcgttgtcggcggcgagcgcgcgggactctgtctccccccctgccgccggtctgtcgaggtgtggtagtggtagtgcccgtcccagctggagcacctgagacgtcgttgctcggtcgtccggattgatttcggccgaaagctgcttgtgggttttttttccggaaagggagggagggagggagggcaaccttttcggttttgtgattggtactacttgctccggggattgaatagccttggcgagatttat

SEQ ID NO: 14886 - DNA, 428 bp, Zea mays
  Clone ID: MRT4577_113562C.1
ctttattttgtctggtctcaagggccaaatgttgctttgtctctgattaacattatgagcggcacgtcaccgggtgatatgcagtgcagcagcaggccacgctgaagctgaagctgaagctgaacctcatctgcaggggcacaggcaaggagcagatggcagtagtgtagtgacgctagctcatggaaaaaaggtagaacgatctgaagcaggagttacagacaatgaggaagatgcgcttgtttacagctccctaaaaaaaaagagataaatgcgtcgataaggccaaccttgttcatcatttggtttggatttttcggggaaaaaggggaatcaagttggtgtaagctgtagttgctttgttctgacccttggctacctgaatgagtgggtcaaaattaaacaggcactgcgctaattaagtgctg

SEQ ID NO: 14887 - DNA, 369 bp, Zea mays
  Clone ID: MRT4577_113563C.1
aggacgcgtgggccgactcgtatgggaatctgcagtcatcttccatgtgaccacgaaacacgggggcacattcgacaacatgtggaagctcacctagcaggcgcattgctcgaattgttgactgcatcttgccaccaggctgtttcaggccatcaatgaacagttacccatagtatcctacactgaattcttagaacttgctggagtcgtggtaatcgatgtaaccgggggatctgacgtacccttccaccccaggaggcaagatatccctgacgctccacctgaaggtggtcttcctgatgccacctaatgttctgattagctcaggcagtttttctcgacacagatgggtcttgtgaaccaggacat

SEQ ID NO: 14888 - DNA, 2160 bp, Zea mays
  Clone ID: MRT4577_113564C.1
atggctagagtacgttcaactgctagggtgacccgtgacggagaggaggccgaagccaccgaaacagccccgatttccgaagttatgagacaatcgggactggttgtgacagaggaagccattgaacaagctggtatgcccatgatgataaagatgggctacttcggagaagctgagaagaagctaattcgttttgccggggaagaaaccactccgacaccgaaaaatgttgaggtgctgacccctaacgctatcgttaggctcagcgtcttcatctgggccctacgaagccaaggaatggacccgaatgctgaagctttttgccgagtgcatgagcttcattaccaaacgaaggccagagaagacggactgcatgaaaacttcggctgttataacttcacatatcgcaaagatatgaaggcctcggtgcttagctatctcaccaagtggccaaccggttggaaaagtgagtggttctatgtcaaggccgatgaaaagaagagggagaagctaaagacgctagtactgagcccgctgagcttaagcttcgatttgactatgtccctgtgccgcatgacgtcggagtcaccatgccaacaagctgtggcagaattcagggtggtagccgaacagatcaacaccagagatctagttcaagaatatttggctaacaaaacatctccaactttgagcgaatttagcatgacgaagctaaaaggaacgaataagggacttgagcttgtgcgacttccttatcggtttaaatttgagaaacaatttaaagaaccttgccaagaatggctggaaatgattgaaacgatatgtaatgaagtgctgggaaattacaccaaaaaagaggatcaactgatgactgcggccttcggcacccgaccaaagcgaaggttgaatcgggtgatggatgccttgaactttgaatacactgactatgagcgattgaacaagggtgccgaagggcaaaagagaaagaggattgttggtgttctgagcagacaagctgctaggatggtgaaagaagatgaagaagctataaaaaagagaaaatccagccctgagccgaaggtggctgctctgaagaagagaaaggctgcagctctgaagccaaaaacaactaagatagaggaagaaactccttcaacaccttctgctgctgatgtagaagaaattttaaaggtaatgaccaaatctttacctatcaagctgctaagtccactggggccgcatctgacgaagcttttacagaaggaggaaacttcggtggcgaagaaggtgattgggccaaaaaggcgaaggattgttactgttatagaagctattgaggaaacgccaccgccggcctcaacgtcaaaaataataccagctgtcgaagttgtcgcttctgtcgaagctgctcctaccgaagctgctactgccaaagctgctactgctgaagaaaccaatctgaagagcacattatctgatattgatagaatgctcttggatatggccgcagaagaagatgttgcagacgccaaagaaaccctggccacagtgcctgaaaaagggaaggaaatcgccgaagatacttcggaggaaaaaggcttcaattttcaaaatataattggtcaagaattaactaaggctgaaaaagaggagctgcaggagtatgctatatcctgtggctaccaaccaggagcgttgctcttcggcggaattaacgaagaaagcttaggatgcatccgagatcgaactagagcgaaggtgattgctgatgaaggttattttgcacagagtatgctactaagtaaagccttaaggatgcaacaggacctcgaagataagaaaaatgaggttataattgagggcttggagagcaagatcaaagaccatgaagctgctcttgaaaagaaagattttgttctccaaacaatggagggttcattggcggaggcccaagccgaaattgccaaattaaacagtgaactcctcctgaagtcagaaagcttcgagcaagaaaagaagaattttgttgcgaagctcgaagccgaagtcgagaagagtttgaatttgcaaaaatcgttgaaggagcttcaggacaaatgtctagacttcggcaaccggatgatgaagccgaagagcaatgattcgaagcttgacgggtaa

SEQ ID NO: 14889 - DNA, 344 bp, Zea mays
  Clone ID: MRT4577_113565C.1
cggccgcccttttatatttttttttattttttttctctttgggagaagaaacagaaagcagggctattaatggcattgcatttaatttagctgacaaacgacccaaacaatcaatagctttggttaatattgaacagtttggaaagcgagttatcatgtgaggagaagcaaactagaagaaaatagcggttgagtacagggcttggaatatatacggcccttttttttaaccgaccacgactcacgggaggacaggacccttaatgactggataggggaaccttgaaggaacataggctgagggccttgccgcccctggattctcttcttccatttactgaacc

SEQ ID NO: 14890 - DNA, 341 bp, Zea mays
  unsure (1)..(341): unsure at all n locations
  Clone ID: MRT4577_113566C.1
ggcagaagcggcgnnagccactagtggcagacagggnnagctcctgtgatctcctgtttctgtctctctctcttccctgagggtgatttgtctgtctcttctacgagttcctcctctctctctttttgttacgctttcaaggcaaattgtaccttgcatgtagttgtaatctcggcgggcggaataaaagatagaaattgcacaggcaaaaaaaaaaaaaaaaaaaaaaaaaaaaaaaaaaaaaaaaaaaaaaaaaaaaanaaaaaaaaaaaaaaaaaaaaaaaaanaaaaaaaaaaaaaaaaanaaaaaaaaaaaaaaaaaaaaaaaaaggggcggnccc

SEQ ID NO: 14891 - DNA, 255 bp, Zea mays
  Clone ID: MRT4577_113567C.1
tcactgctaacatatcagttccaatttatctttagcacggccaataagctcaaatcggccgggattacttcatatacatgccaaaaattcaaccattcaaaatcatacttcaatcatatgcatattcaatcaactaattaacccatgacaacaatatacaagtcttacaaataataatgccaacattaatcgatagattactgatcatatcatttctactttgcttacatttttattcctaatcttctctaattt

SEQ ID NO: 14892 - DNA, 375 bp, Zea mays
  Clone ID: MRT4577_113568C.1
gcgacgcccagcggcatccacctgctcggccggatagggacgcatggactgctctgggtaccactgcgggacatctacttacgcgggcgagtgaagctggcaacactgaggaaatttctcccaggaggagacaaagagatgtcccacacaggatagtgaagccggctgcagagccttgagctgatgcgggccctaagcacacaaggacgccagactatgcgacgacatggcctggtaccagactgaggagacaggcatagagcgaagaatgatgatcagatacgaggcctgcatcaggcttgtcagatgtccacccacgtccttctctcggctgggaagagccgaaagggtgtcatgacctctgtcgagatagat

SEQ ID NO: 14893 - DNA, 780 bp, Zea mays
  unsure (1)..(780): unsure at all n locations
  Clone ID: MRT4577_113569C.1
gtcaggtcgcaaccgcagcgcggcacaacaccaacggggaagaggaaggcagtgagctgttccgcacctcccgcccgtctgatctgatgaggaaggtctgcccgaacctcgagcgcgacgacgcgctggacacggtgctggaggtgcccatccccgaggagatgttctccggcggcggcggctcctgcgggttcaggttcggctgcaccagcgtcaaggcgtggatgcggtcgcacgccgccgaccggtgcggcgcgggcgagccgtgctccatgagccgcggggagctgcagctcatgctaggcgtcatcggcgcgccgctcgtcccgctgcccgtcgccgtcgtctgccgcgccaagcagtcgccctgctccgtcctctgcgagcagctcaagaccggtccaatcgagtcgtcgtccgccaagtacatcgtgcagcagtacgtcgcggcgtcgggcggggagcgggcgctggacagggtcaagagcatgtacgcgatgggcaaggtgcggatgacggccgcggagcagctcaacggcagcgacgccgccggccactgcggaggagccaccggaaaggggaaccgcggcgngtaggaggaagggccgcggcggcgaggtcggcgggttcgtgctgtggcagaagaggccggagctctggtgcctggagctcgtcgtgtccggctgcaagatcagcgccggcagcgacggcnaagttcgcgtggcgccagaagccggggcaccagtcccacgcctcccgcgggccccccgggcccgctcc

SEQ ID NO: 14894 - DNA, 294 bp, Zea mays
  Clone ID: MRT4577_11356C.1
tgttaaccgaggggacacccgcggcaagggcggataatctaccgggggcgtccatctgcaactgcaaggaggaggcgcgctgcaccaagagcatgatcccgggcgagcgcgcgtgcagagagaagcgggtcctgcttcagaacgaggatgcaacaaaggtgcgcaccgaggctgagcgtacgcgctggtgatcaagctgagcacgggctgagcatgtctgtctgggcccgcatcgtgtattgcaacttgcacccggagaacgcagcgaagcacgtgcccgggcaaaacggtaag

SEQ ID NO: 14895 - DNA, 157 bp, Zea mays
  Clone ID: MRT4577_113570C.1
gcagggaggtcggctaggggggcagggcgatcgttcaccggccctggcgggggctcgggaggggaacgttacagggccgcaaaatatcacatccttcctgaccgtgggcccgtgccagtcgacgcttgcatcttgtggggagagcgccatcatccga

SEQ ID NO: 14896 - DNA, 336 bp, Zea mays
  Clone ID: MRT4577_113571C.1
gatgctacagtccacaacttcactactctttatgtagactacgctcaaattactgctaactgtatcaatcatgggccattatcaatctgcctcaatactgactacatgcatacatacattgaaagcgtgtcatgcacatacatatgagatacgcaccttgaccattgtgctctcattgctggatacggagactctgatttcgccaccattcatctgaatgacaagccttactgtatcatcaagaactcatgaggccagaactgatgcgagaacggatactacaacatatgcaggagttccaacattctcaacaagtgctgcatctattacatggtc

SEQ ID NO: 14897 - DNA, 224 bp, Zea mays
  Clone ID: MRT4577_113572C.1
cgctgtaccccaccacctatgctcccctcatgttgcttcagtcattaccgtcttccgtgtgcgtcgggtcggtccatacgttccccacgtccaccgtaaccaccaccaccttcactccattcctgccaacgtcctgatccatcttcctcatctccttcaccccgccgcggtgccccatgagcgcgccagggacatcttcatggtcttcatcgtgctcctctttg

SEQ ID NO: 14898 - DNA, 289 bp, Zea mays
  Clone ID: MRT4577_113573C.1
gggaaaccctgcccacaaaaaaaaactcaatagggggggtttccccggcccccactagataatccaacaaaaccgggggcaggggttcatgatttcaggtgatatcacagggggcctatcaaaagggtttcccggaaaaaagagtaaccctacagagccccttgagcctagggggggcaacaggacatgggaccccatgccccttttttttgtctcaaatacaaaaaaaaaacctccctggttggggcccaaccgatttataaaggggggggcgggggccatgggcaac

SEQ ID NO: 14899 - DNA, 632 bp, Zea mays
  unsure (1)..(632): unsure at all n locations
  Clone ID: MRT4577_113574C.1
ccacgcccgtccgtgtcctaatcacaattgtgtcgtcctgtcagtagtcgcggtgatagatcncggattattatcngccatagtcgtgctgggagggatgaagcagggtatgcccggacgcacctgacgctctactcgggtctgcatatgtctttctgcgcttcgcatgctgtctactgacgcattctgagttgctctggctcgtatcattgaaatacgctgactgatggttcccttacttgcatcattagcacattctctatgcaggatctgatcagagaagcgagcatgctgaagatgacattcggcaaaacccaagatacaaatttcgacaaaccgataaccctgaaaagacaaaaagataaccccatggatccttttggtggaataacagacacgagggaggcaccaatcaacctattgagaaagtgcttgcacttcaagatgcagagtgcactatttgcctatctacttatgatgaaggtacatacttgctgaaactcccttgtgagcaccatttgcactgcacctgtgtcgatgagctgctgtacatgaacgcagcatgcccactgtccaacggcaacattctgaaatcaacactagcaaagcaagtgaataagctgatgcatccg

SEQ ID NO: 14900 - DNA, 425 bp, Zea mays
  Clone ID: MRT4577_113575C.1
ccggacacaacccacgccgtgggatccttctgccctttcacgtgcacctctctccgtcgatagtaatcggcgtgtggtggcggcggtacgcgagcgccttcctttgtcaaaatccacccatgaggccgagcagagcctccatgctgaggaggggacgatggcaggcatgaccgatatgccaatgaggccggcgcggcctggcccaccgattcagcaccggggccgtcgcgccgatggctcgcttacgccccgaaccaatcgaccgcgagacgacctgccctatgctgctagggtttttacaggggctggtggacaccaccaacatgaacagctttttgtgagagggaaacaaccataggatgaaggacagatttacacatggaaggatgccactcttcgagagcttactgagcttgcgaaagagg

SEQ ID NO: 14901 - DNA, 197 bp, Zea mays
  Clone ID: MRT4577_113576C.1
ccgggcgtgagtccttcataccaacgtcagcgctggaagggaggatctcctctgctgagcgaggctccattccatgccattctcggccagctctagagtacctagtatgccggcgacttcatgtatggcgatgctgatgatcgcctgcgttgtcctcatcgctgcctgggccatcgtggcgatggcctcgagggctg

SEQ ID NO: 14902 - DNA, 335 bp, Zea mays
  Clone ID: MRT4577_113577C.1
tatctgttgttttatttgttgttgtttgtagctaacgattgaccactaagagtgtattacaggaaagcgcctgctgtcgagaattattattaccacctggctattactctactgatgacctgcggctgctgggcatagggcatattccccagaagggcaaggaacatgtgtgtggaaaagaccaatgtatgccattctgtggtaagggccacaaagtgtggctctaaatgaggcgttaaggtttgccacaaccggtgggccaaagggcggcgatggaatgtgtgcgcacgaaagcagcaatactctcaacaactgcgctaggggaaggctataac

SEQ ID NO: 14903 - DNA, 705 bp, Zea mays
  Clone ID: MRT4577_113578C.1
cattgggtacctcgaggccggccgggctcgcgccgccgcggaacacacaccgcaccacactacccagcggaatccgcccacccgcacccggagcagaggagatatgtcgcaggggaagggaggagcgtcgaggaaggaggaggtggtcaccagggagtacaccatcaacctccacaagcgcctccacggctggtacttctccttctggccaccttgttgcgggggctgcacactgttctcgctgcgagatctggctcgcttgcgagattcttcgtctcgctgctgatagtatttaggcgcggtagcggatggtgtttttctattcgatactactcatagacaagatctccctgttccgcaggccatgggctcaactagtgtatgttctgtgtgatcagttatatactattcgtactctgcttaggagcacgaggagatgaaacagtacgatgaccttgcctgcttgtggtttatagtatttgtagcggcactcgtttggtattttcctcatttcatttgctaattagttggtcgaaaggtaaatgtaataggcatctagctccaccctttattaccatttggaattgcaaaatttgttgccagttaggaattgatgaacctatcttgagaaggcagatatagcctgtatatgctcaattaacattcttatcaggtaaaattctagtgactgttagagtttgtttt

SEQ ID NO: 14904 - DNA, 325 bp, Zea mays
  Clone ID: MRT4577_113579C.1
taataggtaggttgcaaagccgtgtatccatgcctcaattgcctacatacttactacccggtgttagcaactgacttagtccccgtgaaatgattgttaccagttgagaattgtgcatattcttttctttatttagaacaggtgtgaacaagtaaagtctgtatcaattaacatgatgccccttgcctcttcagaggtcactaccgatatggaatattcacccagcttcgcttctgtgtccccgtccttaagatgggggcaacgatgcaagtttgttgtgtcttacaggagacggcttgtaaatgttgcaagtgtttacttcact

SEQ ID NO: 14905 - DNA, 131 bp, Zea mays
  Clone ID: MRT4577_11357C.1
gcacacagacacttatcgctgaccacaggcgcatggagcagctgcggatccacctgcgtgctcctgtatgcggggggacgcccaggacctttggcatggagcacctcctcccgaagctgcaaggcgcacag

SEQ ID NO: 14906 - DNA, 393 bp, Zea mays
  Clone ID: MRT4577_113580C.1
gggacttccattgacatgcaggtacaattgtttatgtttttccaagtgaacaaatgggggaatgtcaatcacactttttattcaagagtagttcatgtatttccatggctaagatatataggcttacatgtcttcatttccatttccatttccatttgctggattcttactaagtaatatttaaaggggcattgctgtgttttttcgttagttaacaaaagattgtttatatgctcattgatccatcttgaccttttgcatgatatgtagcttctcatccgggagtggcctaatgttctgtcactgttggggggtcttattgtaatcaagacactgataatcaccgcaattgggcctagagtcgggttaactcttaaagaaagtgtaaggata

SEQ ID NO: 14907 - DNA, 458 bp, Zea mays
  Clone ID: MRT4577_113581C.1
acccattttgtttgctacgttggggtgtatacgagaccatttccgctctttgtgcaaaccatacgggatgcttgataacacccctgtcgactctgatgcaaagggcgtcaattcttaaaagcctgaccacggcgcctataatcccgtgggtctgggttgatactccttggccattgatcacttgctcttgcccttgaggttatctcagtcacttcttctgtgaaaaccttgatctcacgcagaccaacctcttgctccactccattcttgccgaaccaatctttggctgcattcaatggcaccttctgtcacatactattgcacactagatcactctacaatgttcgtggatactcatttgcaaaaccttgctaacatgcgtgatgaagaatctgcgctaacagtatgccatagactacgatccagaaccatttcccgtctttgctgtgaccacctat

SEQ ID NO: 14908 - DNA, 339 bp, Zea mays
  Clone ID: MRT4577_113582C.1
tctcttttttttttttttttttttttttttttttttttttttttttaaaacggacgggctatgatcgggctgaagagaaagagatgacggggatcaacgcggttcccgtccccaatggggcggggggggacatcctagtttagggcccctgggctagggtttgcacaccgtttttacgatcacaaacagacgaacaggactgttttggctagggcatcatctccatctgggtgacacacacagctgggggagacagaagtcacgtacggcctcggcctcgcctcatcttcatcaagttccgacggatggggggggcaaggacatgccccggacgcgtgg

SEQ ID NO: 14909 - DNA, 322 bp, Zea mays
  unsure (1)..(322): unsure at all n locations
  Clone ID: MRT4577_113583C.1
gacaccctcacacttaacatatttaaaataaacaacaaccttacaaaggggtggggccaagattttttcgtgtggcacncncttctgctatcctcgaacacacagaagacccttacctaacacatcatatactactccatgcaaggcattcttcctgaccctcatgctgccaatctatgatcaggtgaaatccacttgttaccattcaaaccttccacacaaaaactcatctgcatacatacctccaagtccactgcaccgttcagcagacagcaataacagatcttacctagccatgcaagagatctagaccaatgtcact

SEQ ID NO: 14910 - DNA, 442 bp, Zea mays
  Clone ID: MRT4577_113584C.1
ggacgcgtgggcggacgcgtgggcggattcgtggggagcggttaagaatcgagtacgagaagaggctgacacatttgaggaaccaagatgtgaaaggcgaagaacctacctctgttgataagacttgtgcagcattgagaagcttgcatactcggctgaaggtgtcaatacacacagttcagtcagtatcaaggaggattgaaattctaagggatgaggagctgcatcctcagcttatggagttgattcaagggctatcgcggatgtggcgcgccatggctgaacgccacaaagctcagaagcgcaccatcgaggacgctaaacttctcttcctccagcaccacccctcggccgccacggctatctcccttggtccgctggaggccgcaactccccctccggctgccttggcactggaatccgagatccaggcctggcgagg

SEQ ID NO: 14911 - DNA, 799 bp, Zea mays
  Clone ID: MRT4577_113585C.1
aaagaacactccacgcgacctcacctagggtttgctctcctttcctcccccgtcctgctcttccccaatccgccttccaccccctcgatctcctcccccagccgccgtaggcggaggcgggggcgggggcgagcagcgacgacaagctcgtccaacgcctgcccgcctcggcgaaaagcctgtcgccatgtctgacatggagtccgtggctacccttatggagtcgacaagcttgaagatacagcagcttcagcgagcatttgctgagcttgagagccagagcgctgttaccatgaactttaagtggaagcagctcgaggaccatttccgtggccttgagcagtccctcaagaaaaagtttgatgagctgaaaaaacaggagaaggagttccaggagacagtcgcaaaatcggagaagatgctggagcagcaggaggctgttgtggtggctaaggagctgacttctctggaaaggctgcaggagaaaagagatgctgcgttagctatgatctttggcaagtccaagctgtcactaaacactaattatatcaccccaatgaataagccacagagtaattataccgtgggtactcttgatgtgaagtggccgaagcattcttctgaaggaaatgcacgaatgcaagatggcaatgctgctgtgaagcctcgttctgaacttgcactctctgcgaggagatgaatgttaaagggcttcataagttcatatcagaacacagaaagaacttgacatctatccgtgaggaaatcccgagtgcactcaagggagcatcgcaaccat

SEQ ID NO: 14912 - DNA, 294 bp, Zea mays
  Clone ID: MRT4577_113586C.1
tcgttactagatcgcgagcggccgccctctggttttatttttttttttaattttttttattttttttttttttttatttatccgtttaaattcgagggcccaaattattcagagcaaaaacaacaaaattccaacaccgtaacacggggacatgcccccaaaaaaattaattactggtaaagcggcattttcattcaaccaaaaatcccggatcctttattcaactatgcaaatcagatggtaaaaacccgaagccttcagggacagactaaaaccaaaagaaaatggccccca

SEQ ID NO: 14913 - DNA, 380 bp, Zea mays
  Clone ID: MRT4577_113587C.1
atggggtttgttttttttttttttttttattttttttttttttttttttttttttagattgtaggagaaaaatggggcaagggccgccccttttaaaaaactttttaaaaaaaaaagcaaaagggtttagttacaaaaaaggtggggtgggaaaaactacaaagggggggtttgtttaaacacttgaaaggctggggccagccacaaaaaaattgggctttataatccaaactggggggggggggggaaaaaaaaaattgccaattggggaacccccctttaaacctttgggggggggggaaaagcccctggggctttcccctccaaagcaaaagttggggtaaactttggctccgggaaaaaacgggcaggggcaaaac

SEQ ID NO: 14914 - DNA, 815 bp, Zea mays
  Clone ID: MRT4577_113588C.1
tcgaggccggccggggaggtgatgctcagcgttcctcctctttacaacgtctcccgcgtttggttccctggctggtacggtacccgtcgtcgtgcgaacccaagacacccgcagggtgctcgaccaaatgcgacgctaggttaggtgcttctactccacggcgatcacccagctcagctgctacccaactgtcgcaggccgacgcgccgagcgagggcgccgccgccgtctccggcgtcatggcggtgaagctcaaggacctggtcccggccgcgaccaacacggtgaacacgacgttcatcgtgctcgacaaggcggcgccgtcgacccgccgacagggcggcgccagggaggagacgtgcctggcgcttgtggcggacgagaccgcggcggcgcacttcctgctgtggggcgccgagtgcggcgcgttcgagccgggcgacatcgtgcggctcacggacggcatcttctcgtaccacagggggaacgccctggtgctgcgggcgggccgccgcgggcgcgccgagaaggtgggcgagttcgccatgctcttcgtggagacccccaacatgagcgagctccagtgggggcccgaccccagcgacggccggaggatggtgcaggaggccgtcgtctcgccttactcccagatcttcaagccgctgcggtgatcttcttactactgagaaacatgatactaggggtacgaacttacgatgaagaagaacgaaaaagaagggcttaaagctctgtctgtcttccaaagtgacaaggttacaccttacaacatgttcaaccatacaattatatcttcc

SEQ ID NO: 14915 - DNA, 477 bp, Zea mays
  Clone ID: MRT4577_113589C.1
ctgttgtagtcatttcgtcattttgtgttctggtgtctgcggaagggcgtcctggatggagtccgccgacggggcggtgtggatgctcatcggtgcgaatgttgctgtcttcctgctgtggcgtgtggccgatccagggttcatgaggaagcatttcatgatttcactggacaatttcaagagtggacggttgcacaccttgctcacgagtgctttcagccatgcagagtttaatcacctctttgccaatatgtttggcctcttcttctttgggagcagtattacgaatgtgtttggtcctgcctttctattgaagttgtatgttggtggagcacttactggatcagtattcttcttgctggagaaggcttttctagcctatcggaaacaggattatgtaggatgggatacttcaagagctgctgaacttggtgcaagtgctgcagttaatgcaactatgcttcttcaaatttttct

SEQ ID NO: 14916 - DNA, 527 bp, Zea mays
  Clone ID: MRT4577_11358C.1
gggtacctcgaggccggccgggccgggaatagcaagcatacgctcctgtctatctatctagcgagagagagagacggaaagctacgctacctacgcatgtcacgcgcggcagtgacgaaggcaacacgccgccgatgctgatgctgctgcttctccagctggtgttaactccgacgacggggacggcccgcctcctggagggggatacctccaccgcggttgatctggacagcatctagaggtagcttggccatccagtgagaggcatcctctgtgatgaaagctgtgtcttcctaccatgctatagcgccagacatgggttgccaatgcattgaccaaatctgcatgatgtgatatctggactaacgctatttgtaatttgagttggaagaaacacaaggaagcgacggagtcagctcaacattattgcatgagtcatggcggacgaataactaaagcatactgcggcgtgtcaccaccgtcaagaactggcccctactgccctcgagctacggtttttgattcct

SEQ ID NO: 14917 - DNA, 3878 bp, Zea mays
  Clone ID: MRT4577_113590C.1
acgataatggaatcaaatacgcagtatttgcagaaaagagtcttcgtttattgggaaagaatcaatatacttttaatgtcgaatcgggattcactaagacagaaataaagcattgggtcgaactcttctttggtgttaaggtagtagctgtgaatagccatcgactacccggaaagggtagaagaatgggacctattctgggacatacaatgcattacagacgtatgatcattacccttcaactgggtattctattccacttctactttttaaattaaagggtattctgaaagaggtatttcttttattttcacaatagctttcttttgaatccaatttcgagttcgattagaaggatagaaaggcgatgagaatgggaaaagaaaaataaaatattttattttaatgagttccccttttgagttccccttttttgcaattttcttattatcaattccattcatttattttatagaatacttttttattctatatctataaaaaatctttattttgtaaactaaaaaatacaatagtcaatattccttataatagatatacttaattatatcataagaatcttaagatatatttcgaatagatagaaatagtaaatttgaattgagacacatattctatgacagattttaacttaccctctattttcgtacctttagtaggcttagtatttccggcaattgcaatgacttccttatttctttatgtgcagaaaaataagattgtctagaaacgacggggccaaattttctcaatgtatttccaggatcataatacagatatttttttgtgtaagtactataatatgatagggtatgtagctctttctacacacaaatgaaaaacgtctatggatgcagatataagctacgagcataaatgcatgcatatgcgtagccgactatagcgagtttttttttttttaagtggatccactaattttttttgaatagaaagtcaatgtatctaaccaattatttcacaggagtactagctactgaaggctatttcagaatcaaaaaaagtaaagtaaaaatcatttagcttattctctcaatttcaattgaccgctactggatttagtatatctaatatgaattggcgatcagaacacatatggatagaacttctaaaaggttctcgaaaaagaggtaattttttctgggcctgtattctttttctaggttcattaggattcttagcggttggggcttccagttatcttggtaagaatatgatatctgtacttccatctcaacaaattctttttttttccacagggggtcgtgatgtctttctacggaatcgcgggcctattcattagctcctatttgtggtgcactattttatggaatgtaggcagtggttatgaccgattcgatagaaaagagggaatagtgtgcatttttcgttggggattccctggaataaaacgtcgcatcttccttcaattccttgtgcgggatatccaatcaattagaattcaggttaaagagggtctttatcctcgtcgtatcctttatatggaaatccggggccagggggtcattcccttgactcgtactgatgagaagttttttactccacgagaaattgaacaaaaagctgccgaattggcctatttcttgcgtgtaccaattgaagtattttgagtaccaattgcaattttttgcaattgtaaggggattttcgagtatttatctaaagtaaaggaaggaacaaacgaggataagagaaaattgcttcgaatttgttttgtccaagtgagatatatggcatactattcttccatttttatacgaaaggccttttttttatttctctattccactccatttagatctaagaaagaacccaatacaatgaaattccactagtatacaaaaagagaaatagatacaaacacaaggtctcaaaccttgttatagaatttttgcttcaaagaaaagaaatatcatatatattcagcttacagatcaaaaatgaaaaaaaagaaagcattgccttctttcttatatcttgtatttatcgtacttttgccctggggagtctctttctcttttaacaaatgtctggaactttggattaagaattggtggaataccaggcaatccgaaactttcttaactgatattcaagagaaaaggattctagaaggattcatagaattagaggaactttttctcttggacgaaatgataaaagagaaaccgaagacacatgtacaaaaacttcctataggaatacacaaggaaataatacaattggccaaaatagataatgaggatcatctccatatcattttgcatttctcaacaaatataatctgtttggctattctaagtggttctttttttctgggtaaagaagaacttgtcattttgaattcttgggttcaggaatttttctataacttaaatgattcaataaaagctttttttattcttttagttactgatttttttgttggatttcactctacccgcggttgggaactactaattcgttgggtctacaacaatcttggatgggctcctaacgagctaattttcactatttttgtttgtagttttcctgtgattctagacacgtgtttgaaattttgggtctttttttgtttaaaccgtctatctccttcacttgtagtcatttatcattcaattagtgaagcataaactcactcatttcatttcctaatattaatcaaattagcatatttcttttcttcctttagaaatagaaagaaagcccttttcctttttaacaaaattctttctatttctacctgctcaaggtattcatcattctagtacaactattgcagtagaatgacaacagactcgtgtatagggaactagattagcttagctacctatctaatttattgtagaaattccgggatccgcgattggacatggaaaatagaaaaactttttcttggttaaaggaacagatgattcgatcgatttctgtatcgatcatgatatacgtaataactcgcacatctatttcaaacgcatatcccatttttgcgcagcagggttatgaaaacccgcgggaagcaactggacgaattgtatgtgccaattgccatttagctaataagcctgtggatattgaagttccccaagcagtgcttcctgatactgtatttgaagcagttcttcgaattccttatgatatgcagctgaaacaagttcttgctaatggtaaaaagggagggttgaatgtgggtgctgttcttattttgcccgagggattcgaattagcgccgcccgaccgtatttctcctgagttgaaagaaaagataggaaatctctcttttcagagttatcgtcccaataaaaaaaatattcttgtgataggccctgttcccggtaagaaatatagtgaaattgtctttcccattctttcccccgatcccgctacaaaaaaagacgttcatttcttaaaatatcccatatatgtagggggaaaccgaggaaggggacagatctatcctgacggtagcaagagtaacaatacggtctataatgctacgtcaacaggtatagtaaaaaaaaatactacgtaaagaaaaggggggatatgaaatatccatagtggatgcatcggatggacgccaagtgattgatattatacctcccgggccagaacttcttgtttcagagggggaatcaatcaagcttgatcaaccattaacaagcaatcctaatgtaggagggtttggtcagggggatgcagaaatagtgcttcaggatccattgcgcgtccaagaccttttgtttttcttcgcatctgttattttggcacaagtttttttggttctcaaaaagaaacagtttgaaaaggttcaattg

SEQ ID NO: 14918 - DNA, 372 bp, Zea mays
  Clone ID: MRT4577_113591C.1
accaccacaagctagctagcagcctagcactagcagcggccgggcaagccacctctctccctcgatccctcgccgatcgatcaccgtctttgcactgatctctgcagaaagctagcattagtatggacggcgccgtagcgatagcggcggcggcggtcctgctgctctgcgccttcatctacgcggcgtggctggcaccggccgcagccaggcgccgcctccgcggggcgggcttcgacgggccacgcccgtccttccccttcggcaacctccccgagatcacggctcgctgcaggcccaggcccaggccaacaacaacaagtcctccgcgtcgccagcggcgacatccacgccgccgtcttcccctacttc

SEQ ID NO: 14919 - DNA, 1368 bp, Zea mays
  Clone ID: MRT4577_113592C.1
aggaagactaccctgaaaacaaaattgtgccaatgtttccatctttcaagatagtatactacagtatgccccatgagctaaggttatgctttgtctactgttcaatctttcctaaaggatatgtcatagataagaaaaaacttattcagcaatggattgcacttgacatgattgaatccaaacatggaaccttgccgcttgatgttactgctgagaaatacattgatgaacttaaagatatttatctccttcaagttttagagaggcatcagattgatgcagaaatatccaatacttctgaagaaaagctctacatgaataatttggcacatgatcttgctaggtcagttgctggtgaagatatccttgtgatcttagatgctgagaatgtacgctgcaatagaaattatgattaccgttatgcacaagtgtcaacttctagcttacaatcaatagatagcaaggcttggccttccaaggcaaggtcactagttttcaagtcaagtgcagaattgcagcatgtcagcgaagttctttcagtgaacaaatatttgcgtgttttggatatcagtgggtgttctgtgaaggagatgcccgctccaatttttcagatgaaacaactgagatatcttgatgcttcaacattgtccattgcagatctgcctccccaaattagtggctttcctaagctacagacactggatctgtctgatactgaagtaaccgagctaccagccttcattgccaacttaaagagactgaattatttgaatctccaaggttgcaagaaacttaagcagttgaataacctagatttgctgcatgagttacattacctaaacttgtcacgttgcctggaagttagaagttttcccgcatctctgaaaaatctcaggaaacttcgttttctgaacctttcgcaatgttctaagcttccaacattacctgatgaattattgcaatcattctctagtttttcttccattgtggatttaaacttaagtggatttgagttccaaatgctacctgacttttttggcaacatttgttcacttcagtttttgagtctgtcaaaatgctcaaaacttgagctactcccccaatcatttggtcagcttgcatatttgaaaggtctggacctttcattttgttctgatcttaaactcccagagtcctttaagtacctttcttctcttcagtttctaaatctatcacactgccataatgtagaatatctgccatcttttgacaaacttagtaatttggagtatcttaatttattacaatgtgctggactcaaagcattacctaagtcactttcaaaccaaaaaatctcccaaattgagggtttttgggtgcccgggattg

SEQ ID NO: 14920 - DNA, 341 bp, Zea mays
  unsure (1)..(341): unsure at all n locations
  Clone ID: MRT4577_113593C.1
aacggccgcccttttttttttttttttttttttttttttttttttttttttttttggataaaataattaacacaatacataatcattataacagggggttgagtgcaaagccccaaacttatttagaacactttttgaatcaaccctaagggggtggtgggcgtttgcgcccatgatttatgaggaattatttggagtttaagtttcccttgggtggcntctccactgcctcttcttacgtttttcccagtgggattgtcnaaatgggggacgctctccacaccggtcagtggggccttttccctcccgtgtgggtccggtctttttttttttgttcttgc

SEQ ID NO: 14921 - DNA, 567 bp, Zea mays
  Clone ID: MRT4577_113594C.1
atacatcacagaagagcgcatcgtctaccccacacaggtacattactaaagaagagcttgagcatgccttgaaggagcaagggttgtacgacgccgacaaaatcaaagaggtcatcgcagatgccgactccgacaacgacggaaggatagattattcagagtttgtggcaatgatgaggaaagggacagctggtgcggagccaatgaacaacaagaagaggcgagacatagtcctatagtgggtcagcaagtgtgtaatgtgtataggagctcaagcaagcaaatttgtgtatcagtacacagatgcaatggagctacttttgcggcttagttcaccgatggctgtgtacattgggccattgtttgcggggggttttaatgctatgcatacttagggactgagaaagacatggacgagttcatgatgcgtgcagatcagtctggaagtcctggaccaaatagagagaaaacaataggatgacgattcagcaaatgcgtatttgttgcatccactgtgaccatctaagaaaagcatgtgcatatttcataagactacagttggcattt

SEQ ID NO: 14922 - DNA, 520 bp, Zea mays
  Clone ID: MRT4577_113595C.1
ttttttttttttttaatagtgattaattggaacattattgggtaaagagaaaagtgatcaagggcacaacttgccttagactcaagattcctaggtatttaccaacttggtcttcaagtgactcgttaacctcgctgctactcagagaatacgctgcaaggagcctacgagcggcgctcgaggaactctgtcttgtgattcagctgttcctcgagagatagtgcgggacgagatcgacggtagcagcgttgttctctctttcttctcctctctgctcacatgatgcactcggctttggcacagacggatgagtggagggaggccgtggcctcaaatatacatccctaggggcgcccagattccgggccaagtccaagaacggccagcgtggtttctgggcgatcgagggccagttacaacaatctcggatagggatggtcgagatgaggagaacaatacagagaagatatttggggtgggattctgtgttttttgtccaaagccagcccccgaggtcagg

SEQ ID NO: 14923 - DNA, 301 bp, Zea mays
  unsure (1)..(301): unsure at all n locations
  Clone ID: MRT4577_113596C.1
ttncttgttnctcttttcattaataagtggctctggctgcacctgactatggcgcggttgggggggacactgtaccaggcgcgtgcaactggggcggcttatggggtgctggtgaatctgcagctccagctggtagcattccagctgctggcgcaaactgggctggtgctccagctacttcagtgtgacggtgtatgggacgcatctgtggttccacctccagcatcagctcccctgatgggaacatggggcgagccccgttggggggtcgacccttacctaggagtgattaataaagagt

SEQ ID NO: 14924 - DNA, 489 bp, Zea mays
  Clone ID: MRT4577_113597C.1
gcgagtacaagcttttttttttttttttttttttttttttttctttttttttttttttttttttgttttttttttttttttttttttttttttttttgttttttgtttgtttatccaatttttggtgttttttttgaaaaccacgccgggggggggtcagaagggggcaattacaagaccgcggggggagtgaacggggggcaccggacgttggaccacgccgggggggaaatgggaaacacactggtccagggggaaaaaagtagttgcccccagatcccaaaaaaaaaaagggcggacaacaaaaaaaaaaaccccgggggcccccaggggggaccaaaccccaaataaaggggtgcaccaaactgcccgaaagaaagagggaaaacccggcggccccacatggcaaaaaagaacgccccaccccccggagaggggggaatgggaattaggcccacaaaccgttgaccctaaaaaaaactcccaagg

SEQ ID NO: 14925 - DNA, 529 bp, Zea mays
  Clone ID: MRT4577_113598C.1
acaccaattacctttcaaatcattgaacaggactgcaagatgccatatatcattgggcgaagaacatctccactattccgtagtgcttacacatcaaacagaacaactacagcattgacattttcaatctcagagtagccgcacaaaccattttttatgaagcatctggtaaacaaagggcgttgtagagcttaatgtgctttcaggcgctcattaggatcataccgaagaacccttcgaagaagatcaattagacctccagcgcaatgatcaacatggtgcatcacacggatctgcggacgaggcaattttcagactggctaaatgctgtttcgcgaggccgatccttttggccagtacaaccttactccgggcttgacgtacttttcagaacgccgatcagctctgacaatcataagccatgggagaggccctaaaaccgttgccatcatagccaacagctccaagcattcatgtgaacgaaagagagctttccccgaacaaagcttaactaatatgcaacccacac

SEQ ID NO: 14926 - DNA, 366 bp, Zea mays
  Clone ID: MRT4577_113599C.1
acagggggtttttttttttttttttttttttttttggaacgggaagctgaatatatatgacctttcttttctttgaagcaaaaattctataacagggggggagaccttgagttagaatctatttctctttttgatcactacggaatttcgggggggggggggctttcttacatctaaatgggggggaataaagaaataaaaaaagggctttcggataaaaagggaagaataggatgccatatatctaacttggacaaaacaaattcaaagcaattttctcttaccctcggtcggtccttcctttactttagataaagactcgaaaagccccttacaatgccgaaaaattgcagttgggcccgcggg

SEQ ID NO: 14927 - DNA, 260 bp, Zea mays
  Clone ID: MRT4577_11359C.1
tgcacgctccccagcgacgtaaggcgtcctgctcgccttactccgcacctaaggcgattgggggagagtctgccggtggcggcacggcgccggcaaaggagagaggagcgaacataaggacaaagcggggggatggagagagagacgctggtcgctcgggagttttgttgctcccagggaggagaaaggaagttggcttaacctaatcttaatgggctagttgggctgatttgttggctggctggctagtcttttttctt

SEQ ID NO: 14928 - DNA, 238 bp, Zea mays
  Clone ID: MRT4577_1135C.1
gcctttttgtggacaccagctgaaacatcaaggcaagacctgacgcgcaggcacgacaagaaatgctgagatctcagaaataaaagtataggaaacgatgtagacagccaatgctagaggcaaaactcaaaatcaacgaagatttctgaaaccagggccaatacaaaaacgccttagtcagaaaatgactgttaaacataactaatataatggacgaaacccttaaggctcatgtacc

SEQ ID NO: 14929 - DNA, 567 bp, Zea mays
  unsure (1)..(567): unsure at all n locations
  Clone ID: MRT4577_113600C.1
aaattcggcacgaggctttctgttgtcactaatactttggtagttccacttgccaactttctcgtactctgtcagtactcttaccaacaaaaacacactctctggtgtcaccactgttagtgttttgagcgttgatacctgatacactcccatcattggatacactaactggcaagtatcaggtatccaatgaatgggactgtgcaggtacattttcttcctgcttcaaacctgatttgtgatttcatcggttaatgtgtgcagttcatttggtgtgctaagttttttatttcacaaaatgtgctgtcacaagctgtctcctaatcannttttgcccgaagatattataatcgatccatgatgatattcttaaaattagcttaagttatatttggcaaattgctgaatcaggcgcccaaaactaggttggattctggcacccatattggatatgcctggaccaatttgcctttatgcttaatggatcagtcttactatagcaactaccattcgctgactgaattgaactattcataaaagctgtctttacttgagcatgatatatta

SEQ ID NO: 14930 - DNA, 312 bp, Zea mays
  Clone ID: MRT4577_113601C.1
ataaaaaaaaaaaaaaaaaaaaaaaaaaaaaaaaaaaaaaaaaaaaaaaaaaaaaaaaaccaaaaaaaaaaaaaaaaaaaaaaaaaaagttttgtccctggggccgggaaccaccctaaagggcgaaattttggcagaatttccataacattggggggcgggttgggaccatcctatttagggggccccatattcccccttaaaggggagcggtataaaaattaactgggccggggtttaaaaaacgtccgggaagggggaaaaaccctgggggtcaccaaatttaaatcgctttggaaaaaaatacccctt

SEQ ID NO: 14931 - DNA, 404 bp, Zea mays
  Clone ID: MRT4577_113602C.1
gcatacaggatccaacaggagaggatagcaggcctcttaacattatcaacggggatccttcaacaaccgtgagtcctattacaacatgtaccttcggttcatttggtggtacaaaacatctgggcacagctactacgactagctcgggctatgcaaacctgtgctacataactatgatgaacatcagtttcttgcattcaaacaactggttgcatagaactctgctgcttatttgcatcaacaattaccattaatacagctagtggctgcctacccccaccattttcttccattcaaccaactagcagcattgaactctgctgcttatttacagcagcaacaactactaccattcagccagctagctgatgtgagccctgcttgctttttgacacaacaacagt

SEQ ID NO: 14932 - DNA, 820 bp, Zea mays
  Clone ID: MRT4577_113603C.1
ccggcctagcggcgttgtgctgcgctgcaggagcgcctcgtctacgtgcccgtgctcccgggtctggcgcgctcgtaccccatcacgcccgcccgcctcggcctcatctacgaggatgtctggctccgtgccgcggacggcgtgcggctccactcctggttcatccgtcactcccccagctaccgaggtccaaccattctgttcttccaagaaaatgctggcaacatcgctcaccgtttggaatttgttcgactaatgatgcagcgactacagtgcaatgtttttatgctttcttatagagggtatggtgagagtgatggttatccttctcagaaagggatcacatatgatgcacaggctgcacttgaccatctagctcagaggaatgacatcgacacaaccaggatagttatctttggaagatctttaggaggtgctgttggagcagttcttgccaaaaacaatcctgacaaggtcaaacaacccattctcttcctttctggattgcaagatgaactagtcccccctccacacatgaagatgttatatgacaaagcttctgatcataacagaaattgcagatttgttgattttcctagtggtatgcatatggatacctggatgtctggaggggaccgctactggaggacaatccaattgttcttggatcaatacgctcctggagtgcagaatcatgatgccagcttcaaaagtgaaattacccgagatgatgaagctgctgattgactggaaaatctggatcggactttttccaaatttctggttcctgatgttgctgcaatttgtcaccaatgaactg

SEQ ID NO: 14933 - DNA, 2127 bp, Zea mays
  Clone ID: MRT4577_113604C.1
atgaagcagtggcgtgatgatgtcgaccgtctgctcggcatggcgcattctggctcagccaggcccaggcctcggtcatcccggcgtcaacatgaggcgtcggcatcagtgcgctcaccctcggtgagggctgcaccgactgaggacctacaggtggagctcaaccgtaggcgtgcgcgagaggacgctccagtctctctagagaggcctgatgacctgcgggcagaattgaaccgtagtcgtgcgggcgaggatgcccgagtctctctggaaagggtgcgtgagcgccggctaaacttcgagggtcgcaacctcgaccacgacttcgctgcggctgcaccgcaaactccaagggatgcccgaattcaagaaggtgtcccattggccagcgtgggctgcgccgcactggcggatcatctccgcacggcggcctggccatccaagttccggccacacctgccagagaagtacgatggtacgtcaaatccgtcggaattcttgcagttatacgtcaccgccattacggcagcaggtggagacactattgtaatggcaacatacttccatgtagacttgtctgggccagcccggacttggctcatgaacctcaccccaggatcgatctactcctgggaagagctctatgcgcggttcacagcgaactttgccagcgcttatcagcagcatggcgtggaggctcacctccatgcagtgaggcaggaatccagggaaactctccgggctttcatctcccgcttcaccaaggtacgagggactatacctcgtatctctgatgcttccatcatcaccactttccaccagggggtgcatgatgaaaagatgctggagaacttggccacgcacgacgtagaaactgtcaccacgctcttcgctctggctgacaagtgtgccagagctgccgagggccgtgcatggcactcggcactacagaccggagtcgcccagacgggtggctcgggtgccgtcacccaagacggcaaaaagaagaagaagaagaacatccaccccctctgctcccaaatcatcgtccctaaggcgaatgggaagcttcggatgtgcatcgactacaccagccttaataaggcttgtcccaaggacccatatccactcccacggatagatcaaatcgtggattctacctccagggacaaggtggaggtatacgtcgatgacctcgtggtcaagactaagagagggtcaaccctagtggaagacttaaccctggtcttcgacaagctgtgggcaacgcacacgaagctgaacccggacaacaaacccagagaagatcaaacgattgaggcaatgaggccttcggcccatatcaaggacgtccagaagcttatggggtcattagccgcccttagccgcttcatttcaaggctggctgagagggcgctgcccttcttcaagctgttgcggaagtccgacccattctcttggaccgaagaggtggaacaagcctttcaagagttgaagcagcacctggtgtccctaccaatactggtagctctagaacctggggagccgttgtatttatacatcacggcggctgcagaagcggtggcgctagaaggccagggacctgagggctcggcaggggtccggaccgttcagaggccggtctactacgtcagcgaggtcctccatgaagcaaaggccaggaagttgcgccactatttccaagcacacatgctcgtggtagtgacctcctttctgtcgagggccatcctccacaactctaacgccacaggcaacatcgccaagtgggccgcggagctcgctgagttccagctggacttccagcctcgccacgtcgtcaagagccaggtcctggctgacttcatcatggagtggacacctcccccgggcgctcctgggggtccagatcctaattcaaaccccacacctgcggagcccaggtgtctggtcttcaccgggccccactggacgctcttcttcgatggatccgcccatcaacaagttggtggagctagggtggtcctcatcgaccccaacggagatcaagtgaagtacatggtgcaccttgagttcaaggctgaaagggaattaggcttacacctatttcctaatgattctggtggttga

SEQ ID NO: 14934 - DNA, 371 bp, Zea mays
  Clone ID: MRT4577_113605C.1
atcacccaaccgagtgatgttcaaatgcaggaacatccgacacacacaaacagacatatggctgttctaaaacactcgaacattctatagaaagccataccagatgcgctggcgaaaatactattcacaagtcaaacctaccatttcatcagacaattgattttccatgacataaatgctgacaaacagaattaagatccaacttttaaatacaccattttaacatataagaggaggttagcgaacgatattatcccaccaaaatatgctaatgctaacatttggaggtgtaacagcacttgctgtcatgatatacacaacaaggttggttgcatgactagtccttggccttatcgatcatatcctatatc

SEQ ID NO: 14935 - DNA, 1392 bp, Zea mays
  Clone ID: MRT4577_113606C.1
gcgagtcaaagagcagcggcgaccgcgcccatcaccaccaccacccgcctgacggagcccttcccacccatcggcggcggagatggtggggtggctcaaggcgctggtgtacggcgcagggggcatggcggtggtgggcctggcggcgctggtggcgctgcaggagcgcctcgtctacgtgcccgtgctccctggcctcccgcgcgcttaccccatcaagccctcgcgcctccgcctcatctacgaggacgtctggctccgcgccgccgacggcgtgcgcctccactcctggttcctccgccactctcccacctgccgaggtccgaccattctgttcttccaggaaaatgctggcaatattgcacatcgtttggaatgcgttcgactaatgatgcagcggctacagtgcaatgtgtttatgctttcttatagagggtatggtgagagtgatggttatccttctcagaaagggatcacatatgatgcacaggctgcacttgaccatctagctcagaggaatgacatcgacacaaccaggatagttatctttggaagatctttaggaggtgctgttggagcagttcttgccaaaaacaatcctgacaaggtggccactctaatactggaaaatacatttacatccatactggatatggctggtattatgcttcccttcttaagatggttcataggcgggagctcttctaaaggtccaaaacttttaaactgtgttgttcgctctccatggaatacacttgatattgttggagagttcatcgcaggtcaaacaacccattctcttcctttctggattgcaagatgaactagtcccccctccacacatgaagatgttatatgacaaagcttctgatcataacagaaattgcagatttgttgattttcctagtggtatgcatatggatacctggatgtctggaggggaccgctactggaggacaatccaattgttcttggatcaatacgctcctggagtgcagaatcatgatgccagcttcaaaagtgaaattaccgaggatggcaattattctgctccattgtacctgaagcaaccgaagttgtgaatatttttcgaggatattctccaccatgctctgccgctacatttgcctctggaacttaagttatttgcccatgaaccgaatatatatcctcttgattgaatgtatgaatgatatttttttctcctttgctagtatttggaacattcctaaaaatgtggctgtatgacagcccgatagataggctgtaagctcattggctgaactatttggttttgtgattttgattgtttcctttttcgatgttaaagcatctagacctttaatatgtttggatgacacaagattattgtgattaatgtatgttttgcag

SEQ ID NO: 14936 - DNA, 269 bp, Zea mays
  Clone ID: MRT4577_113607C.1
tactgatctacatgcaatgagccatggtttgtatcgctactgggctatgacacaagatcaacggcttctcattggtgcagcttatgcgctggttgtcgtcatccagcaaccagtccttacatagatgctcaaaattcgctcttggcacatgcttctgtagcagctcgagaccttacgagagatcaagctgtttataatggttaggccgtgatcatcctgcacatcatgtgctactagtctctaacatacttaccaggtgaccaatcagc

SEQ ID NO: 14937 - DNA, 2579 bp, Zea mays
  unsure (1)..(2579): unsure at all n locations
  Clone ID: MRT4577_113608C.1
tttttttttttttttttttttttttttttttttttttttttttttttttttttttttttttttttttttttnttaacttcaacacttctgcaaaacatacattaatcacaataatcttgtgtcatccaaacatattaaaggtctagatgctttaacatcgaaaaaggaaacaatcaaaatcacaaaaccaaatagttcagccaatgagcttacagcctatctatcgggctgtcatacagccacatttttaggaatgttccaaatactagcaaaggagaaaaaaaatatcattcatacattcaatcaagaggatatatattcggttcatgggcaaataacttaagttccaggggcaaatgtagcggcagagcatggtggagaatatcctcgaaaaatattcacaacttcggttgcttcaggtacaatggagcagaataattgcctgaattaattgtttgcggtgagtttcagttcattggtgacaaattgcagcaacatcaggaaacagaaatttggaaaaagtccgatccagattttccagtcaatcagcagcttcatcatcctcggtaatttcacttttgaagctggcatcatgattctgcactccaggagcgtattgatccaagaacaattggattgtcctccagtagcggtcccctccagacatccaggtatccatatgcataccactaggaaaatcaacaaatctgcaatttctgttatgatcagaagctttgtcatataacatcttcatgtgtggaggggggactagttcatcttgcaatccagaaaggaagagaatgggttgtttgacctctccaacaatatcaagtgtattccatggagagcgaacaacacagtttaaaagttttggacctttagaagagctcccgcctatgaaccatcttaagaagggaagcataataccagccatatccagtatggatgtaaatgtattttccagtattagagtggccaccttgtcaggattgtttttggcaagaactgctccaacagcacctcctaaagatcttccaaagataactatcctggttgtgtcgatgtcattcctctgagctagatggtcaagtgcagcctgtgcatcatatgtgatccctttctgagaaggataaccatcactctcaccataccctctataagaaagcataaaaacattgcactgtagtcgctgcatcattagtcgaacaaattccaaacggtgagcgatgttgccagcattttcttggaagaacagaatggttggacctcggtagctgggggagtgacggatgaaccaggagtggagccgcacgccgtccgcggcacggagccagacatcctcgtagatgaggccgaggcgggcgggcgtgatggggtacgagcgcgccagacccgggagcacgggcacgtagacgaggcgctcctgcagcgcaaccaacgccgctaggccggccaccgctacgcccccggcgctgtacgccagtgccttcagccaccccgccatctcccctcctcccatcgccgccgtcgctcgccgcgataggagagagcgccgccactctggtgatggtggagacctggtgagcgcgacggcgcggccgagacccgagaggggcgcgcgcgtcttctggctgcctcgtggtcccgggctcggaaattgcaggcgcccacgccgcaccgtcctttccagaaccctctggtctccgcgtgcggcggcgcgatttctttgcttctcccttcgacttcgagagattgttgattattctagagccagatccgggtaacagattcgaggttgcgcccgccctgttcggcttcagatatggggaacactacatctgtgcaagctgaggcttcagattcagcgcagaaacctgccacaacatctcctgcacctgggtcaaagccgaaaaagatctgctgtgcttgcccagatacgaagaagctgagggacgactgcatcgtgcagaatggcgaggatgcctgcggaaagttcatcgaagcccacctgaaatgcctgagagccgaagggttcagcgtctgacgtggtgctccatcatagtaactccacacacctgtttctgcagtaatctgattttgatcatgaacagtgtgatgaataaggacttctggtagagtgataggaacaactcgcagttttatttctagactggaaggaggaaatcccctgaacattgccagtttgcaagagtttttctatcttttttcaatgcatttagtgccacacatatctgcaattctggataatactttatggagcatatgtatatggaaattgcttttttttggtccactgtttggagattgagcaccacactgtatggaacaactgttgcaaaagttttctactggctagagctttcagtcacttaatccagtgatgtatgaatgaagaagatattaccctttaaaaaaaaaaaaaaaagggcggccgccctttttttttttttttaacatcgaaaaaggaaacaatcaaaatcacaaaaccaaatagttcagccaatgagcttacagcctatctatcgggctgtcatacagccacatttttaggaatgttc

SEQ ID NO: 14938 - DNA, 369 bp, Zea mays
  Clone ID: MRT4577_113609C.1
gccagccgtgcaccatcgatgtcggcaagaacgagctcgtcctcacggagctggagctgctgagcgatgggcccaacgtatgcaacctgcatccaccgctgctggttcaacaagaccattctggaggccaaggccatcgacaagaatcgcatcgagtacatctacgatgagctgaaccggatggatcgtgcgctcaaagacttggatgaaatgctatacaacaagaaggaatccatattcaagatgcagcagaagatgcacgctgtacaagctaatgcttagacaaccgtctgtaggatgcaactagtccaaggccattcttcattttataccaattacctccatgacttttactcgcggcgaggaatc

SEQ ID NO: 14939 - DNA, 157 bp, Zea mays
  Clone ID: MRT4577_11360C.1
cctgccgcacggatgcgctgggtgccgcaagtccatgacctacaactactgccccgaccccaagccctcccagccgggcctccccgccgagtgctccatgcagtagcgcccggttattcctcggccgtccaacaatggcgggcgcgcccgtgtgtgt

SEQ ID NO: 14940 - DNA, 330 bp, Zea mays
  Clone ID: MRT4577_113610C.1
cactgatgttaaaactccaatcaggcggacagtgttcacttttgataaccaaacgaaagtctggccatgtggggaggtctgctgcagatggctaggacgctcactctgtcacagccgtgctgtggctgcttctcctgcactgtgtcctcatctacagtggaataatttgtattttcagtgttaatttcatgaatggatagacttgcttgcttaatgtttaaaataatgtacagattttaatgagtggaacagatctatatacaggctgtagatgcacccttattcacttggtttaagagtagtgttcatttatttgaaaggagctgtaat

SEQ ID NO: 14941 - DNA, 544 bp, Zea mays
  Clone ID: MRT4577_113611C.1
gttgctacctctctgattctgtctataactactcctctccctctctctctcttcgacgtccgaatttccgcacccaaatctaatcgacacctcacacgagatggcgccctggctcttcaacagagaccactggaaatgaaaaggaaccacagatcaaggcgagaacattgtcaaaaacatgattgaaatacacgtccccccttccgatgtcgacgaggtcaacgcctgccctcattacgactgccttcatgacggcatcaagcccctgggccacagagccccatgatacttgctcataactgctgacatgaataacttaggcgctttctttggcgaaaccggtgctgacatgctcgtgcccattggcgtcctctgcgaccttcatgcacatgctgataataaagctctgatgggataataccatgaactcgtccaacacaaggatgtcaacgccctgaatcaagaactagataacattgtttgccgtggccacaaccctgatgagaaggagactgtctctaccatgctatgaccgtgctgcaca

SEQ ID NO: 14942 - DNA, 1192 bp, Zea mays
  Clone ID: MRT4577_113612C.1
ccggcgtcgtagtactacgcggtgatgaggtccatggagagcacggactcgtcgtccggtgagctaccgccgcagaagcagccgagctcggcgccggatctcccgccgggcttccggttccatcccacggacgaggagctggtcgtccactacctcaagaagaaggccgcgtccgtgccactccccgtcgccatcatcgcggaggtcgacctttacaagttcgatccgtgggagctacctgataaggcgacattcggcgagcaggagtggtacttcttcagcccgagggaccgcaagtaccccaacggagcgcggccgaacagggcggcgacgtccggctactggaaggcgactggcacagacaagcccatcatggcgtccggcggcaaccgcgagaaggtcggcgtcaagaaggctctcgtgttctaccgcgggaagccgccaaagggcctcaagaccaactggatcatgcacgagtaccgcctcgcggatgcggcgagctcaaccaccagccggccgccgccgccttgcaacgccggaggcaaggccacgtctctcaggctcgacgactgggtgttatgccgcatctacaagaagatcgacaaacttggagtcggcgatccgccgcggatcatggagtgcggcgaggactccgtggagaatgcggtggcagcctacccgacgcatgccgcggctgctgccatggccgtcgcagtcgcaggcggaggaggggcttaccataccggcaattacacttcgctgatccaccaccatcacgaggacagcttcctggtggatgggctgctcacagcagaggacgcgggcggcagctccctgagccagctagccgcggcagccagggcagctgctccaacagacaccaccaagcagctcctcgtcccgtcctccaccaccccgttcaactggctcgacgcgtcggcactcacgattcttccgccggcaaagaggttccatgggtacaacagagacaccactgacggcggcggcacgtccctcccgtcgccgtccgagaggaataacctgcaggcggctgtcggcgccgtcgatagtggcgccagcggtggcactagtgccgtcattccatcattcctcaatccgctcggcgtgcaaggtgcgacaacctatcaccaccacgccattttcggcacaccggtgacgccggaagccgcca

SEQ ID NO: 14943 - DNA, 176 bp, Zea mays
  Clone ID: MRT4577_113613C.1
agactttccagaaggggaaaaccccagaaattccctcttttcctgctgttcccctgttcgatccccgacgagaattcgctcccgaacccatcaatctgctctccgcagccacaccgatccgtgaatcaatccgtgtgagtgatcaaaccgccacgagctccgatctgaacgccgcc

SEQ ID NO: 14944 - DNA, 1432 bp, Zea mays
  Clone ID: MRT4577_113614C.1
ccggccgggccggggcttccgttggcgtacccaggctccgctcccccggttaaaaacgctccccatggtgagtctctctcagcaccagtcagcactcagcacacagagtccgcctccgccgcggctccggcgcccgcatccgtctcaggagtcccttctccccgcgggtggagacatcttgatcatttctgagattaaactgatgatgctgatgctcgtttagttatcttggtttggagatatatcagatatgggtgatcggaatcatggacgctctctccctctactgctctatctacatcttttgctgccaatacttccgtttgctatggcagatatagcctccgagaagcaagcactccttgcttttgcctctgcagtctaccatggcaacaaactgaattggagccaaaatatcccagtgtgctcatggcatggtgtgacatgctcactggatcgatcgtgtatattggcccttagggtgccaggtgctggtttgattggtaccattcctgctgatactcttggcaggcttgtgtccctccaagttttaagcatgaggtctaaccgtttgagtggaagccttccgaacgatgttgtctcacttccttctttacaagccatatttgttcagcacaacgaactgtcaggagacttgcctccatttctctctccaaaccttaatacccttgatctctcttacaactcctttacaggacaaatcccatcaggtttgcagaatcttaccaaattgtctgtcttgaatttagcagaaaattccctgtccgggccgattccggatctcaaacttcctagcttaagacagctaaatctgagcaacaatgaactgaatggttcgattcctccctttttccaaatcttctcaaatagttccttcctagggaactctggattgtgtggaccgccgctaactgaatgttcttttctatcttcaccaacaccgtcgcaagtgccttcaccaccaaaattaccaaatcatgagaagaaggctggcaatggcttggtaatcgtggctgttgctgggagctttgtcatatttctgctagctgctgtgatgttcactatgtgcatttcaaagaggaaggagaagaaagacgaagcgggttacaacggtaaggttactgatggtggaagggttgagaagcgcaaagaggatctcagcagcggcgtccaaatggcgcataagaacaagttagttttcttggagggatgcagttacaactttgacttggaggacttgctgagagcttctgctgaagttctcgggaaagggagctatggaactgcctacaaggctatactcgaggatggctctactgtggtagtcgagaggctaaaggatgtcgtggcatggaagaaagaatttgagcagcagatggagctcgtagggagggtaggtaaacatgcaaac

SEQ ID NO: 14945 - DNA, 445 bp, Zea mays
  Clone ID: MRT4577_113615C.1
ggcggggcaaactatttatattcactccttaatctccccatctttctcctccgccttcgcctcctctgcatccctcaccttcctccgaccaagcctatgatctccaccgggtgccgaaaccctagccgcctccggcgtcatggcgagcagaaacgtctccaccgtgtacatctccgccatagacgacgccatctccaaaatccgccaggacttcatcacctacggagacggcgacgcctgacctaaacgaggtgcaggcatctctggcagatgaaaacgctgcactgcggcgcagatcccggggaacatacagcgaaccaaggctgccgcagcttctgcacagaggcacctccggcacgaatccgccagagcacgacctcaacgtttcgtaccaacgccacatccgaggagtacgccaccccaaccgctgacatgctcatcccga

SEQ ID NO: 14946 - DNA, 263 bp, Zea mays
  unsure (1)..(263): unsure at all n locations
  Clone ID: MRT4577_113616C.1
gaagcaacacaggccgggcccgacgggacccgcgcgaccagagcagagcacgaaagacncgaccggaaagagaacacccncgaggaggagncgcgngacaccanggacaacgacaaggacaagangcaggacaaggaagggaaggccccggaccagcagcggcacaacggggaggggaagcagcnggaggaagggcgcacacnggcccacnacaacacccagaaggagagcacccngcaccaggaacaccgncacaagggagg

SEQ ID NO: 14947 - DNA, 1026 bp, Zea mays
  Clone ID: MRT4577_113617C.1
atgtattgcgcacttccgccttccgagcccccggatggggagcgcccgcgttgtcttcgtctcattgtgggaggagcacaacctcgtggaggttggtacctttcagccatcgctcggcttcaaggattttcatcaagcagcccagctgcatcccctcaccaatggtcacccgagacggtgaccaccagttcgatggtggggagaagtaaaccgggctgcggcctccaccccgccctcagcttcaaggatcttcatcatccttgctggggcggagggcgagctgaaccggagctctacctcccgtacgggccggcgggccacctcctccttcatcaatcaggggagagggcgctcaccggcctagcggaggggacggacttcgacaacgcggcgccgatcggccgcaagcgtcgtcagctccagcatgcctggttcattggctcagctggctctggcacagcttccggtgccacctcccaccgctgggcagagcgtggctatctgcccgccgtacgggcggctgttgcgccacgcgcaccgggggaccgcctaagacgtcatgcgctgctagggcagcgttcgtgttcttgggttgtcctgcccttgctccggcacgacgcctcctcgcggaggtcggtgctcacccgtccgagaggacttgagtggggatctgccggtgggcaggtggctgccatcgttggtgctgaggcggtggcagctggagaaggcctcgtcgccgacgagatcgtcggcgccatctacgctttaggcctctggctctttggctttgatagcttgtcctcgcccctcgagtggggacgtgggcgagggccttgttgcagcagtgtctgccctgaggtcatcgctgctgttgtttggccgctcggagcggaggtcgttgtcgctgctgcaggagtgggcggcggcgagccacctagaagttgtcgtcccgcaggccctctgatgtggggggttgttcgtacctgtgggagtggaactggagttccgtttgtaatggcaccttga

SEQ ID NO: 14948 - DNA, 1879 bp, Zea mays
  Clone ID: MRT4577_113618C.1
ggccgcttttttttttttttttttgtataatagtctttggatattttttttatttgcaaaataaagtctttgcatacaagtctcgtcacaaacctccataaaggcacactgttcatttctagtggacaaatattattcatcatcaccatacaaaaatttattatttccctaccattcaacaatcaatcacacagttgcttcaacggtggggatgttgacgtagtcatgggccatcacctccttgctctccatggctaggtagtagtacaccataattgcggcgaagtagaagagctgtaccaagccggagagcagtgcgtatacggagaacagagccagccccatgggcatgttcttcttcaagcacgcaagcgcaaccgcgtagagcggggacggaaccatcgccaccaggtggaccgcgacgaccagcacgaagccttccttcctgcacacccgtgtcatcagccgccacgccagcctgagcgcgctcacgccgcggctgtcctcgtcggccaccgaggcaccgacgcggctacggcaacaaagaagacgacgtcgaggtagaggaacgcgaggaacgggagcacgaataggatcgccatgtacagcacccccaacaggcgcatcgcgagctggagcagcgcgacgacgaggagcgcgcatgcgacgttgaggacgcccaccatggcgacggttatgagagggcccctgaggtgacgccccttcatgatcaccttggtgaagagctcagggaacgagtagcggtcaccggcgtaggtagtggaggtggcgaagaaggctatgatctgtttagcaaagcttcctgcaaaggtgatgactaggagcgcgatggagatcatggcaagctccttggcttccttcatgatctccaccatgagcttggcgtaatcggcgcttgaggggtccatgttcttgatctcgttgatgtggtgcagcatgtcggctgtgcgcggctggatgcagaagacattggtgatcgtctggagaagaatgaggggagcggttaccaggaggaagacagggacgaagagcttggcgttcttggttggaaggagcagggcgtccttcaggaaggagagacatgacgaggagcttgatttggctttggtagccatcattctaaacaatttatcagcgtaccgtttccacatcagacatgaatccgcgagatcggtagcgattttccgatccaggcaatttatcgagcgcttagggaatatcgcgctgctagcttcgtcttcacccgattcttaggttttcttgctgacgcgcggaacgacgatggtcctaattcaggcgttttgtcgagcaccaagcaagcattgcacggcaagatgacgtcgaggagaggatcagagatggacaaccggcacggcgcgatggcagcttgagccttgaacagagacgagaccgacggcgaggttgaagctggagggggagccgatggcgctggggcaagggggtgaggccgagcgccatggggcaagctggaggacgagctcgggcgtggagatagcagaggggcgagcaccacggccaggcgagcttcggcaagcgcagctggacgcgagcagaggcagggattcgagctgggggctggggcgagttcgccagggagcagaggaaatccgagcgcaaggaggaagaaacagatgggctgggcgcgcagagaaatcggctggggggtgagggggaagcagctgcgtgcagcgaggaggttccaggggcgcgcccgcgtggcaccagggggaagacgagggcgcagggagccatggagaggacgccgggaatctgagttgaggctggacaccgcgaggaagaagacgtgggcgcttggcttccccggccggcctcgagg

SEQ ID NO: 14949 - DNA, 305 bp, Zea mays
  Clone ID: MRT4577_113619C.1
atgtcggttcctccgctcctcgtctatttctcgggctctgtttcgggcacctctggctgcgataccggtactagaacttcctgctgcatgactatgcactcctgcatgtgcgtgacgagcgcgagggccgtacccaccgcgatgacggccgtcgggatccggtcgcatgaaagagaagccacgtacaatatgctgctgatccgcgcgtgactggcgtatcgcatgtgcatgcgtgccttgacgtgacacacacacgtgatgttagaagtgctcaccatctgctgactgaggatatagcggataga

SEQ ID NO: 14950 - DNA, 1644 bp, Zea mays
  Clone ID: MRT4577_11361C.1
aattcggcacgaggctttcttctccgttccatcgcctcctcccacttctctctgccgccccccacaccccagccgcgccattgcccactgcattgcagactgtaagccgggaatccacttggattggatcgatccatcggaaggcgccagatgaacgcccggctgtcggcagagtaccagggcctggaggtgaaggtgcccagcctcttccggtgccctatctcgctggacgtgatgcgctcgcccgtgagcctctgcaccggcgtcacctacgagcgcgcctccatccagcgctggctcgactccggcaacaccacgtgcccggccaccatgctctcgctcccctccaccgacctcgtccccaacctcaccctgcgccgcctcatcgcgctctgggcgtccacggccgcgccctcctctccctcctcctcctcatcgcccgccgtcggccccacgccggccgccgcggcggccgagctcctccgccgggtcgctgaccccgccgcggacccctgccccccgctccggaagctcgcggctttcctctccgacgacgacgtggacgagttcgacaagaacgcgctggctcgggccggcggggccgccgagaccgtggcgtccgtgctgcggcgagcgggcagggaggccgcggaggccgccgtgcgggtgctcgcggccatcgcggcgtccgactgcatcgaggaggagagcaagaggcgcgtggccgcggcgctggccgccgacgcgccgtccacggccgcggccctggcgcgcgtgctgcggagcgccacctcgctcgaggcgcgggtggacgcggcgaggctggtggagtcgctgctccgcaatgcggcgccgggcgcgcgggcgacggtggcggactccgaggagctgctcggcgagctcatccgcctcgtgggccccgcggacgacaagggcggcctcgacaggcaggccgtggcggcggggctgtcgtgcctggcggccatcgcggcgacgcggcgggcccgcgccgagatggtccgcctgggcgccgtgcccgccgcggtgcgcatcctggaggccgacgccggttccccgagccaggcgctccgcgtgctggaggcggcggtcgggtgcgccgagggccgcgccgcggtttgcgagtccgcggggtcggcggtgcccgtggtggtgtccaagatgatgaagggcgggatggccggcgcggaggcggcggtgtcggtgctgtgggcggtgtgccaccggtaccgtgaccggcgcgcggtggcggcggcggcggcgtgcgagagcgggctcaccaagctgctgctgctcatgcagagcggctgctcgccggcggtgcggcagatgacgtcggagctgctcaagatcttcagggtgaacggcaagagctgcgtcgcagggtacgactccaagaccagccacatcatgcccttctgatcctcactgctatcggtgatacaacagtggaaccagcatttgtctgttacccttttccagtttcgatttttttttgattcgttggaagtgcatacagtagggaaaaaaaaggaaagaatgagttctcttgtagcaacacaaaacttgtatatgagtagaggattttggtagaaagaaatcaatggatgaaacaaattcagcttc

SEQ ID NO: 14951 - DNA, 388 bp, Zea mays
  Clone ID: MRT4577_113620C.1
attcggctcgaggtaaatttggtcatagagaggtatcaatctatgactgaagtaaccagcgtcatgagaaaatcgtcactggtgatcaaattcttattagtgactggtatactagccgtgctcacggtcatgagcagatcggacactcacatgattaatttatggaattaaatttaatttgtcattttcatcgcattaggattatttattattattttgattactatggtttggtatttacttacaattagtaactgctaataaaattttgaccatcttataaaagcaatgctcagcttaacctttatttattggccagccttacacttcacaggaactcccacctttcgcgagttcatgtacattatttcccacaacttgttgagct

SEQ ID NO: 14952 - DNA, 295 bp, Zea mays
  Clone ID: MRT4577_113621C.1
ctggaatttcctcggtgctctttacttggaacgtcgaaactttgactgtgctgccacaacacatatcgatggtggccgtccgtgtctctctggacgaacagtagcctatcgaaccaagattctacaggacgaattttcaccaatgacttcactaatgaggagtggtggtttggcaaataccaacttaatgcggatgatgataacttcatcacccgttggatggtctcgcatggctgggagacttatattcagtaccatccagaagttgaagtcaagaccactcttgagaacaacc

SEQ ID NO: 14953 - DNA, 152 bp, Zea mays
  Clone ID: MRT4577_113622C.1
cttcctgtggccccgcccagaggggtcactttaaaccttagttcaactggattttgccttcccttcccttccggccggcttccttcgttcaattgggttccggaaaaccttaccctttaacttggcccggccgcggcattggaccccacggg

SEQ ID NO: 14954 - DNA, 900 bp, Zea mays
  Clone ID: MRT4577_113623C.1
ctttttgcttcctgcggtcgtcatcgccgcgctcgagttgtcgtgctggtgtttttggtcgcacacccgagcgaggctggtttggatgtggaagtaatggaggttgagatgaatggggatggtggggaggaggtagggctacttggggaggataagaaagaggttcaagggaatgaggataacgagttcgagctggaaatgggatcacaattgccgagggcaatcgggttcgtggaggcatggaaacttcctggcgtggcaccatatgcattctgcttatttttctccaaactcgtcgcctacaccttcctctactggttgccattctatatcaggaataatgccgtggcaggtcagttcttgtcacacaaggcttcaggaattttatcaattgtattcggcattggaggcgtcttaggagggatttcggctggttttctctcagatgccatacgtgcccgtgcaataacatcagttctgttcctcttgctgtcaatcccatcactcgttgtgtaccggacatatggaagcatatccatgcaccacaacattgctctcatgtttctctctggttactttgtgaatggtccatactctctgatcaccacagctgttgcaactgatcttggcacccaagacgctatcaagggaaattcacgggcgctggcgacggtttctgcgataattgacggcactggttctgttggtgcagctctgggtcccttgcttacgggttacatctcaactagaggatggaatagtgtatttttcatgttgattgtttccatatcacttgccatcctgtttttgatacgactcgcaaagggcgagatagtagccaagcttagcacatggaattaaagtagtaatgtatgttcaattgaggatgctaaaaaaaaa

SEQ ID NO: 14955 - DNA, 193 bp, Zea mays
  Clone ID: MRT4577_113624C.1
tgttactggtacagagacatcaaagagcggtcctccttgtgagtctagagctagacgaggaggaggagagcgatgctaagattaatcgtgataccatgattggatgaaactattatgacacttgagttgctgaatttttgagtcttgttgttttttgttatgtggttttacgatatcaatagttggtttaata

SEQ ID NO: 14956 - DNA, 523 bp, Zea mays
  Clone ID: MRT4577_113625C.1
cccggtcgacccagcgttcgcaaattacttccaccccttccacatgatccgcacacattttcctttggcggatcgaaggagggacggaggtgatgggtggcgggctggaggtgcacaaaacccggcggtatctatgagtggaacgccggccgctagaacctccagttcaacttacggctggaccctcgcgcaacctcgtccgacagtcggccgtcttcggcctggatgtccccatcctgttctacaccggcatctcacgctaattccatgtgcaggacgaggatgcaggtctgacatacatgaagtttctgtaagcggcttacacagctgtcaaatacatcacattccttaaccgttgctgcgagcacgggagactctattcacctggtctcggtcttgttatactctcaatctgatgaatccataactaatgctgaattattgttcctgatccaaatgaataaagtgtaatgactccccttttcaatatactgaaactgtacatgtttgaatttattcggtc

SEQ ID NO: 14957 - DNA, 402 bp, Zea mays
  Clone ID: MRT4577_113626C.1
ggccgcttttttttttttttttttattgggtttttttttttttttttttttttttttttttttcctttcttttttttttgtttctttttttttttttttttttctttttttttttcggcgggataactccccacacaaatctggcttatttctaggaaacacatgggctgatgggggccccattggcgggcacctccaatatgcaatgaaaaggagggcccccccaacacgggttggtctcagggaagggtacaaaaaaaaaacccggttcgtacgcaaaaattgttttagcgcccacagagaggtcacccccaaggggtaccccccccccaagggataaaaaacccgtggcccttggggggggcccccaaccaaattcaacccccccaggcggggaaacgg

SEQ ID NO: 14958 - DNA, 630 bp, Zea mays
  unsure (1)..(630): unsure at all n locations
  Clone ID: MRT4577_113627C.1
ccaacccaaacaacttgactctggttgttccacactcaagtacgaacaccgcccatcgaccaccaccctagatctagacttctgtcaccctcattgactggcccaatgcttgtccacatcacaaaggacgtgtccaccacgatgggtgtttgtcgctattcacccgcttgaccaccatcatagtcaacatcgttgatcgcgacatccacgatcgtatctgccatcactaagccattttcatctaattcccctaattggctagcttctttctcactcgagttgagttcgtaagtgtgagaaacttaacgggggtctagcctagacgatggttttctactaggatcgcttcccacctaaggctccacgccaagttctcgtcccattgttggctcctttcataaaagctcccatgctgatctcgaattccctctgccaactaagcgccatcccaccagtttcgcctctttgctagttgtccacccctagatcgcatctcccatcaagcaacctccccttcaattgtttggacatctgacacaagaagataaagaggggnggagcatgctaacatacctcaagccttcccttcctcactactctcgccatcaaggctagaccactacacctctt

SEQ ID NO: 14959 - DNA, 396 bp, Zea mays
  Clone ID: MRT4577_113628C.1
cggcgagctgccgcgcgccatgggcgtcaagctcgacctctccgacaagcccggggggctcggcgtccggtcccggcgctacgcgctggtcgcggaggacggcagtcgacaaggtgatcaaccgttgaggaggggcgggacgtgcaccaacagcaacggccaggacatgctcaacgcgctctgaactcgggaccccatggttgagccgtctcttccaggcaagagttggtttcttttccctgaaaataatggcaaccgcaacggaggcttgggttactgccggcactggtgagaccgggactaatactagtgcactgaacagatgcaagtttgttgcgaacatggctttatgggagtacgctagatgcaattgaggacactctatgaagcatgact

SEQ ID NO: 14960 - DNA, 702 bp, Zea mays
  Clone ID: MRT4577_113629C.1
atgccgctcccgatcccctgcccccgccatcccctacctcctgatctcgcgcgcgcccggccacgaatcacccgccgcgcctcccgcggaacacgcctccacccgcgtcgccctaccgcccgcccgcaaacctcgcccgcgctgtcgcgtccgccatctcctcctcgccccactctctctcagatctgtgtccgcgacatcctctgccagcagcagggattagcttttgaccgcgtcgcggcgtcattctcgaagtgcgcttttgctgaaaagaatgaatgcatggttttgggtacctacaagacgattccttacgccgccgcgctagagcgcaaccacggggagtgtgcggtgctgctgaacccatcatcggtggagccagtgccactcaccgactcacaggccagtgacgcggagctgtgctgcatctgcttcgagcaagcgtgcacgatcgaggtgcaggactacgggcaccagatgtgtgcggcgtgcacgctggcgctgtgctgccacataaaagcgaccaaggataccttgctgacgccaaaggatgtgcagctcgagggtgactcgaggttggcgagcctgtccattggccagatggacgtcacagtgtcgcaccatcgactcggcggtggcgatgctcctccaggagtccagggtgcattagaagcggctggcgtcactatcttgcttgtatga

SEQ ID NO: 14961 - DNA, 294 bp, Zea mays
  Clone ID: MRT4577_11362C.1
ggactccaccaacccatttaaaggttttcgataattggaagaattggtaaaataaaaaccaaattggccactccctagggccaaaattgcctgcccgttccaaggggggctatcctccaaaaaaagaacaggcccgcccccccacactggcaggggaaaacccccaacattgaacagcctaatacaaaaaccaaagggcaccctctttaacagggggtttgggttttaccccccccagtccacaaaaaaaccaaatgggtgccaagctcactttgggctttggacgcttgcact

SEQ ID NO: 14962 - DNA, 1196 bp, Zea mays
  Clone ID: MRT4577_113630C.1
cccacgcgtccgcttaaattaagtaactttatttatgtaataatggttcagtctatgttcataattctacgataagcacactgagtctcagattaacttttagcatcgcaatcattttatgccaacatatttggtgaaacacgtgctctgttaaacagttgcctagctgttactgcgaaagttaaacatggaatgttgatgtcgtgctaggtcttatagtgaaaattttatcttgagtatggccatttgatggaagatgtaaatcatttgattatctagacaatggcagctttgccagtgaaagcaaattttctgtgccctatactttgtgttgttaacagtataagatcttcgattatcagaatttgatactttggtagacacacacacgcaactgacagggccatggccttgtgagcagcagttccttggatagaagtatctattggtgattgtggtatatacaatacagcaatcttttttttgtggccaactgtatgtttcattgcacgcattctgcttgcaaaagtgttagtagatggcacatttgtatcaattggatagggccaacttaaaatgcggccgggttcttatttgggtaaagagttatctgtactgtgatgtgtgtacatattctttgttgcttggaaaaagtttcagattatgtaacatgacaaacaaccctctcctagcttccatcagtcactgtttcactgcaatcatactctttctacaaagtgtcttctgacctagttagagatatgtctttttttttgtcatgtatgtactgtaggcctgtagcttgttttcctttctggacatttctgacctatatctatgttctgtttgcatgcagaaaaaatgggcgcttaccagattacatgcctgattcatcggctaggcaaaggaaggtagaagttcctggtgatgaagataaacttacgtacattgctgtggtgatgaagatgaatttatctgcattgctgtgttgttctacatgtaacagggaatggagcaaagctgcataggcttgcttaagtccccagttctgggagcaattggcctcgaatcttgagtgcaatttatctgagtttctttccggaaagaattttgacattctatttgctagtggaactggagcagcaacatatgatttatgtgctacagtacccccatataatgagtgctatctatct

SEQ ID NO: 14963 - DNA, 1162 bp, Zea mays
  Clone ID: MRT4577_113631C.1
ggacgtcatccccgtgggcccgctcatcgaggtcggcggcgagcgggacgacgacgacggcgcggtgcgcggcgacctgatgaaggccgcggacggctgcgtggagtggctggacgcgcaggccccgcgctccgtggtgtacgcgtcggtgggcagcgtggtgcggctgaacgcggaggaggtgggggagatggcgcacgggctcgcgtccacggggcggcccttcctgtgggtggtccgccccgacaccaggccgctgctgccggaggggttcctggactccgtggccgggcgctgcgcggtggtgccgtggagcccccaggaccgcgtgctggcgcacccgtccaccgcctgcttcctcacgcactgcgggtggaactccaccctggagaccatcgcggcgggcgtgcccgtggtggccttcccgcagtggggcgaccagtgcacggacgccaagttcctggtggacgagctcgggatgggtgtccgcctccgcgggccgctgcggcgggacgccgtgcgggaggcggtggacgccgcagtggcggggcccgaggccgacgcgatgctcgccagcgccaggaggtggagcgcggcggcgcgggaggccgtggcgcccggcgggtcctcggacgcgcacgtccaggcgttcgtggacgaggtgtcccggcgagcttgtggcgtgcaagtggctaaggtcgtgccgccgtcgtcagaggagcttcagcagtcaccagtcagagtccaaaactgatcagcaagcagtcatcccgtgttggttggtgttgttaccgtccgtctgatacgaaccaatttttttgcttcttctaccgtcttgacgccatttgtcgcgcaacgtatactgaatcacgagtatagcttgggtttagctggcctctcgccggccgcgtggctttcattttccgggaaaaactattctttttttaaggacttgtttggatgcacaatataatcctttattatatagtctaaaaaaaaaaaaaaagggcggaaaaagcgaaataataaattaaataataataataaaaaaaatttttatttattatttttttattaaattttaaatttaatattttaaaatgggtgtccttttaaataattaaattttttttatcccttgctatatattaattaatttttt

SEQ ID NO: 14964 - DNA, 588 bp, Zea mays
  Clone ID: MRT4577_113632C.1
cgccctttttccagccttaaggatcaattgagggtagcatgaactgaatactgacctaccagcagagctagcagaacagatgctcctactaaaactggtcttaacattgcattcactaattgagctaactataaatctgactggagcactcacatgtaaaacttcatcagcacagggatgcaggggagtcaagatccagcttatcgtcaaaatcttccagcaacgatgataaggataggggttcaaggaagtgcacatcacgatctagatcaaagagtacaaagcagggaacgaagcaccgatcaaggcccaagcacagagacagtcacagtgacgaaggtccagatcgactctctaaattcttctggaagtaaggagtagatactggacccaatactcctcttcattctgaaccgtatattggagggtttggatgtaatattcaatacagattatatctcaaggtagatggaatcagtgaccatgttatcaatagaatgctcaacagataacagggcatggttaaggggcgtggctacctaaaactctgtaaggaattggtgagggattggtagattgctggacctt

SEQ ID NO: 14965 - DNA, 300 bp, Zea mays
  Clone ID: MRT4577_113633C.1
caatcatcacattttccttataactcactcacactatcacatcgaaaagttaacttaaaaaaataccacgacctacctcaaattaagctaacacattcttcattcaaccttcaccaaacattatataaaccaaaaaacttcttaccatgtaaacactatatcacaccaacatccatattcacacaatcaccttcatcatctttctcacttcaatttcattcacaatacttttaaccttataactacctatataccccttaacaacaacactcacatctcttaaaatatttcacatataat

SEQ ID NO: 14966 - DNA, 304 bp, Zea mays
  Clone ID: MRT4577_113634C.1
gagcctactagttggcggccgccctttgtttttttgttttttggtttttttttttggttgttgggcaaattcaaacatcaaacttaatcatgaatcgggagaataggggggagtacacacacgcaacacaaccggtccattattaaaccaacactgaccccacgcatgacacgaacaggaaaacctgtgacaacctcgatatggggagagggcaccagacgacgcgggcacatgggctgataaaacgacccatgacttactgaccaccacggctacagggcacatgggggagggagatcttctt

SEQ ID NO: 14967 - DNA, 696 bp, Zea mays
  Clone ID: MRT4577_113635C.1
actattcgcccttccgcatccagtttggtcgccttccgattcgaacctccccgaaatccgcagcagtcgacaggaggccaaaggcgccgccatggcccgtacgaagcagaccgcccgcaagtccaccggcggcaaggcgccccgcaagcagctcgccaccaaggcggcgaggaagtctgcgccgacgaccggcggagtgaagaagccccaccgctacaggcccgggaccgtggcgctccgggagatccgcaagtaccagaagagcacggagctgctgatccgcaagctgcctttccagcgcctggtccgcgagatcgcgcaggacttcaagacggacctcaggttccagagccacgccgtgctggccctccaggaggcggccgaggcgtacctggtggggctgttcgaggacaccaacctgtgcgccatccacgccaagcgcgtcaccatcatgcccaaggacatccagctcgcccgccgcatccgtggcgagagggcctaagctgccccctccgccgacgccgttagtgagtcggaatgagttgattctggttgtagtttgttcctaattgctgtgctaggtctctctgcttttgtgtagaagaaatatggttgttggtacaagcaagacgaacttgttatgtgatgatgttacttttggtttgcgatgaagcaaacgtatgtcggagaccccta

SEQ ID NO: 14968 - DNA, 687 bp, Zea mays
  Clone ID: MRT4577_113636C.1
aaacccatccgtcgcgatccacttcaagttccccaaatccccaaccccgcagcgcgcgcaggccgaagcccggttcgcagtcgacgagaagcaggagagatcgatggcgcgtacgaagcagaccgcccggaagtctaccggcggcaaggcgcctcgcaagcagctggccaccaaggcggcgaggaagtcggcgccgaccaccggcggcgtgaagaagccccaccgctacaggcccggcacggtggcgctgcgtgagatccgcaagtaccagaagagcacggagctgctcatccgcaagctgccgttccagcgcctggtgcgggagatcgcgcaggacttcaagacggacctccggttccagagccacgccgtgctggcgctccaggaggctgccgaggcgtacctcgtcgggctcttcgaggacaccaacctctgcgccatccacgccaagcgcgtcaccatcatgcccaaggacatccagctcgcccgccgcatccgcggggagcgcgcctagatcaagcatctgccttggcaacttccatcgccggattgctgcaatgtagtgtagctgtccgttcgtcgcctctggtttcagatcgtgttagcaataggcaataggccactttctattttgttgtaaaaagtatttctggttggttacatagttacaatgactcatttccatat

SEQ ID NO: 14969 - DNA, 266 bp, Zea mays
  Clone ID: MRT4577_113637C.1
ctctaatcattccgacagaaggaatcgcaagtcctcaaacatcttactatgccgcttagttagtatactgtaatatatatgtgtcggtaggaattaggatataatcttgtgagatttctgataatatgttgagttgccgatatgcaatttgatagctttatttacagtaagtggtataagttatgctatgtttcttccatgatgggcgattccaattgataggaatacacattctaataaagtattccttctttatttatatgttt

SEQ ID NO: 14970 - DNA, 661 bp, Zea mays
  Clone ID: MRT4577_113638C.1
actattcgcctttccgcaccctcttccgtcgccgtcgattcgaacctcccccaaatcagcagcagtcgaccggaggcgccgccatggcccgtaccaagcagaccgcccgcaagtccaccggcggcaaggcgccccgcaagcagctcgccaccaaggcggcgaggaagtcggcgccgaccaccggcggagtgaagaaaccccaccgctacaggccggggaccgtggcgctccgggagatccgcaagtaccagaagagcacggagctgctgatccgcaagctgcctttccagcgcctggtccgcgagatcgcgcaggacttcaagacggacctccgcttccagtcccacgccgtgctggccctccaggaggcggccgaggcgtacctcgtcgggctgttcgaggacaccaacctgtgcgccatccacgccaagcgcgtcaccatcatgcccaaggacatccagctcgcccgccgcatccgtggcgagagggcctaagctgtcctctccgtgaacgacggtagtggatcgggatgagttgattccggttgtagtttgttcctaattgctgttctaggtcttaagcttttgtgtagaagaaatatggttgttggagtaagacgaacttgatatgtgatgatgttccttctggtttgcgatgaagc

SEQ ID NO: 14971 - DNA, 628 bp, Zea mays
  unsure (1)..(628): unsure at all n locations
  Clone ID: MRT4577_113639C.1
ctcgagccgaaactggttgaccatgatgctgatatgaacgaatcaaataatttattggagaggatttcacagttgcatggttcaattagcacagtagagtcacagcttagtatggcatccttgagaggagagtgcctgggtagggattctgttggtcgattgtactgggttacaggaagaccttgtaagcgtcctcgtcttgttgcagatggaagcatgatgatacccaaggacagagacattagcatggttacaagccattctcagtcaacattcgatagaggttggaattcggcatcacttgttatttatgaatctgatgaagaaatgaagtgtcttgttgactggctaagggacattgatccaagggagaaggatctgaaagactctatcttgcactggcaaaagtctatttatcgccaggctagtttccccatcactgatcctccagtgtccaagttttcaaagagtgagccacttatggagcttccaaacaccaatgcttttatagttttggagcaaaagtatggtctgcaaacggatcaggacactagtgagctatccaaaaggagaggaacgaagtcaaggtncgggttctgaagaaagagtatatcgctgcgactgttta

SEQ ID NO: 14972 - DNA, 389 bp, Zea mays
  Clone ID: MRT4577_11363C.1
cttcgggaagacggggatgcacgcaagaactcaacctataccaaccgatgcgctacagagacccactgcatcggcaggtctaaaaacacctgctacaagcatgttccaaaggaacgaaaccgaccaccaaacgcatggactactggttaggaaccaaataagggtggctgccctgccggaggacagcgagccctaaaccgggcccacagggcccgaaccttacggttagcgaccctacaccggaccgcttggcacccggttactaaggcgcaccatggtgggcaaccaacagtgggcgctgtattaagccaaaaccttcatcattcacgaacctcttggacctggcggacaccatggtcctcttagggctggacttgggcaaccagacc

SEQ ID NO: 14973 - DNA, 757 bp, Zea mays
  Clone ID: MRT4577_113640C.1
ggatcgaatgtcacatctttactatataataggagttatgtacaaaataaataaataattacattataaggagacaacggtccagcaacccaaagttgactgggagacgacggcctagatctcttacaaacatatcgcagcaacctccatgcgcctcatcctgcggtacctgttcttgacctgggacttgagattccaagtaccaacttgctcttcagatgacacgtgtcctcaccgcaacgtcaagggtgcgaaggatgctgcccacgcgcgcaggtcgaaccatggcgggtatgctattccggcgagcaattcagtcggatcacggagcccaatcctcccgtagatgccacagtaatctccgccaggataggatgggtcacccagacccctcacaggaccccgaacggtggttcataccgccggccacgacagcgacatggatctcccctccgtggcactgcttttctcgatttcctgcgcttggtggcgtggtcaggaggatatgaaggggaagaacggaaccccgacttcatttatatagcgccagaaggtcgttttttgaatcacacggtgatttcccgagctctcggggtacagttccgcggccggtggcgaagctgttagctgccctccgcacaatccggactgtcagcgagaaaatcaggggaggggttggtcgagcagtgcgtggatcatgggcgacaatccgggaagatcaccggcagcgcaaggcggttcagcgcccacgcgtccg

SEQ ID NO: 14974 - DNA, 409 bp, Zea mays
  Clone ID: MRT4577_113641C.1
cgcgaccgccgggaccaaaaacactcctaaaaaatttttaccagaggaactagcggaccaggctcgtccgttttgaaaccgcgaagggcttacctaacctacttttcccagatcgacactgtgccgctcgtgccctccactcccggtccgcccaaccaataatccatccatccattcaccaccaccaccccgctgctgcgatgtgcggtggcgccatcctctagggtttcatcccgcacgccgtggtggcggaggctgcggccgcggccaataagaatcagtagcagcggtgcccggtgactgcggacctgctatggccggggcccggcactaaagaagcttcccaagaccagtaagaggacttcgagggcgacttccccgagttcgagcgcggccttggcgaggatga

SEQ ID NO: 14975 - DNA, 1251 bp, Zea mays
  unsure (1)..(1251): unsure at all n locations
  Clone ID: MRT4577_113642C.1
gcggacttgtccctgtccctctcgttttgcgccgccccatcccctccggccgacctgccgcccccggtctgggtgttggtcagcccgccggcgcggtgccggcccggcgccgcgtgctccggcacggcgccctcccccgcgccctgggggcccggggccgtgggccccgcgcggggcgccccgcgcgtgccggaggtacccgcccgcgcccgccgcgcgctggcccgccgcgcgcctccggtcgtcgtcctggcggtgctgctctcccctctcctccccggcctggtggccgctgacgttgcccacaacgacgttctcaccaaggtccaggtccctgtagttgaagtaggcctccctcgggttggagctcacgtacggtgccatgaacgcgtacaagtccctgacccacttggtctgcacggctccgtctcctcccccagccatgggccagaagttcatgtactggatgttgtacagcacgccggcgcggtgcgggaacggcgtcgccgactccggcacggtgctgatctgcgcgccgtaggggtccaggatcatgagccccgcgttgggctgcgcgagcctgctgaatatgttggcccacacgtcccgggggatggcctgccggacgtagtcggacgtggccttgtagccgccgctgaacacggacgcggaggtggtccggttcaggaggtcctccaccgtggagccgctgccgaggtagatgtagggcacggattggatccacgtcatctccttgcaggagctgcggttgagccccagctccgggaagcggctgcccatgacgggcaggagcgcgtcgcacgtgccgaggaacagggactcgaagttggccgtctgctgctggacgaccaccctgatgaagaggtcgtccggcagggcaggcgcgacctgctgccacctggtgaccacgtccacggcgccctggcttgcgggcaccgggacgttgaacaccgccaccgttgccgggacaggcacgagcctgacctgccacgacagcacgacgccgaagctctcgccgccgccgccacggatcgcccagaagacgtcgctccccatggtgttcttgctgaggagcctccccctggcgtccaccagcacggcgtcgacgacgttgtcgatggccaggccgtacttgcgtagcagcatgccgaagccgccgccgctgaaatggcccccgacgccgacggtcgggcacaggccggcctcgaggtacccaatgggnaaaccccc

SEQ ID NO: 14976 - DNA, 304 bp, Zea mays
  Clone ID: MRT4577_113643C.1
gaaaaaaagaaaaaaaaaaaacaaaaaccccatactcaaaaaaaaaaaaaaaaaaaaaaaaagaaagaaccaaaaaaaaaaaaagaagagattaaaaaaaaaaaaaaagggtaattgtcccaaaggacttaaatccatccatgtccgtccgtcatgctacaatcccctcacaaggctattaaaaccaaaccaatcgtttgcttacaaataatactccgatcggaaaaatttcgaatccatttaatccaactgtcccctataatactttttccctcttagccggagcaaaagtaaaaaggtttta

SEQ ID NO: 14977 - DNA, 519 bp, Zea mays
  Clone ID: MRT4577_113644C.1
ggagtctcttgggtacaataccaacaccattgagccctataggttctaacaagcattatgctcatggatcatacctgaatgactgctgacgcgacaacaatcgccagacgtatataagctgcaatcattggcacaaaccatcaatacacagcagctatgatagctcgagctagctaaaaccaaccaattcaaccctatcaagcttcaacaagcaatctcagcaagaaccataccttccatacaaccaactgaacacactgcagcctgatgtttattgcaagcatcaactcttaccattaaggcacataacttctagctactctcactaacaacaaccaaccacatttaaccaatagaccgtactgaatactatcagcttatatacgcagcatcaacatactactaccatttaaccatgtagcttgatgataacgtgcatcctcatctacacacattcagtcacttacttactacctactgttatcaactaacacttcatccatcttacaactacaacaa

SEQ ID NO: 14978 - DNA, 160 bp, Zea mays
  Clone ID: MRT4577_113645C.1
cagaccattagctatatctactccagattttttttgaacccgaccgacaccatgagggggtggttcgttgccctcgttctcctggttctctctactagcgccacctttacgcatacaagctgcgtttgtggctgacagccactgtcgccgattttatcta

SEQ ID NO: 14979 - DNA, 793 bp, Zea mays
  Clone ID: MRT4577_113646C.1
attcaaatctagcaagccagccatctgcgtcgtaacttgttgttcttcccctccatcctacttccaagctaccaaggacgggcgcagacggaggaccagcgccgtcgtccaatcccctaccagcggcaccggcacgaaggtcagtcgtccaatcccctactaggggaacagccggcggcacgaaggtcagtcgtctcgtctcttcgcgcgagctcttcctcttctcttctttttttaatcgtatatacaggagaaagtagtttctgtgggggcgattggttccggtgcccgaaatcaagagcccggagctgggttgcttcggcccgataatatattgtgttgataagaggggatcgcactgctcggtagattggggatttctcgagggaattggttgggggagatgagttcgcgaacagtgtgcaatgtgagtgaatcctgagaggacagggaattagtttggtgttgcgccgcgaaccacaacgacttgtgatagggtggaatagaatcttgttcttctaatggaaagtatggaattgggacctattcgagtattcttatgaggaactattcttctgagaatctcgactcctaatctctaccttccccgtctagaagatctgccagtgctgccccgtctccaagtgggtcttctctttaaggacagcttgctgctcctcttcctatacaactgaagtgaagagagttttatatctgtattcgatgcaaaacctagctttgttcttattcttgatgccgatttattagaagatctccatgcctgccattactg

SEQ ID NO: 14980 - DNA, 378 bp, Zea mays
  Clone ID: MRT4577_113647C.1
ggggccccaaaaaaaagggggggggaaatataaagattgggtgtgagcgcaaaaaaaccagggggggggggggggcaaacaaacaaaaaaaacccccctggaaacgtaaatttttattttgcccccccccacacttttgggggtgcttatggggggggcccactttttgcccactttttggggggggcaatcccccccttgcgcccaagggggtaggggcccctcttttaaatggtttaggggcccttgggggaaaggcccattttgaaaaagcttttgccggcctccccccaaatttttttgttctgggggtacaaaaaccggtgtttttttgttgtgggggagaaaaaccaccccttgttcgcccggttttttttt

SEQ ID NO: 14981 - DNA, 252 bp, Zea mays
  Clone ID: MRT4577_113648C.1
gagatcatgaggaagcaatactcccctgtgctctccttgtgcctgatggcccttgtcgtaactgctatggtctaggtcatgtacaccacctcagcacaagcatgaatgagaggctacaactcgtacgaaccttatggaagggggggatacaactctgttcccatcaacggatgtggcagcccctagctagtcggtggatcggaacctgtatcagaaatcgaaataatataagactgtcttcaacggatcaca

SEQ ID NO: 14982 - DNA, 157 bp, Zea mays
  Clone ID: MRT4577_113649C.1
ccggccggaagacaatctgccttttttagcgtctttggctgcgcccggcggaggacgacatttatcacaccagcacctccgacacacggaagactgtacctggcccggcaccacccacctgatcctgatccccccccgaacgcacaaaccctcgctg

SEQ ID NO: 14983 - DNA, 404 bp, Zea mays
  Clone ID: MRT4577_11364C.1
accaccaacaaaccatatcgggggggggtttaatttaatttccggtccggcaccaaaaaggaccccaagaggtgtataaaaaaacaagactagcctaccggccccccccacaaaaaaaaaaaatttgcaaacctcaaagggccaaagggaaaacaaatttcataccgaacaaacgacaggcaaaagcccaaaccccaaatcccatatttctccgggtcccaaaaaaacaagcttattgcttttcccccccccccaaagacaactttttataaccgaaagggggtaaaaaaaacgggaacaaaaacctaacgaaaaccatcgcccaccattttttccccccccctacccagacccctgggcgcacccctgggcggacccccgggcccaccccgaaaaacccgacc

SEQ ID NO: 14984 - DNA, 1568 bp, Zea mays
  Clone ID: MRT4577_113650C.1
ggtacccttgtggtccggccgggagcgcccgcccagaatgcaccgcagaattccccactccactccaagcatgcagccccgctcggcttccgttgccaggctgccacgccgtcgccgtctcgccgcctaaaacctccctcccccccctcgcaccactccgctcacctctcttcacgccgccgtagccggcgagtagcagcgggtacgtgcctttgcggtgtaccttattggctgagccttccctttgccgaggaagagcacagaagcagggaggtcggcatggcggaggtgcatctaggtctgccaggtccctgggcggcggattacagggagatggccgaccactacaccactaagatcggtggagtccctgattggccaactggtgatatgggcttcaagcccgagactcttcagtgcagcttatgtgggaccaagctttgtcttgttgctcaggtacatgcgcctgtggcaaagctaaacattgaggagaggataatctatgtgcttgtttgcccgacaccagaatgtggacctaaacctcaaagttggaaggttctaagagttcaaaaatgccataatgttatgcaaacagaaggtggtggtgatgaattaggtcaaccgaatggaccttcttctacaagtcttccagaagaacagagtgataaaaataaaattcctgagacaaatgatgacgattttgatctagatgccttagccgaagcacttgaacaagctgcaactttggcatcaaactcaaagaagaagaacaaatcgaagcatgctaatgctcctgtaaaacgtcctgtattgaaggagcaagcatgtgatctgagcatacctgtccttccttgtttttacatacattataataaggaactatatgggggcaaaggcgctgtgggttcaagtagcagtgagttggttttggacaaagaaatcatggatgccgcaaatgacgaagaagaaaaatgggaaggagaaaagtatgagtacgatagagctattggtgctgacagaacttttttaaaattcaagaaacggctggatgcatatccccagcaatgctttaggtattcttatggtggcaagccactgttggctacaacaaaattacaagatcctggcacctgtaggctgtgtggttcaccacgccagtatgaactgcaattgatgtctcctttatcatactttctccatgaagctggagacggttcctcaaattatgcacccagcagctggacttggctgactgttataatatacacctgccccaagagctgctgcccgtcctcatgcggtggaaagccccagagctgttgttggggagcagcggaggaggagatcctgattcaggaggatgaagtcctttaggatctaaccagtgctggttgagaaactattcccgatttgaacatgtaatatgcagtttttttttgttctccaatggttagagttgtaaagctatctgaaattttgaagtgtgttttgttattgtgccctggtatactgcagaactgtcatacttcacacagtatcatatcagactagtaagatttttttttcga

SEQ ID NO: 14985 - DNA, 1517 bp, Zea mays
  Clone ID: MRT4577_113651C.1
cctccctcccccccctcgcaccactccgctcacctctcttcacgccgccgtagccggcgagtagcagcgggtacgtgcctttgcggtgtaccttattggctgagccttccctttgccgaggaagagcacagaagcagggaggtcggcatggcggaggtgcatctaggtctgccaggtccctgggcggcggattacagggagatggccgaccactacaccactaagatcggtggagtccctgattggccaactggtgatatgggcttcaagcccgagactcttcagtgcagcttatgtgggaccaagctttgtcttgttgctcagatccgtgatggcacaaaacgcttgtatgttgatgaatcaatgtcgttccttgtaaaaaaaaactaatgtggttcggacttaaggtacatgcgcctgtggcaaagctaaacattgaggagaggataatctatgtgcttgtttgcccgacaccagaatgtggacctaaacctcaaagttggaaggttctaagagttcaaaaatgccataatgttatgcaaacagaaggtggtggtgatgaattaggtcaaccgaatggaccttcttctacaagtcttccagaagaacagaatgataaaaataaaattcctgagacaaatgatgacgattttgatctagatgccttagccgaagcacttgaacaagctgcaactttggcatcaaactcaaagaagaagaacaaatcgaagcatgctaatgctcctgtaaaacgtcctgtattgaaggagcaagcatgtgatctgagcatacctgtccttccttgtttttacatacattataataaggaactatatgggggcaaaggcgctgtgggttcaagtagcagtgagttggttttggacaaagaaatcatggatgccgcaaatgacgaagaagaaaaatgggaaggagaaaagtatgagtacgatagagctattggtgctgacagaacttttttaaaattcaagaaacggctggatgcatatccccagcaatgctttaggtattcttatggtggcaagccactgttggctacaacaaaattacaagatcctggcacctgtaggctgtgtggttcaccacgccagtatgaactgcaattgatgtctcctttatcatactttctccatgaagctggagacggttcctcaaattatgcacccagcagctggacttggctgactgttataatatacacctgccccaagagctgctgcccgtcctcatgcggtggaaagccccagagctgttgttggggagcagcggaggaggagatcctgattcaggaggatgaagtcctttaggatctaaccagtgctggttgagaaactattcccgatttgaacatgtaatatgcagtttttttttgttctccaatggttagagttgtaaagctatctgaaattttgaagtgtgttttgttattgtgccctggtatactgcagaactgtcatacttcacacagtatcatatcagactagtaagatttttttttc

SEQ ID NO: 14986 - DNA, 252 bp, Zea mays
  Clone ID: MRT4577_113652C.1
ctgttttttccaatacaattcttcacgtgtacaaggcatcagacagcctacatttaggcgccagtaatgttctggcgattacaaatgttgatgagcaaaaaaataaatcgccggtgagaaactttcacacactgtaagcgccaaacctatcaaaaggagaatgtcctctctatccccattcctagacccataaagccatagactatgggccaaaattgacttctgaggggagagagcaccaatctcgactac

SEQ ID NO: 14987 - DNA, 556 bp, Zea mays
  unsure (1)..(556): unsure at all n locations
  Clone ID: MRT4577_113653C.1
tccgcccagtcctccacccaggcgctgcggggacaccggggctttgcgaggagcagatcgcactgcacaacaaccgaatactgcatgcacttgctcaccctcgtacgatatgaaccctgccagcacctttgcagtggaggagctctgcccctcgcacgaacctgtatggcctgctcggtgctggccccaacctgcctactaatatgggcgccctcacccttgacaactacctcgcaaggctgatgcaaacacttggcttccagcctggcgtggccacactacatatcacncatgcgtcgtgccttcgatcaaccagcgtccacatcagggctggcacgcgcaggccaacgacataattcaggggagggcggactctgagaagcacattgactattaactgccaagcccatctcgccggagccccgcaagaaggctgaacaaaaacaatcataagaagcaagcggaggcggtgatgctggccaagaggatgaggcacgaggacggacaagtagcgctacccaatataatcatattatgctagtctatcttgaacttg

SEQ ID NO: 14988 - DNA, 525 bp, Zea mays
  Clone ID: MRT4577_113654C.1
ggcaggggcccccctcgggcctttctttaaaatggaaaggggcgaacctgggcccaaaaggacaggggaaaacctttagggaccaccaaaaaaccttcccgtcttgaaaaaaaggaaaaaggggttgcccacaaaccggaaaaaaactttgttcttgcttaggaaaaacccccccccaagggaaaaaaaaacggggcgggaggggggcaaaaagggcccccctcggctttgcatctttgggccccaaaaaattaaaaccttttcctgggcccgaggggcgggccaaactcggggaacccagccttgggaatccacatttggtggaaggggctgacccatcccaaaagggatcccccaatccaaaccctggacttttttttggggggagccccccccttgattttcatgctgctaggaccccgggcggggatttccttgctcatcctggcagaaatgccagggaacaaagggggccccccggagaggacgagggtgccctacaaaacccttcctaatatccccggg

SEQ ID NO: 14989 - DNA, 518 bp, Zea mays
  Clone ID: MRT4577_113656C.1
ggcttctcttctaatcttgctggaagacgaccctggtcaaatctgttttatcagccattccggtgtacctattaattgccttgaacgttcccagatgggtggtcaaaaccattgataaaatctgaagagcgtccccagaaatgcaaatttttcctttggttagctatgagaaacaagtgctggactgttgataatctagagaagagggacctgcagctagggctagcaaacttcatgagaagggtcgggtcgggtccttttgctttattgtaaccctttccctttttttgttgttgggggtttaaaccctggtgaagactttgttttctcattctctaatataaaaatacgcaactctcctgcgcgttccagaaaaaaaatcttgtagcctggtcggaagcatacacacaaacctgaaaatgccctcaatacgcagtatcttgtcacccggtctccagaagaccctcgcaaggggctgatgattgggaggcccgcaccaaccagttgcttataaaagt

SEQ ID NO: 14990 - DNA, 318 bp, Zea mays
  unsure (1)..(318): unsure at all n locations
  Clone ID: MRT4577_113659C.1
aaacacttgttcttaacaggtggtttttggataaccaggacgatcgccaacatgaacaccccctcgcttaacctaaaaaatccattctgaggaactgagagtttaacgagcgcttgaacaccttattttttgtgtgggccacaatgaacacgactgcgttagtgaccacactaaaaaaattggccagggagtcgatccacgctctataatgttacaaagaaaatntttgaatactagatctaaactgctggagccgggcttccaaaagccaaccccacatgccacccgaactattcctgtggtcaacgctcattgata

SEQ ID NO: 14991 - DNA, 479 bp, Zea mays
  Clone ID: MRT4577_11365C.1
cccacgcgtccggccacacactcgctctggcgccgatgagaataagcgatcgacgcgactgacgatcaactgtatcctgaacactgctgactgcgaactgattttgaaggataacactgaaactgcgaacctttgcaccaaggttctggagctagacagccaccatgtaatggctctgttcaggaaggtaccagcttacattcaacttgctgacctagagctaggacacgccgatgtcaacatggcactggagatctatcctgacatcagggatgtcaagatggaatatgggatcctggacgatacgatcaaggaatgcagctcgaatgacgcccactcctacatctacatatgcgccaagatgacaaacgcagcttttgaagtggacgatgctgagggctagcgaacggaataaaaacactgattgctgctgactaaggacttgacccgttggttaacttctcgcttgctgcatactt

SEQ ID NO: 14992 - DNA, 125 bp, Zea mays
  Clone ID: MRT4577_113660C.1
cccacgcgttcgcaacgaagtgcgagcgatctttcgtccacacgactcgaaccaccaccaccggggatcttccgcaccactcgcggggctcatagcgatggtttcgctcaccatgatgtcgtcct

SEQ ID NO: 14993 - DNA, 744 bp, Zea mays
  Clone ID: MRT4577_113662C.1
tcgaggccggccggggtgctttctcagaggtgggttggttctcctccccctctggatcggtttcggtttcgtgaggctctccggcgttcggtttcgtggttgggcggatcgagatggcgcggtcggatgttgagtaccgctgcttcgtcggcggactcgcctgggccactgacgaccactccctccacaacgccttcagcacctacggcgaggccctctagtccaagatcatcctcgatcggtagacggataggtcccgcggcttcggcttcgtcaccttctccacggaggaggcgatgcggaactgccatcgagggtatgaacggcaaggagatggacggccgcaacatcaccgtcaacgaggccctagtcccgcggcggccgtggaggtgctgcaggcggatacgcaggtgcccgtgcaggctgcggcatacccggctgcgcgccccgcaatgacgcggtgagatactgctccctgtcaagaagactagcgtgacgatggcggttacgctgaccaagttcacgtgtagcggcgccgtcatcgggtgcaccttcaaccaccgtgtctgcgacgcctactccttcaacatgttgcctcgtcgcgtgggccgcaatcgtccgtggtagctctgcgccaacaccgccggacccgtgcttccgtcgctccctagtcgccccacgcaacacaccacatcggtgcgcggcgtccaccgacgccctcatcaaccgcctcttctctcctcg

SEQ ID NO: 14994 - DNA, 274 bp, Zea mays
  Clone ID: MRT4577_113666C.1
attgatgcgctcgtgaggcttaccggaattactgcagagggccaaggtgtgaatgggggagtccttaacaggttcttgagcctaaactccagatgttgctgaagcacaagctacagctgctgatgaggaagacaattatgatgttgacctccatgttcaggagactcaacatgagcacaaagctgctgaagatcgtactgcaacgtccaatgcttctatcacgataacagaatctttaatgtcatgagatttacttgatgtgaatccatatgac

SEQ ID NO: 14995 - DNA, 284 bp, Zea mays
  Clone ID: MRT4577_113667C.1
gtgtgtacatgtgcttgccatgtgtaggagtctgggcacaagtgtccctgggcctaccttggtcctcctgtcctcttctggctactgcactctccactgggacctgactgtggggtcctagatgccaaaggggttcccctgcggagttcccctgtctgtcccaggccgacccaagggagtgtcagccttgggctctcttctgtcccagggctttctggaggacgcgctggggccgggaccccgggagactcaaagggagaggtctcagtggttagagctgctca

SEQ ID NO: 14996 - DNA, 863 bp, Zea mays
  Clone ID: MRT4577_113669C.1
cccccgaggtcggccgccgctcgctcgctcgctttataagcaaggccccagtcccgcccgatcgtcatctccatatccccgtatccgtccacgcacgcccgccttgccaccagccagcacccccctcaacccccggtgccgcgcaggccggttgctccgattgggagtgccaatcggagccaacatcagggggaagcacatgctgccgttcgcgcgccctagagttcctcattgatgtcgcctgtgatcagtgagatcctcctctcggggtttatgatcaactccacactccggcgccgcacccacctcgtccagtccttctccgtcgtcttcctctactggttctatgtcttctcataaactactcgcccccgtcaccgccacgcccctctcctcctccccgtccctgctgccttcttctccttcttcgtcccgttccatctagtagcatccaccgtcatcctcttctcgtttcttcgctccagtctctgccttcgtcgtcgtcgtcgtctctgtttcagtcgtttcctaaagctttaattagcttgcatgcacttccctactgctgctgctgctagcgaagacctttattagttagtagtgttaaagttattaccaacaagaagcagaaaggaagaaagaagggatcaagaagcagagagctgttctgttctttttcccccctctcttgcaagaaagggcgcggttcttgcggacggaacgcaggaacaatggcttcctccagcgggagcgggagcgggagctcgggcttcctctcggcggcgctggacttggcggcggcgggaacggaggaggagctgcgcgcgctcatggcgcagcgccgcgcaagcggatgctgtcga

SEQ ID NO: 14997 - DNA, 751 bp, Zea mays
  unsure (1)..(751): unsure at all n locations
  Clone ID: MRT4577_11366C.1
ccgggatcccttactcgcgctcggcacaccggctctagggcggcggcgctcaggctcgggctctcagcgacggcgtcaacggcttcccctcccgcctccggtcctccgcacaccggccggtgaccctgcagtatctggaaaaaatacactcctgcaaagaaaagattgacaaagcaaaagctgaaaccattactgacgatgaactcaatgcactacaaagcaagatggaagaaaaactgcaggaagagaagcagcttcgccaagagttaagagtgttacatgatgagcttgatgacctagaaatccaaagactttctataaaagaaagaaaggatgctgtcaagaagaaaaagaatgacacacagaaagcagaacgtacgctttccatgtgtctgtcggttacaaatatcatcccaaatttggaagaccaggataaggtttcaggatatattgtcgaccagaacaggaagaagatagagaagtttgaattcgagaacacgacgccaccagttgagatatgcgacgagctctggaagaagatttagcgtgtttcagatcattcttgttgtaaggcggcggaaacctgtgcctgtagattgtcgcggntgtggttgtcctcccaggatgcagtttgccatgttgtttgtatttagttcatgacgctgtactgttttgtaaggcggcggaaacctgtgtttgtatcgttagtttgccatgtcagattagctaanaaaaaaaaaaaaaagcggcc

SEQ ID NO: 14998 - DNA, 636 bp, Zea mays
  Clone ID: MRT4577_113670C.1
atcttgatataatggtgtccgaaggcttggaaataacacaacctgctctggaccctgatctatcaactgatatccaccatcgaatcacaatccgtaataagatggcaaaagttcacaggagaatatacgacaatcggcctagtatgaattgttctgacgagagcaaaggacctccatgtacaggaatgatcttattcatggatggggtcttgacatgaagcttggatattgcgctcaggttctcaatatatgttaacagtcttaaaagatattttgataggatgtctgttgactattgagggtgatcgaacagagaaagttggtgttattgacagtgagtatgtagttcatcaagggataccatcattaggagggccatcacttagcagcaagacacctcgaagatcattggatttgaggacccacatacgaagacaatcatcggctgagctggagaagttcaaggagaggtggaacagggctgtaagggaagatgaaggatggagggatccttttgattcttgattacttggaaagcagagtgtgacacttctgataacaaaactggccagtggccacagtcacagcagtagagtttggaagcggagagcatcttctgcttcatgtcaaaaacac

SEQ ID NO: 14999 - DNA, 2173 bp, Zea mays
  Clone ID: MRT4577_113671C.1
cgtgcatttcgcgctccgcggccctaggcgcctcgacaccggatgggtacaatttttgcggacagggggaccttcctcttcttcttcctcgtccccggcccctgcccctctcccctgcggagacggagcgccaccttcctcaccttctagaaagaactagaaccctccctccagaaccttgaagaccagcccagaccagaccagccccgaagctctccgccggccccgcccttgacgacatgaagcaccagccgccgcgccgctggggcgtcgtggcggcggtcgtcgcactcgtcctcctcgcctgcctccagatccagtaccaccacctcaaggtggatctcggcaaggccggctttgcctctgccacgcaagagaataacgcgatccgcagccgcaatcgcattcgctggggccccgacaggaacggcgcccactccttgccgcgcgggattgtccaccgccactccgacatgtccctccgcccgctctgggaggacgacactgcttccacccacaagaataaaaacagtgactacagtgctctcctcgccatggcagtcggcatctcccaaataaaaaacattgacactatggcccgtaagtttctgaaggaaaactatgcagtcatgctcttccattatgatggaaatgtagatggatggcgtcatcttgagtggagtgataaggccatacacatccttgctcacaaccaaacaaaatggtggtttgctaagcgttttctgcatcctgatgtcatggctatctatgatttcatttttctatgggatgaagaccttggagtggagaacttcaaccctagaagatatcttgatataatggtgtccgaaggcttggaaataacacaacctgctctggaccctgatctatcaactgatatccaccatcgaatcacaatccgtaataagatggcaaaagttcacaggagaatatacgacaatcggcctagtatgaattgttctgacgagagcaaaggacctccatgtacagggtgggtagagggcatggcaccatttttttctcgcactgcttggaaacgtgtatggtatctaattcagaatgatcttattcatggatggggtcttgacatgaagcttggatattgcgctcagggtgatcgaacagagaaagttggtgttattgacagtgagtatgtagttcatcaagggataccatcattaggagggccatcacttagcagcaaggtgcttgacatctcagcaacaaactatttttttagaaacttggagtccggtaggaccaaggatgaagtgtactgattcatccaaactttgtttgaaaaaaaaactaccagagcatcgattttccttgtgtgcttttcttttaccctagttggcatatacctgcatgatagtaatgttaggtgtcatgaattcatgatcgttcaataaaatttgcatgtgccgctactgacatcttgttgacgcagacacctcgaagatcattggatttgaggacccacatacgaagacaatcatcggctgagctggagaagttcaaggagaggtggaacagggctgtaagggaagatgaaggatggagggatccttttgattcttgattacttggaaagcagagtgtgacacttctgataacaaaactggccagtggccacagtcacagcagtagagtttggaagcggagagcatcttctgcttcatgtcaaaaacacttgtttggttataggatgatgagacggttggttggttataggatgatgacttacatacacacacatcataactttatccacatgagataaaagcgggaacattatcgtcaatacaaggagctgatggagaagttgaaactaacaaagtaacaggggatttccgaaagtgctgtaattttccgttggaaatatctgttcgggagagttgtatagtgtcatgatatacacacttgtgcagttatttgatgaggaaacttacatagcctagagcagatgtgtttcctatattattattgccttgtacaatgtaagatgaattccatgagtcagaaatagcatcaggtctgtatgcttatacttggacaagttaagaggatggcacggcatatttttgtgtcaccgcaccgaggttgtcgctctctttatgtgtatcaaaaatataaaggctcttgtttatgt

SEQ ID NO: 15000 - DNA, 298 bp, Zea mays
  Clone ID: MRT4577_113672C.1
gcaggccttccatagccattaaccagaaccgaccgagcaacagaggtggaggagagagcgcgctgagagatggatggctacagcaacctggccttgtcccctccgactccgactccgactccgacggcgagcggcgctcccagggcggcgaggccgtcgatggagctgaccaacacgaaggagaccaaggcgtgggagggcctggccatcggcgcggtcacgctggcccggaccttctccacgggctcgcacaggttctgcaggtccggcagcgagaggaggagccggagccggagcg

SEQ ID NO: 15001 - DNA, 302 bp, Zea mays
  Clone ID: MRT4577_113673C.1
tacgcaagcacggaattaatctcgagcccgctcgacgaacttttgtcacgcacccccccctttgaggtaagcggtgggatttttaaaacttttcagtcgctctaccacacatcctgatggaaacagaacttgttcttataaccataaaacacctgcagacgcataaaactatccagctatcctgaacaaatattcacctgttagatcacatgttgaatgaggcccttgcgaagaaatcatcaaccagactaacccatgtccaaaaatagaacctaatgacacagaacctggccttcatgaac

SEQ ID NO: 15002 - DNA, 264 bp, Zea mays
  Clone ID: MRT4577_113674C.1
cggacggtggtctggacgcgtgggcgagtggaaggggaaggtttgaatctccccgcacgcgcccagcatccgcctgccgccgacggcccacatgccgaccgcctacagcctccgcgcgccgccctccaccgcgcacagcgcctcatgctgcccccgccaccgctgccgctttgcccggctggttgaggggccgcccgccggaggagggttgtcggggtatcgtccgcgtccgcgtcgcccttcgacgagctgtacgcgcggggg

SEQ ID NO: 15003 - DNA, 121 bp, Zea mays
  unsure (1)..(121): unsure at all n locations
  Clone ID: MRT4577_113675C.1
gcctgtagcgtagtaactcggaattcgctcaacgctgcatacatcgacggcggggcgacccgganctacgctcgaggaatcacctagtctcggcgggttctcgttcttggaggccttccat

SEQ ID NO: 15004 - DNA, 402 bp, Zea mays
  Clone ID: MRT4577_113676C.1
gggacgggaagggggccccccttagtctttggtcccatggccaggcgaaggaacacacaagcgggcccagccaggccgggcctaaccaagctttttacggagggggggcctcccatcccatcgaaaaaataaaattacctcatcatgccaccctgaagggggggggggccttttcgactcccttcctggggcccttgaaccaccttttggccccggcccgccccttgcaaaagtaaagcttgcccccggaaaccggggccccaaaaagctggtgcttgccccccttgtccccgccccccgtcctggggagcacggacacggggtaaaactgcttgccgggaaaacggggggggggccctccaaaacgttggggggggccacgggcccggttttaaacccccc

SEQ ID NO: 15005 - DNA, 878 bp, Zea mays
  Clone ID: MRT4577_113677C.1
gtggctatgagattgatggttctggttatgactatggtgctggtaagtggtattctttccgtttggaaaggggccttatacttagcaatgccctcagggcacaaaaagatgccgaagatgaagggtgtaccatagccttgagcaaccttcgttccgaagtaattgaactaaggaacgaaggtctcgaaaaagataaaatattacattcgttgatggataaaataaaagaagacgaagctgctttcaaagctcaagctgaggcccagaagcgcgaaattgaatatcttcggaaacagctagccgaagctaaagaaaaatgcacagttgaagaagctaaacgagaaattagtgaacaatgggcaaatcatttagagaaaaacgttgaagagcttcgtgcatccaagaaaagatgttatgaaaagtctatagaatgtgttaagaaaataaaaactagcttcgccagcgttggcgcgttctcaagtgaagaaaatttcataagaggcgaccccgagggcccaattgaatgggtcagccacgaagctgaagcttttgaagaagttttgaatggctgcagagacatatgtgccttctcgggtgctagggggattgccactattttggagagaaaaggctgcgatcatgtgaaatccttggcacaaaccgaagccgacttatcttctgaagacataaaagacccttcggccgaagcaagtttggttggtggaaaatttttcaccgacatctgggaaaatggtggccgggagatggatcaagaaattatacggaaaagcaaaaaaggtattcatgacgctagaaaagtagcagaggctgctgagaaaagtgcggatctcgaagggcgaataggtattgactactag

SEQ ID NO: 15006 - DNA, 1733 bp, Zea mays
  unsure (1)..(1733): unsure at all n locations
  Clone ID: MRT4577_113678C.1
ttatgcaccgaccacgctatattgaaccggccacagtgcctgagtttgtcggtgagacctcttcggccatcgaagccaaggagccgactcccctngccgaatattgaagagccggccataatgccggtgatggagaaaatagaagaaccgagggctgaagaaacaaagacatcggaaattttaagtccttcagcaaaagttgaggtgccaacaccaatgccaagggcacaaagagaccttttaacaactcccaagaggaaaagaatggttaacgtgctagatgtgctggaaatgataaaatcttcaagctctacttcgaagatagctgccgaagctccaaagacacaaattgaggccgaagctgccaaaagtcaagcggaaactgaaactgggctttcagagccaaccaagagggaattcttggaaattgaaaaagaaacggaaaaagaatctgcagaagaaactttttctgagaaaatcgccacacatattcccgaagcatcttctgaagcttctgactatgtattacgtcatgcttcgggtaaaaatctgagcgaaaaggaaaaaagagaagctcaattctatgcgcaaaaattgaaatatccaaaaggggcgctgatattcaacggcagcggagaagaagacttcttgtattgtctccctcatagcaaggagatttctgtctgtcgggagatgagcaaaagcttcggattcccaacattagaagacgggctcttggtgttgtcaaaggacgagctagccgacagcttagcgtataatagtttaaaggtgaagcaatgtaggctaaaaccatatcaatgtgtaatatgggttcggtgtctgtatttccatggaattcccattttcttgaaacatgtactttgatggttgccaacatatcttgaggtcttaggctgcggagtagagtagcgccatttcctgctttagtagaaatgtagaaacaaattcgtgttagatgtacttcaataagaaatttctattctaactaaattccgtattataaataacagcaaagattaattcgaaatgtataaattaagacatttaggtatttagagttaacatgaccttaccatgtatggaggtaagaaaaccacagtattttctgtaagcacttaatagcaagaaacgtgaacagcgtggtgaaaaagaactatacagtttttttttagcagcaggtgcccatgttaataatatttgttgatataatattcaaaagccaaatgaaaatatgagtgtccatataattagttgagctgatttcaaaatgaatatgaaaatacacagtccaccaagtagtttgatccgcaattatatgaaattgtaatgaccaagctcgtactgacgatagcaggttaccatacacaatgttttcattagtgaaccaatgacaacgtccttcaggtgaatgagggacctgcaaaaagcacaattagtacatgttgtagatatgcacaacaattaatgtatcaaatatgcaaggtgcttaacaacacaatacaaatgtcttgcaaccgtgattccatgaatatgtgttaagcacgccatgtaatggtaatagatgagaaaaaatttggtaggatatttcatcaaacacacaccctacacgcacggctgagaacaactctaccttgctttccatttacgtacatggtaatgcacaaaacatgtattttaaacaacacttggagagacaacgacataaaataaat

SEQ ID NO: 15007 - DNA, 251 bp, Zea mays
  Clone ID: MRT4577_113679C.1
ctgtcctttgccctctaggtgtttagcagcattcctagcctctacccattacatgccagtaacatccacccccaaactatgcccaccaaaatgtctccaggtattgctgaaaatccctgggtggcacagtaccccacccccaccccagttgggaaccactgcagtttggcacatacaatggtgttgattttctttttgccacgtgggtttattattttgcacctattttcccagggatttggaattccctg

SEQ ID NO: 15008 - DNA, 1060 bp, Zea mays
  Clone ID: MRT4577_11367C.1
cattgggtacctcgaggccggccggggaggacagtagtagtggcccatcttcgtcgcagcgccggcgctccatctttcgctccatcccttactcgcgctcggcacaccggctctcagggcggcggcgctcaggctcgggctctcagcgacggcgtcaacggcttcccctcccgcctccgctcctccgcacaccggccggtgaccctgctgaacagtcttatggcggcaagcgcgggcgagagccagggggtggaaagactcctctcctatgctgaagatctcgtggccgtcctttgcgtcagcaccgactgcgacgacaatgcacaggtcggtgccggagtgcagaggctgctgtctgcctgtcgatccgagtctgacgatctcgagatgcagctcaaagagtatcaggaaaaaatacactcctgcaaagaaaagattgacaaagcaaaagctgaaaccattactgacgatgaactcaatgcactacaaagcaagatggaagaaaaactgcaggaagagaagcagcttcgccaagagttaagagtgttacatgatgagcttgatgacctagaaagccaaagactttctataaaagaaagaaaggatgctgtcaagaagaaaaagaaagacacacagaaagcagaacgtacgctttccatgtgtctgtcggttacaaatatcatcccaaatttggaagaccaggataaggtttcaggatatattgtcgaccagaacaggaagaagatagagaagtttgaattcgagaacacgacgccaccagttgagatatgcgacgagctctggaagaagatttagcgtgtttcagatcattcttgttgtaaggcggcggaaacctgtgcctgtagattgtcgcggtgtggttgtcctcccaggatgcagtttgccatgttgtttgtatcgttagttcatgacgctgtactgttttgtaaggcggcggaaacctgtgtttgtatcgttagtttgccatgtcagattagctactacttattgtgttttaaattattccaaattataagttattctattttttctgagagcc

SEQ ID NO: 15009 - DNA, 268 bp, Zea mays
  Clone ID: MRT4577_113680C.1
gggtgctgctccttccccatcccggctgtcggggtaggtggtgtggtcttgttaccgctcgcgctcttggggtctctgcctacctgggtcctctctgatccatccagggattgctctcaggggccgtgctgcctgcacggccctctgtggcgcgtcttcatgttccctccccttgcgccgttctacgtgtgcgggccgctgctcgtgcggctcctccggccgcgtctgctccccgctcggaatctctgtcgtcgccgctgctggcttc

SEQ ID NO: 15010 - DNA, 296 bp, Zea mays
  Clone ID: MRT4577_113681C.1
gacaggaaacgctattgctttccaactaaccttggtccgacacgagggggggcttaaacgaaaaacaaaaccggcatcaaataccaacgccacgccaccaggaccacagaacgaagactggaccttctcaaaaccacacaacaccactttgcttaaaaaaaaccaatccacccgaacccgaagcttacgctacccgaccctgccacgtgaaaacttctctttagcggtaccgaaactaaattcactggccggggcgttacaacaccacgtctggaaagacccaacccttacccaac

SEQ ID NO: 15011 - DNA, 348 bp, Zea mays
  Clone ID: MRT4577_113682C.1
gggtcatcaagagctttacatttcaaactgctcatttcatgggttgcacagcggtgcaacagcgtggaagttctaacatatttttccctgcggggctccagtttgccctctttgggggcacaatttaatttccagagggggtgggttgccacatgtgtcggagcctctcttccttagctaacctattcctgatggctttttttgcgacgatttcctcccgcgaacactgtgctttcccaccgggggagggcagggggtgtgtccacaattcaaggggctgtggatgcgcctctccttggcggactcatgtgtgggatctgtcaccctggtttgtatttgttcttgggt

SEQ ID NO: 15012 - DNA, 295 bp, Zea mays
  Clone ID: MRT4577_113683C.1
aaggccacccagttttttgaatggggttggggcaagctgttattggtgctaatagggggcggggggggggggttttaaaatgggtcccaataaaaaaaggggatacactaaccgggggagttgttttaaaccgaagggtagtaaacacgtactgggggacaaaattacatgggaaaaaaaagccgttccaaaaaagccccgggggcggggggccaagggggaacaaccttaggccataaattttccaggatttttgttttttaatggaaaaaacccttttttaaaaaatgcttgg

SEQ ID NO: 15013 - DNA, 401 bp, Zea mays
  Clone ID: MRT4577_113684C.1
attcgtctcgagcgggttgcggggatggccctcggcatcgcacctggcgccacacacacacgacacgtacaacgatgcccggtggatggtgtgttgttgcatgagctcatggggctagaattgtcagagatcatgaattatattttctagtgtagtctatatgacaatattataaggaataaaacttctctaatcagtaatcatagatttaaccttttggaaagaaaaatttaagatcaagaattattcttgcatatgacttgaaactatgtttgagccattgtgttggccttttgtttagtaaatttgtcatatcattatacttgcttatgtgtcatacatactagtttaaatttaagttattggaagtagaaattgaaaatcaacacgatctaaatatt

SEQ ID NO: 15014 - DNA, 1118 bp, Zea mays
  Clone ID: MRT4577_113685C.1
gggtacctcgaggccggccgggagaagattagcagtcccacgcggcgttccacccgaaacccaaccccaagcaagcgtgcactgcatctgcgtagcccgttcaccacgcacgcgcttccctccctaccgggcgatctatggacggcgacggcgcgacgtgggggcagccgatgctggacaagcggccgagccaccgggagcggcatttcacggcgggggaagtggtgcgggacgtcatcatgggggtgtccgacggcctcaccgtgcccttcgcccccgccgcggggctctccggcgccagcgcgccctcctcgctcgtcctcaccgccggcctcgccgaggtcgccgccggcgccatctccatgggactcggagggtaccttgcggccaagagcgaggcggaccactacaagcgggagatgagaagggagcaggaggagatcatcgccgtcccagacaccgaggccgctgagattggagagatcatgtcacggtatgggctcgagccgcaggagtacggccctgtcgtcgccgggctcaggcggaaccctcaagcttggctagacttcatgatgaggttcgagctgggactggagagaccggatcccagaagggctctgcagagcgccttcacgatcgcactgtcctacgtggtcggcgggctggtccctctcctgccctacgtgctcgtctccgccgcgcaggatgccatgctcacatccgtcggagtcacgctggccgcgctgcttttcttcggctacgtcaagggccgcttcacggggaaccggccgttcgccagtgccgtccagaccgctgtcattggagcgctcgcttcggcggcggcgtacgggatggcgaaggctgttcaggcgaggtagttgtttgttggtgaggcggcgtcaggcgttttgggaaccagggctgcggtaaaactgaagaaagctgcatacttctgatcctttggggacttctcgttacagtgttaatcgcgggatctaatgctagtctactcttttgaataaatctagggaaggagataatcatagataaaatatatcttcgcctcactttggttaatgtaaagactctgaactacatattcaatcattattacaagc

SEQ ID NO: 15015 - DNA, 409 bp, Zea mays
  Clone ID: MRT4577_113686C.1
ggcaaagataaaatgggccctccctttttttcaacagatccctgccgttcaaattgtccatttgcaattgggggcacattaaactgcttgaaaaaaatcatgatttgcattatttattttttttaacaaaaaacatcacatgttttgtttttgggatgacatgtgccatgaaaaatgaccctgggggagccccatttgggttttactttacttgatgcaattgctgcaagacatttttattagactagttcaattttttgttttgccccccaaaattgttttggctccagttgtcccatttaaattttggggttttccacacaaacaaaatttttgtgggaggcctccttttgcaagtgaggattccacaaaactgcttttggccaatttgaatttgcaagggcaattt

SEQ ID NO: 15016 - DNA, 345 bp, Zea mays
  Clone ID: MRT4577_113687C.1
atttgccatcaacgacaaatggataacagatcctcaacgggagtcagtaacaaggggtcacatatgtaacaacattctaagagtagatagatgatgcattctggttcaggtcactattgctagatgtatataaaatgcaatatggacaggaggggagacgcaagcaagcatgcaagaatgagcagaatctagatgagattcttgtgctaccgtcctgtttgtacatttgggtctgtttttttggtccaagtacatttgggtctgaaatcagagaccatgacattatctaggactgtgcaagagtgaatgagaaatgaggaatgtagggtgggacagtgcaggggg

SEQ ID NO: 15017 - DNA, 397 bp, Zea mays
  Clone ID: MRT4577_113688C.1
ggaccctcgaggctggccgggcttggtcatctacgcactctcgcacgatcgcataggagagttcgccctcctatgccgccatggcgctctgtgtggagaagacctagtctgtacggctgtacaaggcgaaggatctctatcacgcggacttgacgcggatcgagatcgagctggacgacgtcgatatgatcggcctcatggcgtgccgcgccgacgtgctgccgtggaacccgttcaatggcgctcggatctccgggtatttccacatgaccatccacaccggcgtcctcattcgagcaccctcaccgcgctcggcgcctaggtccagtgcggctcccgtagatccgactgcacagcaggacacacgtccggcgtcgtgagtacggcgacgattcgg

SEQ ID NO: 15018 - DNA, 272 bp, Zea mays
  Clone ID: MRT4577_113689C.1
ctggcgggtgctagcaatggagtcggttgctgcagagagcgctccagctccggagaatgaacactctcaagagaccccggaatcgaacagtagtgtgtacaccaccttcatgaagtctcatcgctgctatgacctgatccccacaagctccaagctggttggatttgatacttcgctgcaggtaaagaaagccttctttgccctggtgactaacggtgttcgtgctgcccctttgtgggatagtaagaagcagagctttgtgggcatgctga

SEQ ID NO: 15019 - DNA, 482 bp, Zea mays
  Clone ID: MRT4577_11368C.1
tggttggaactttgggctgatttatgtgcttgtttatgtgcttgtttatgtgcttggttttatatatataaaagtaaaaagtactactataacaacggtttgtgtgcgcgcgccttctgcggcgtcttcttcggttgttgctgtggcggtgttgcccgtgggggtcgtgtgcgcggacgctgcggagggtaggcttacggtgcttgttgatgtgttcgaggtggtggtcgatgtgtttgtctttggctttgatcttgttctacttttggatctgttgctggaggtgtttcttagtagtagtctacttgatcagttgtgtataatgtagcctccgctacgactcactcagtaaacaaaaagactacacgctctgcccgacctctcggaacaatcaacagcacacacgtcgtgtttggacgacacacaaacacgcgtactaaacgtgcgtggtaaatgtacggaacgcgtccgttcagtcagtc

SEQ ID NO: 15020 - DNA, 717 bp, Zea mays
  Clone ID: MRT4577_113690C.1
aatccgccggccggccgggaatcctcaactgcttcattcctctgcctaaattcccccgaaataaaaacaaaaaaaccgtcaaaatggtcaaggctgtgagcgttcttcgcggtgactccaaggtctccggtaccgtcgtcttcgagcaggagtctgagtctgctcccactaccatcacctgggacatcaccggtaacgaccccaacgccaagcgaggattccacatccacaccttcggtgacaacaccaacggctgcacttctgctggccctcacttcaaccctcataacaagacccacggtgctccttctgacgagacccgtcacgttggtgatctcggaaacgttgagactgacggccagggcaatgccaagggttccgtcactgattctcttatcaagctgattggccctcacagcgtcattggccgaaccgttgtcatccacgctggtaccgacgatcttggcaagggtgacggcgaggagtctctcaagactggtaacgctggtccccgacctgcttgtggtgttattggtatctccaactaagcaattctgaactgaattgaacaaaggaaaaatgctattgcttacttagtggcttttgtttagcaaatcccagccacgagtaatgatgtgtctcatgatattcgatagcaacaatcaatccaatttaagtgattacagaatcaaaaaaaaaaaaaaaaaacccgcggcc

SEQ ID NO: 15021 - DNA, 841 bp, Zea mays
  Clone ID: MRT4577_113691C.1
agtggtagagcgtaggaggagtagtaaaactgttgccacgcttccgtgaaggcgggatcaccggcgccggcccattccatacgctcgctagctcgcagctggcccaggagtcccatggaagcaaccactcccctcttaacgccacattgaatcccaatcaacgccagcgtccgtccgtccgtccgtcccctccaccatacgccatagctaaccccgcaagcttcctcgaccgaccggccggcttcgtacgcccgtgcagagccagtgcgacgtccatctcctgccacccggctgggctagctagctacctaccttgtcctcctgtggctcgccgcgctccatgactccccaggcctgcgcgcggaggccatgagacgacccggcggcgccgcccccgtcgtcgtcctcctcctctggctcgccgcgctcaccttcgccttccacggctgcggcagcggcctcctccgttgcggaagctcggtggccgtggttgagcgggatcgtcgtccggcctctcttcccaggaagatgcttctggccgtggagagccggagcctcgacccctcgtcggccgccggtgctccacaagatcaacaccaccaccaccaccagcaccaccatcatcatcgtgctggtcaccaccatcgtcaacggcaccaccgcctcccaagcaaatggaactggcagagagtcccgccgtccgccgctcccggggacggcgaggaggtcgacccgcggtacggcgtggagaagcgcctcgtcccgacaggcccgaacccgttgcatcactgagggccgccgggcttcatccatgggcgattcttcatgtacttatcctgat

SEQ ID NO: 15022 - DNA, 1557 bp, Zea mays
  Clone ID: MRT4577_113692C.1
caggatggctgtatagtagaagccgtggccatggtgccgcgaattccacaccggcccacgtacggtgcaaggacgaaccgtgggcaacggcaccttccattccaaccagtactccatctatccagtagtacacaaacgcaacacattacatacatcccacgctctctgccgcacaggccacacacgccccgctccgcccgcctacccttcacccaagaaccgcccgccgcgccgcgccgctcccatggagacgccgacgccgcgggtgaagcccgggttcaacggcgtcggcgtgggcatggggtcgtccgtgaacggcagcagccgccgcgccggctactacatgggcccggccggcgcagtggccgtggcgggcggcggcagggcggcagcagcagcgccggtagacgggtgcagcgtggcgctgcgcgtgtttgtgctggcggcgacgctggtgtccgcggtggtgatgggcgtggaccggcagacgagcaccatccgaatcaccgtctccgacgcgctgccgccgctggaggtgcccctcaccgccaactggtcctactcctccgccttcgtctacttcgtggtggcgaacgccatggtgtgcctgttctcggcggcggcgctggcggcctgccggagccgcgccgccacggacgcgtgggcggacgcgtgggtgctggcgctggccctgctctactcggccgtgggagccgccgcggagttcggcatcctgggcgagcgcggcaactcgcacgtccgctggcctaaggtctgcaacgtctatggccgcttctgcgagcgcgccatggcggccgtcatcgtctccctcatcgccgcattcgccaacctcgtcctcctcatgctcaacatcctcaccatccacaagagctcttcctactactaagctagctactatactgtagagaagagaaaccatatacaatgcgagctagctactcatatatagctgttgctgcatgcatgcatggggattaactaaagtgatcgaccccaacttgttgaaaaaaaaaaaaaaaaaaaaaaaaaaaaaaaaaaaaaaaaaaaaaaaaaaaaaaaaaaaaaaaaaaaaaaaaaaaaaaaaagtgctttcttaaaggggggttggtttctcctccccctccggttcgggttcgggttcgtgaggttctccggggttcggtttcgtgggtgagcggatcaaaatggcggcgtcgaatgttgagtaccgctgtttcgtcgggggcctcgcctgggccacggacaaccactccctccacaacgccttcagcacctacggggaggtcctcgagtccaaaatcatcctcaatcgggaaacgcaaaggtcccgcggtttcggtttcgtcaccttctccacggaggaggcgatgcggaacgccatcgagggcatgaacggcaaggagctggacggccgcaacatcaccgtcaacaaggcccagtcccgcggcggccgtgaaggcggcggcggcggcggttacggtggtggccgtggaggcggcggctacggcggtggcgggcgccgtgatggcggcggcg

SEQ ID NO: 15023 - DNA, 309 bp, Zea mays
  Clone ID: MRT4577_113694C.1
acgtgagctgacgctgtcactcgcgatagttgctagagagagagagagagagagagggcccgagagccgaggacgagtgcagtctggctggcgtgatgctgcttcggagcgcgtcctcgccgctgctcaactgcgggcgcgcgccggctgccacggcgatcgtcgagcacctggccgtggttacgccgatgttatcaccggcagtggctgcgcctaggcaagggccggtgctgcgccgcgccatgtacgacggggaccatatcgcgccgatcgtgcccaagaaggacgattgacacggcatggcgccga

SEQ ID NO: 15024 - DNA, 500 bp, Zea mays
  Clone ID: MRT4577_113697C.1
ggcccggccctttttttttttttttttttttttttttttttttttttttcaagccacaaaactttcatttagccaaaaggcgaccaaccccccaaaacaaatggcagggcttggaatttggatacctagcaggggcgggtttcattggtacattaacattgaaattgggggacctggttttattacaggggggggagacccacaggtttaacttaacaaccaaacaggggggccagaagcttaaaaaagagatgggcccttgccctttttggttccaccaatctaaaaaaggttggattttttgatggggggctgggaggagggcttggaactttggcactggagctttaaaacaatttttttggggggcttggcctttttggggaaaacaggcttggtttgaccaccattttctggctggttgggggcataacggggctttccctgggcagacagggtatccttggcctttttatactggggcaccttggggagggggg

SEQ ID NO: 15025 - DNA, 312 bp, Zea mays
  Clone ID: MRT4577_11369C.1
tagccggcggatccgatccgtgcgcgtgctgctgtgtgtgtgtcggtggagatggccacagcttacgctcccatggcgagccaggtgatgaagagcagcctcgtcgtgcactcgaggccgaggggcctgtcaggcgctgctgcgctcacaaggcggcccggcgggttcaacgttcaaggcaatcaaccccaaaaaggaacgttacaagttgttcaacccaacaaccgggaaccctttcatcggcagcctgaaaacgccggtcacttcaagcccgctcgtggcttggtacctctccaacctcccggcctaccg

SEQ ID NO: 15026 - DNA, 243 bp, Zea mays
  Clone ID: MRT4577_1136C.1
ggtgggccccgcggctgcgcctcctcgttctggagcccccgggacagggtgatgttgccgccctcgagggcgccggaggtcgcggccggggtgacgggcccgccgggggtggtggcgcccgcgggcgccggggcgatttcgctaacgtttgcggccccgccggcggcatctggtccggcgcgctgttctggccggggtcggtcgggttggtgcggggcgtggcggggcccttggcggggggcg

SEQ ID NO: 15027 - DNA, 209 bp, Zea mays
  Clone ID: MRT4577_113700C.1
tactgtcactccccgacacgcgcacgaggtgcagttttactccgaccgggccaaggcgccactgccatggacgcgggcggtccgccgccgctgttcctcctgggcgccgtgctggccgcggcgctggggtggctgctcgtggtctggcgggcggccgcagggcggcagctggccacgtctgagcggctgccgccggggagcacggggct

SEQ ID NO: 15028 - DNA, 2126 bp, Zea mays
  Clone ID: MRT4577_113702C.1
ttgggtcccctcgaggccggccgggccggggaaaccctggctgctctcggaccttggacgacacgtcgacaccagtgcagcagccaccaaagatccggcccgcccgcgccgcacgagaccgccgcccgcgccgcatgagagtcatgacgacgccgcggcggcacgctgatccgtcgccctcgccctccctcttccccgccgcagcttctctcccgcctccgctccggggcctccagtttcctggcgcggcagtacagcacggagaagggaggcgataacaccggtccttcgaagccgaaaggtggtggctcctccgcgccaaggcacctcaggccaggattcgtggatccttcatcatggaaacattttgactcaagggctgttggcattaaaccgggtgctatacatacagatgcatgggcggttttaaaaaagctcagacgtgaaggttttcaagcttaccttgttggtggctgtgtgagagatttgctactcaaaagggtacctaaagattttgacgtgattaccactgcaagtctcgaacagcttaagaaaaatatattcaggagatctaggattgtaggcaaacgctttccaatatgtcttcttaaaatgcgtgactctgtaattgagatttcgagctttcgaacagttgctaattatgggaatagaagtgaagtggtagattatgtggcagagttgaatggctctgacgttagggatattcttcgctggaaggattctatgagaagagacttcacaataaatggtcttttctttaacccgatgaactgcaaaatttatgattacgtgaatggagtaagggatatgagaaaaaacaaagtgtgtacagtgattcctgctcacatttctttcatggaggaccctgcaaggattttacgtggcttcagaattgctgctcgccttggtttccagttttccagtgaaacttctaatgcgatacgtgatttttcttcatctataaataatatcgataaggcaaggctgatgatggaaatgaattatataatgtcttatggagcagcagcaccttctgttaggttgcttagaaaatatggactacttgatattttgctgcctttccagtcagcatatttgtctgagcagatgaaaggtggttcaagtgacagacatctgatgcttatgaaattactgtctaatcttgataggttactctctgcggaccggccatgccatagctctttgtggctggcgttgttggcatttcacagtacattggttatatatccacaagacaccttggtaataagagcttttgctgcagtgttgtatttcggaacatgggaaacaacagtcaaatttctgagagaagaagttggagctgaagttccatttgccccagagacaatggggccttctcggaccaaactggattgtcttaaggaacaaacgtcacatctagcatcactagtcaattcttcagtagatatattgacatgtcctcatgatctggagcaatcgctagccagattctcggaacctctgcaattttcaggagtggtagtcgcatctaacaatgataggaaaaagttgtcggccgtatttgagggccttgcttctgacctacattcatatgatgggagaagagggatgcgtgggattgattactcgtcgctgaaacttggggatcttgccgaggtccgatttgttctcggtaaagtgatcatggacacaatgtacgacaagttaccatgcgaatctactgaggatgagggcgctgctgcagatgttgctggtggaagcctacctccattgtccgcattgttttaatcgtagtgaagcatagggttcactcaacaaactaggcagcccttttctggttttagtcagtgctgcaaagcaatcgagttgttcagaattttcttgtgttgcaagatgaccacaacgacaactgtagacgtatttcagaatttttatcaaggaactcgaatgtgcagttgtagctaaactcccatgaatcctttcggtgaacatagggtgtgcacttatcaatctctttgctagggaaaactttaggcctgcgtcaccattgttgtgaaacatatgctgatatgcgtcttcgaacatacatctctttcgctccc

SEQ ID NO: 15029 - DNA, 527 bp, Zea mays
  Clone ID: MRT4577_113703C.1
ggcatgataattatttatttttttatcattaactattattattgaaaacattttttcatgtaagcttaaacggccccactcggggaacggggtatggcttaaaaataaagcctgacgggggtaacagcacccatcgatccgcagtccatgctggttgatgcatgggtctgctggagcccaggatgaacacagcactaacaactgacacagagcgacctttaatcaaaaacacagatgggcaacaacaaacacgagacgaacgaagataaacactttggactagggtaaacaacacggtagcgaacaggataacttggccgggcgggccccaccggtcaattcctccaattcccgtcggagttgccctaaccccccccacggttgccacccccgtaaccgccgccaccaccaccgtagcccccgccgccaccaccgtaaccgccgccaccgccgtagcccccgccgccattacggggcccgccaccgccgtagccgccgtcttcacgggcaccaccgtacccgccggc

SEQ ID NO: 15030 - DNA, 544 bp, Zea mays
  unsure (1)..(544): unsure at all n locations
  Clone ID: MRT4577_113704C.1
ttctattgagtgcctggaacagtgctctctctttctgacctaggacaggtagtgttgctgatccgggtagtgtaccgtagcactgcactgtccgtcatccatctatctatcgagtcaaactgcagctgaacctgacctgaacttgtgcagggttcagggtgctccgatgaaagtatcctgaatctttacaggtttcagggcgctctgatgaaaaatatatgcattatcattaacacatgtgctctcggcatggcatgctgttgcggcgtgctgtttctttcaggattcttttggatcagtttcaagattgtgtctatccttgccatgggggttttggtgttgccggtgtacggtgncggatggctcacctgtattgaatttgcaggatatgtcttcagagcgtgcgctaagagggaagggtttttaatttattattacccaaacaaaccagtcaagaaaattgttttatttctctagtccagtctatgggtggagaactgttctatccaaacaagtcccagccaaacaagaagttgaatttgaa

SEQ ID NO: 15031 - DNA, 363 bp, Zea mays
  Clone ID: MRT4577_113707C.1
agtcactatattatgggtgaacaagacgcaccagccgttgatcatggaaacataatgtccaccgtggggccccaaaggcaccgagcacgggttcatgcttgtgatatgtcaacttggggtgacctacacacattattgtttggtggagggacgctattaataggagaggggagttgttaccctggcgggattgtgggatgtgtaaattggtgtttggctttgcttaagatggaaaactcgacctcccaaggaatataaacagacggttgggttgtgtaaatgatatgaatgggcatattagatactatgcaaacggaaactcctgatatctatacaatatgacctgataatattcacgtatat

SEQ ID NO: 15032 - DNA, 808 bp, Zea mays
  unsure (1)..(808): unsure at all n locations
  Clone ID: MRT4577_113708C.1
cattgggtacctcgacggggcggggggcggaaataacagcgttcatgaatcatgacgaagacgaacaccatgagaagccacgacctccatggttacagccaccgccacctactcgtacagtcttcaatcctgcttttcctcggaactttttccgccgcacaagctgcatccgacatcctcagcaagggcagtaaccttacctatggcgagaccctggtctccgctaacgggtcgttcacattagggttcttctctcgcggagtgccggcaaggaggtacctgggaatctggttcacggtgtccaactccagcggcgacgctgtatgctgggtagcgaaccgtgaccaccctctcggcgactcttccggcgtgctggcgatcagcgatacgggaagccttgtcctgctcgacggctctggccgggcggcgtggtcttcgaacacgaccgccggcgccggcgccgcttccccaacggtgaagctactcgagtccggcaacctcgtcctgctggacgggaacgacggaggagtcgacgactacggcgtcgtgaagctgtggcagtcgttcgaccacccgacgaacaccttgctccctggcgccaagatcggcatcaacctgtggagcggcggcgggtggtcactcacgtcgtggcgtgatgccgacgacccctcgncgggggaattccggtacacgatggtcagggcgagggttgctgcccgagatcgtgacgctggactcgagcgacgncatcagtaccgcacgggagtgggaaaccggcggtggttcagcggcatcccggagatgactc

SEQ ID NO: 15033 - DNA, 436 bp, Zea mays
  Clone ID: MRT4577_113709C.1
cttcaagttcctcccatgttgctgccgtcgctggttcaccctgccactggaccaggactggtttaacgccgcgagctaggcggccagccaagacacgtgcaggtgcagacacggtggcgccgttgagcgtggccggcagcaccggaggttcggatggtggcgcccccacaaacttcctgaggacccccacgtggaagacgtcgtggagtctggcgccgggcgggagctgtaggcggacggccacgtcgttgatgacttcctcgacgcggcgcggcgctgggactcttgagcctggtggagacggtagcggacgtcgtcgaggaaggcagcgcgctcctccatctcttgcgccaccgcgggagcgcgcgcattcgccggctcataggaccggatggttggcgggtcgcgggcgtacaccacccggaatggcgtgtcg

SEQ ID NO: 15034 - DNA, 302 bp, Zea mays
  Clone ID: MRT4577_11370C.1
aaattgaaaggccccccacttaactggggcccgggttaaaatatccttaaccacccttatagtttgtataaagggcccccaaaccccttttccaaatccccctggccccttagcccagggccctccaaaatcctcacggcctttttcccaccaaggccattttttccaagaagaaaaaaagaaaaaaaaaaaatttggaggcccccccaactttaaaagtccctttctagttaataaaacttaaaattcccaaacaatcaatccaccacccgttacataatccactttccccccgaattacc

SEQ ID NO: 15035 - DNA, 237 bp, Zea mays
  Clone ID: MRT4577_113710C.1
ctctatgctcctttcctcctttggtttgaagccacgatactccacaacataattgggcgttttgcagaatgggcacctgtacatatccccttcgagcaacactttgaacggctgaggcttgggtaggtactggatgggctattggctcttggcgagccatggtatctccttgctggcgagcgtctactgtaaggaccatttctttcatacctttcggcaaggaacgcttggtacgat

SEQ ID NO: 15036 - DNA, 414 bp, Zea mays
  Clone ID: MRT4577_113711C.1
gggcaaaaagaataaatggatatcctttacataaactaagtatccccaaggacaccgggccaatttgggggaattccaggaaaaaacgaggctggacatttttataggggggggccctatgaatcaaataaaaccccttgggggggatcacagggggccctaaaaggagaaaaaaaagggggggaaaaaagtttagtgggggacccaattgtttctaagaccccttaaaatttttttccggaaccacaattcctaaaggactagcacttaatgggccccaaggggggatcctttttggaggccccttccctcaaaacattttccaaaatccagatatagccaaaccacaggggacaccttacaatgtggaatatcaatctatccaaggccagggggggggaaaaccgccaaccc

SEQ ID NO: 15037 - DNA, 4314 bp, Zea mays
  Clone ID: MRT4577_113712C.1
atgtcggagtacacccttgccgacgtcgtgaagatgatgcaggagatgcaggccgacatctccggcctcaaagagaagtccgcgtcgtcgtccgccggcggcaccatgcaggaacgccctcgcgacaccgaccgcctgcctaagttccagaaatgggacttccctcggtttgatggcaagaccgatcctctcctcttcatcaacaagtgtgagtcatactttcgccaacatcgttcctcgccagaggagcaagtgtggatggcctcatacagtctcgaaggcaccgcgcaactatggtacatgcagctgcaagaggatgacggcaccccgtcctggcgccggttcaaggagcagctcaacctgcgcttcgggccgaccagccggtccgcgcctttcttcgagctcaccgaatgccgccgcaccggctcggtcgaagagtactccaaccgtttccaggaactcctaccccacgccggtccgatggaggaggcgcagcgcgtccagctctacacgggggggttgctgccgccgctcagtcactcggtgcgcatcctacaccccgacactctcagcgccgcgatgagcctggcgcgggaggtggaacagctggagatcgcccgcgtccaggcggcgacaagaccggcagcgcggggtattctgccggcgccccctccacgaccagccgctccgacactaccggcgccacctcctcccttggccctgccagcgccgccggtgggtgcagcacacgcgcgcggcgagggcgctcgccgcctgtcacccgaggagatggcggatcgtcgtcggcaaggcttatgtttcaattgtaacgagaagtactctcggggccacaatcgtttttgcaggcgtctcttttttgtggatggggtggagatcgatgacaccggggtcgacggggacacgggcgcggccgagcccaacgccccgctcttctccctgcaggcggtggccggggtggcgccgactgacaccatgcagatcgcggtcaccctcggtccggcctccctggtggcgctgctcgactcgggcagtacacacaacttcatctccgcgacggcagcacaccggtcgggcctccccatccagcgccgtccacgtctcacggccatggtggctaacggcgagcggatctcctgtgccggcgtcctccgcaacgcgccgctcctcgtcgagggcgaaccatacccggccgatctcttcgtcatgccgttggccgggtacgacgtcgtcctcggcacgcgttggctgggggccctgggaccgatcgtgtgggacctcgccacccgccgcatgacgtttcagcgcccagggcgctcggtctcctggacgggtaccccacgcgcagcgcagccggcggtgcgcaccatgacagggggggatgcgttgatggaggctctcctggactcgtttggggggctcttcgccgctccttcgggcttgcctcccaagcgcgcccacgaccatcgcatcctcctcaagcccgacgcatcgccggtggctgtccgcccgtaccgctacccggctgcccacaaggacgagctggagcgtcagtgcgccgcgatgatcgagcaagggatcgtgcgccgcagcgactccccgttttcgtcaccggttctcttggtcaagaagcccgatggctcctggcgtttctgcgtcgactacagagccctgaacgccctcaccatcaaagacgcgttcccgatcccggtggtagaggagctgctcgacgagctccacggcgccaagttcttcactaagctcgaccttcggtccggctaccatcaggtgcggatgcggccggaggatgtgcacaagaccgccttccgcacgcacgatggcctgtacgagttcctcgtgatggcgttcggactctgcaacgctccggctacgttccaggcgctgatgaacgacgtgctccgaccattcctccgccgtttcgtcctggtattctttgacgacattctaatttacagcaaaacctgggccgatcacctccgccatctccgggcggttctcgacgagctgcagcgccaccggctcttcgtcaagcgctcgaagtgctctttcggcgcgccggccgtctcctacctcggccacattatctcggcagccggggtggctatggatccggccaaggtggccgccatccgcgactggccgccacctcgctcggtccgggcagttcgcggtttcctcggccttgccgggtactaccgccgcttcgtccacaactacggcaccgtggctgccccgttgacggccctcctcaagaaggatggcttcgtctgggacgacgcggctatgacagcgttcgcagcactcaaggcagccgtgtcctccgccccggtgctcgccatgccggacttcagcaagccgttcgtggtggagtgcgacgcgtccgccacagggttcggcggggtgcttgtccaggagggacacccggtcgcgttcttcagccggccaatcgctccccggcatcgcgccctcgccgcctatgagcgcgaacttatcggcttggtccaggccgttcgccattggcggccatacttgtggggtctcaagtacctcctcgaccagcggctggccaccatccctcaacaccattgggtgggaaagctcctgggcttcgacttcgaggtggagtaccgctcgggtgccacgaacaccgtcgccgacgccctgtcccgaaaagacaccgaggagggcgcgctgatggctatatccgcaccccgcttcgacttcatcacgcggctacgccaagcccaagctacggacccggccctcgtcgccatctgcgaggaaattcgcgcgggcacacgtacggcgccgtggtccatcatgggcgggatggtcgccatgcatgggcgcctctacatcccggcatcgtcccctctcctgcaggaaatagtggctgccatacacgacgatggccacgaaggcgtcctacgcaccctacatcggctgaagcgcgacttccattttccaaacatgcgccgtgttgtgcaggatttcgtcaaggcatgcggcacgtgccaaaaatacaagtctgatcacttgcggccggccggtcttctacagcccttgccgatcccctcggcggtgtgggccgacatcggcatcgatttcatcgaggcgctgcccagcgcccaaggcaagacggtcatcctcaccgtcgtcgaccgcttcagcaagtactgccatttcatcccgctggcgcacccgtacacggcagaatcggtggcgcaggcgttcttcgccgaagtggtgcggctgcacggcgttccgcagtccatcgtctcggaccgcgacgccgtgttcacttcggccttctggacagagctgatggagctcacgggcaccaagctcttcatgtcctccgccttccacccccagacagacggccagtcggaggcagccaaccgcgtcatcgccatgtaccttcgctgcttcaccggcgaccgccctcgacagtggctccggtggcttccgtgggcggagtacacctacaacactgccttccagtcatcactccgcgacacgccattccgggtggtgtacggccgcgacccgccaaccatccgatcctatgagccgggcgatgcacgcattcccgcggtggcgcaagagatggaggagcgcgctgctttcctcgacgacgtccgctaccgtctccaccaggctcaagagtcccagcgccgcgcctacgatcaacaccaccggcgagtcatctaccaggtgggcgactgggcccttcttcgcttacggcagcggccgtccgcgacactgccacgctcggcagcaggcaagctcaagccgcgctatgtcgggccctaccgcgtcaaggaagtcatcaacgacgtggcagtccgcctacagcttccggccggcgccagactccacgacgtcttccacgtgggggttctcagaaagtttgtgggatcgccaccatccgaaccgccggcgctgccagccacgctcaacggcgccgccgtgtctgcacctgcacgggtcttggctggccgcctagctcgcggcgttaaacaggtcctggttcagtggcagggtgaaccagcgacggcagcgacttgggaggagcttgaagacttcacggccagctttccacagttccagctcgaggacgagctggttttcgaggccgggagagatgtcatgtacggtaatacattcactaggcgcaggcgcgcgcgtgatgtccggcgagcaaccgagcgcgcggccgcagagcaggcagcagcgcatgctgcaaatcagccaccaatggcaagtggctga

SEQ ID NO: 15038 - DNA, 1166 bp, Zea mays
  unsure (1)..(1166): unsure at all n locations
  Clone ID: MRT4577_113713C.1
ctcggggtctcccgacgtcgactcgtcctcggtttccctccatgccctcaatctatcctcgggctgtccgctgtccccttcccgcgtcgaaaccctagctcgtcacctcgccgccgtgctgtccgctgtcctagtccgcggctccgcgccccatctctcttgccgtcgcatctgatgttcttctcccgcaacgcattccgcgacctggaccccatcgactcgccggcctccatggcgtcctcgaagaaggttgcgacccgtgacgagtgggagcggaagcttcgcgacgtcaagatacgcaaggaggacatgaaccgcctcgtcatgaacttcctcgtcactgagggcttcgtcgacgccgccgacaagttccgcatcgagtccggcacccagccggagattgacctagcgatcatcgcggatcgaatggaggttaagagagcagtacagtcgggtaatgttcaggaagcgatcgagaagatcaacgatcttaaccccacgattctggacatgaatccccaactatactttcatctncagcaacagaaactaatagagttgattcgcgagggaaaaacaatgaagctttggagttcgctcaagaagacttgcaccgagaggcgaagaaaatcaaacatttctcgaggagatagaaaaaactgtagcgctactgatttttaaaggtgtaaaaaattgcccttacagagaactattggatgtttctcaacgtttgaagactgcaagtgaagttaatgctgctattcttgcaagccaaagtcatgggaaagattcgaagcttccaagcttgttaaagatgttgaaatggacacaaaatcatctggacgaaagggcggcatatcctgcaatcaatgacttcaccactgctgtagtggaagatccatcaatatgaatctgctgcaaaaaggttgatgataactgagggtaggcaccaagcctgcctggtggctgcatgtggtttgccccggatctgtcaatagatcatcatctgcagcgattgagttcacccctttcaccagtgttgaagcaattaagctcaatgcaaggagttgacctgaaacttcacctgtgttctactacctgtacatcatgtagaaagacatgtttgaaccccttttcagccagtgaaaatattggatttgattttt

SEQ ID NO: 15039 - DNA, 672 bp, Zea mays
  Clone ID: MRT4577_113714C.1
gaggccggccgcggtccgctgtccccttcccgcgtcgaaaccctagctcgtcacctcgccgccgtgctgtccgctgtcctagtccgcggctccgcgccccatctctcttgccgtcgcatctgatgttcttctcccgcaacgcattccgcgacctggaccccatcgactcgccggcctccatggcgtcctcgaagaaggttgcgacccgtgacgagtgggagcggaagcttcgcgacgtcaagatacgcaaggaggacatgaaccgcctcgtcatgaacttcctcgtcactgagggcttcgtcgacgccgccgacaagttccgcatcgagtccggcacccagccggagattgacctagcgatcatcgcggatcgaatggaggttaagagagcagtacagtcgggtaatgttcaggaagcgatcgagaagatcaacgatcttaaccccacggttcgattctgtctatgttcctagcaaaattagttcgaataacggccgagacgtactttgttgtggaagatcctccaagtaggttgtggttgctgggttgtacagatctggttttcatcctcctgtaagtctgaaatagatgtggtcaagtagagaagcactcagttctgcaatgtggttaacttggatgtactgtcaccacgtttgtctttgtcagccattt

SEQ ID NO: 15040 - DNA, 5048 bp, Zea mays
  Clone ID: MRT4577_113715C.1
atgtctgagtacacccttgccgacgtagtggagatgatgaaggcgatgcaggccgacatctccggcctgaaggagaagtccgcgtcgtcgtcctccggcggcgccatgcatcaacgcccgcgcgacgccgaccgcccgccgaaattccagaaatgggacttccctcggtttgatggcaaaaccgatcctctcctcttcatcaacaagtgtgagtcatattttcgccaccattgttcctcgccggaggagcaagtgtggatggcctcatacaatctcgagggcatcgcgcaacactggtacattcagctgcaagaagatgacggcaccccgtcatggcgccggttcaaggagcagctcaacctgcgcttcgggccgaacagccggtccgcgcctttcttcgagctcaccgagtgccgccgcaccggctcggtcgaagagtactccaaccgtttccaggaactcctaccccacgccggtccaatggaggaggcgcagcgcgtccagctctacacgggggggttgctgccgccgctcagccactcggtgcggatcttccaccccgacactctcagcgccgcgatgagcctggcgcgggaggtggaacagctggagatcgctcgcgtccaggcggcgacaaggccggcagcgcgcggtcttctgccggcgccccctccacgaccagccgctccgacgctgccggcgccaccacctcacttggccctgccagcgccgccggtgggtgcggcccaagcacgaggcgagggctctcgccgcctgtcacccgaggagatggcggatcgtcgtcggcaaggcttatgttttaattgcaacaagaagtattctcggggccacaatcgtttttgcaggcgtctcttttttgtggatggggtggagatcgatgacaccggggacgacacggacacaggcgcgaccgagcccaacgccccgctcttctccctgcaggcggtggccggggttgcgccggctgacaccatgcagatcgcggtcaccctcggtccggcctccctggtggcgctgctcgactcgggcagtacacacaacttcatctccgcgacggcagcacaccagtcgggcctccccatccagcgccgtccacgcctcacggccatggtggccaacggcgagcggatctcctgtgccggcgtccttcgcaacgcgccgctcctcgtcgagggcgcaccatacccggccgatctcttcgtcatgccgttggccgggtacgacgtcgtcctcggcacacgctggctaggggccctgggaccgctcgtgtgggacctcgccacccgccgcatgacgttccagcgcccagggcgctcggtctcctggacgggcatcccacgcgcagcgcaaccggcggtgcgcaccatgacagggggggatgcgctaatggaggctctcctggactcgtttggggggctcttcgccgccccttcgggcttacctcccaagcgcgcccacgaccatcgcatcctcctcaagcccgacgcgccgccggtggctgtccgcccgtaccgctacccggctgcccacaaggacgagctggagcgtcagtgcgccgcgatgatcgagcaagggatcgtgcgccgcagcgactccccgttttcatcaccagtcctcttggtcaagaagcccgatggctcctggcgtttctgcgtcgactacagagccctgaacgcactcaccatcaaagacgcattcccaatcccggtggtagaggagctgctcgacgagctccacggcgccaagttcttcaccaagctcgaccttcggtccggctaccaccaggtgcggatgcgaccggaggatgtgcacaagaccgccttccgcacgcacgatggactgtacgagttcctcgtgatggcgttcgggctctgcaacgcccccgctacgttccaggcgctgatgaacgacgtgctccgaccgttcctccgccgtttcgtcctggtattttttgacgacattctaatttatagcaagacctgggccgatcacctccgccatctccgtgcggttctcgacgagctgcagcgccaccagctcttcgtcaagcgctcgaagtgctctttcggcgcgccggccgtctcctacctcggccacatcatctcggcagccggggtggcaatggatccggccaaggtggctgccatccgcgactggccgccacctcgctcggtccgggcagttcgcggcttcctcggcctcgccgggtactaccgccgcttcgtccacaactacggcaccgtggctgccccgttgacggccctcctcaagaaggatggcttcgtctgggacgacgcggctatggcagcgttcgcagcactcaaggcagccgtgtcctccgccccggtgctcgccatgccggacttcagcaagccgttcgtggtggagtgcgacgcgtcctccacagggttcggcggggtgcttgtccaggagggacacccggtcgcgttcttcagccggccaatcgccccccggcatcgcgccctcgccgcctatgagcgcgaactcatcggcttagtccaggccgttcgccattggcggccatacttgtggggccgacacttcaccgtcaagactgaccatttcagtctcaagtacctcctcgaccagcggctggccaccatccctcaacaccattgggtggggaagctcctgggcttcgacttcgaggtggaataccgctcaggtgccacgaacaccgtcgccgacgccctgtccagaaaggacaccgaggagggcgcgctgatggctatatccgcaccccgcttcgacttcatcgcacggctacgccaagcccaagctacggacccggccctcgtcgccatctgcgaggatattcgcgcgggcacacgtacgacgccgtggtccatcatgggcgggatggtcgccatgcatgggcgcctctacattccggcgtcgtcccctcttctgcaggaaatagtggctgccatccacgacgatggccacgaaggcgtcctccgcacactacaccggctgaagcgcgacttccattttccaaacatgcgtcgtgttgtgcaggatttcgtcaaggcgtgcggcacgtgccaaaagtacaagtctgatcacttgcggccggccggtcttctacagccattgccgatcccctcggcggtgtgggcggacatcggcatcgatttcatcgaggcgctgcccagcgcccaaggcaagacggtcatcctcaccgtcgtcgaccgcttcagcaagtactgccatttcatcccgctggcgcacccgtacacggcggaatcggtggcgcaggcgttcttcgccgaagtggtgcggctgcacggcgttccgcagtccatcgtctcggaccgtgaccccgtgttcacttcggccttctggaccgaactgatggagctcacgggcaccaagctcttcatgtcctccgccttccacccccagacagacggccagtcggaggcagccaaccgcgtcatcgccatgtaccttcgctgcttcaccggcgaccgccctcgacagtggctcaggtggcttccgtgggcggagtacacctacaacactgccttccagtcatcactccgcgacacgccattccgggtggtgtacggccgcgacccgccaaccatccggtcctatgagccgggcgatgcgcgcgctcccgcggtggcgcaagagatggaggagcgcgctgccttcctcgacgacgtccgctaccgtctccaccaggctcaagagtcccagcgccgcgcctacgatcagcaccacaggagagtcatctaccaggtgggcgactgggcccttcttcgcttacggcagcggccgtccgcgacactgccacgctcggcagcgggcaagctcaagccgcgctatgtcgggccctaccgcgtcgaggaagtcatcaacgacgtggccgtccgcctacagctcccggccggcgccagactccacgacgtcttccacgtgggggtcctcaggaagtttgtgggggcgccaccatccgaacctccggtgctgccggccacgctcaacggcgccaccgtgtctgcacctgcacgtgtcttggctggccgcctagctcgcggcgttaaacaagtcctggtccagtggcagggtgaaccagcgacggcagcaacatgggaggaacttgaagacttcacggccagctttccgcagttccagctcgaggacgagctggttttcgaggccgggagagatgtcatgtacgcacgattacagggggagaaaagaatttatccttcttctacctctagcctcttaagcctgcggttaggggggcataaccccgaccggagaagacggccgacggctacgagctacgtagccgagattttggacacgaatccccaactatactttcatctccagcaacagaaactaatagagttgattcgcgtgggaaaaataaatgaagctttggagttcgctcaagaagaacttgcaccgagaggcgaagaaaatcaaacatttctcgaggaaatagaaaaaactgtagcactactggtttttgaagatgtaaaaaattgcccttatggggaactattggatgtttctcaacgtttgaagactgcaagtgaagttaatgctgctattcttacaagccaaagccatgagaaagatccgaagcttccaagcttgttaaagatgttgaaatggacccaaaatcaactggacgaaaaggcggcttatcctcgaatcaacgatttcaccactgccgcgctggaagatccatcgatatgaatctgctgtgaaggaactgagggtatgcaccaagcctgcctggtgcctacacgtggttgccccggatctgtcaatagatcatcgtctgcagcgattgagttcaccccttgcactagtgtttaagatcaatgcaagcaattgatccgaaaacatcacctgtgttctacctgtacatgatgtagaagacatgtttgaaaccttttttaagttagtgaaatgttggatttttttcatggacatatattccgttcccacccaaaaaaaaaaaaaaaaaatttgcggcc

SEQ ID NO: 15041 - DNA, 1628 bp, Zea mays
  Clone ID: MRT4577_113716C.1
ccgtgataaataaaaaagaacagagtgagcccttcggatttgttgccacttgccgtatttactgaagctcctctgtatattccttttccccacatcggcccacgcgtccgcggacgcgtgggtgcagttggatactgttgcaggtaacaactactcttctccggactctcggggtttcccgacgtccaccacccatcctcgcttctctcgagtcctcaatccatcctccggctgttccctcccagcgacgaaaccctagcccgtcacctcgacgcctagcccgccaccttgccgcccgtcgctgcaggtttatggcgcctgtgtgatcggatcagcagtccgctccgtctccctcggcccacgcatctgatgttcctctcccgcatcgtactccgcgacctggattccatcgactctccggcctccatggcgtcctcgaagaaggttgtgacccgtgacgagtgggagctgaagctccgcgacgtcaagatccgcaaggaggacatgaaccgcctcgtcatgaacttcctcgtcaccgagggcttcgtcgacgccgccgacaagtttcgcatcgagtccggcacccagccggagattgacctagcgaccatcactgatcgaatggaggttaagagagcagtacagtcgggtaatgttcaggaggcgatcgagaaaatcaacgaccttaaccccacgattttggacacgaatccccaactatactttcatctccagcaacagaaactaatagagttgattcgcgtgggaaaaataaatgaagctttggagttcgctcaagaagaacttgcaccgagaggcgaagaaaatcaaacatttctcgaggaaatagaaaaaactgtagcactactggtttttgaagatgtaaaaaattgcccttatggggaactattggatgtttctcaacgtttgaagactgcaagtgaagttaatgctgctattcttacaagccaaagccatgagaaagatccgaagcttccaagcttgttaaagatgttgaaatggacccaaaatcaactggacgaaaaggcggcttatcctcgaatcaacgatttcaccactgccgcgctggaagatccatcgatatgaatctgctgtgaaggaactgagggtatgcaccaagcctgcctggtgcctacacgtggttgccccggatctgtcaatagatcatcgtctgcagcgattgagttcaccccttgcactagtgtttaagatcaatgcaagcaattgatccgaaaacatcacctgtgttctacctgtacatgatgtagaagacatgtttgaaacctttttaagttagtgaaatgttggatttttttcatggacatatattcgtttcaaacctgtggtacttgcaacacgcaaattgtttcagtcaaaaaaaaaaaaaaaaaaaaaaggtccaactgtcacaagaaaaaagaaaaaataaataaaggatacaacacaaaactgctaaaaatgcgtaagcttgttcgattctgtctatgttcctagcaaaattagttcgaataacggccgagacgtactttgttgtggaagatctccaagtaggttgtggttgctgggttgtacagatctggttttcatcctcctgtaagtctgaaata

SEQ ID NO: 15042 - DNA, 366 bp, Zea mays
  Clone ID: MRT4577_113717C.1
attatataccatgttaacacccacaaacaggtagtcgatatctttaccaagcccttggatggaaagagattctgtgagcttaggaatgaactaaatttcatagattctcgaaaccttgattgaattattgcactatgctcattttatacctttgatcacgacatgtctctttcatttggttcaaatgcatatttcttattctttttgtgccaaagctaagactaatatgctttcaactgtgtttctatacttagtcttagattgaaagggaaatggagttgaaggcaaaggcaagtcttccactgcatattcattcggtatcaaacactctttgcccaactcatgtacttacatgtgtatctttct

SEQ ID NO: 15043 - DNA, 407 bp, Zea mays
  unsure (1)..(407): unsure at all n locations
  Clone ID: MRT4577_113718C.1
attcggctcgaggcggagctcgtgtgcgatttcggcgacgccaaagatgttgttggcaggcctctgatgttcatgcaagtgacgaggttcaaatgcggcggatttgcaatcggcgtcagcatatgccacaacatggctgacgccttcggtgtcatccagttcctcaagagtcgcacgagtcatcgtcggtccagcccatggccatggacaagatggtcggttgctacttcctcttctgcccgagagagatcgccacgcttcgaagccaagtgaccgagccggccaccaacttcgagctcatcacggtcgccatgtggatgtgcctagcggaagctatagctcttgctcttgggtcagacagtgcctgcagccagcaccacgcagcgttngtcctccctgctgagcac

SEQ ID NO: 15044 - DNA, 1568 bp, Zea mays
  Clone ID: MRT4577_113719C.1
ggggatgcacagcaggggtatatgtatctacacactgcacattgtaagcacacaacacaattgccatggtgaccttcaaggcacaccggagcgatccggagctggtgacgccggcatcaccaacacctcaggggagcaagaccctctccgacgtcgacagccagatccccctgtggttctacgccacggtgatcgagttcttccgcccccgtaacgctgttgacggccacgacacccaggcggtggtcgatgtcgcggaggccatcagggaggccctggccaaggccctggtgtactactacccaatcgccggccgtctcagggaggtctccaaagggaagctggcggtggagtgcagcggagaaggagtggtgttcgtggatgcccatgccgatgtgcggctagacgagcttggtgagccgctgctgccgccgtacccttgcattgaggagctcgtgtgcgacatcggcgacgccaaagacgttgttggcaggcctctgatgttcatgcaagtgacgaggttcaaatgcggcggatttgccatcggcgtcagcatatgccacaacatggctgacgccttcggtgtcatccagttcctcaagtgcgtaacggatctcgcgcgaggcgacgagcacccggccgttctgccggtgtgggacagagagcttctgacggcgcgcaacccacccgacccgacaagcttacccttcgtccaggagtcgcacgagtcatcgccggtccagcccatggccatggacaagatggtcggttgctacttcctcttcggcccgagagagatcgccgcgcttcgaagccaagtgaccgagccggccaccaacttcgagctcatcacggccgccatgtggatgtgccgagcggaagctatagctcttgctcttgggtgcgggagcgccggcagccagcagcagcgagcgtcgtcgtccctgctgatcaccatgaacgttcgagggaaagcgaagctgacaccgcccctcccgcgcgggttctacggcaacggcttcgtcttcgtggaggcggagctgcgcggggcgacgcgctcgctcggtggcacggtcgagctcgtgcagaaggccaagcgcggcatgacggaggagtacgtgaagtcgatggtggatctgttctcgctcggcggggcggcgccgtacgcgcaggggtggacgttcgtggtgtccgacataacgcggatcggggaggacgagttggacctggggtgggcggagcgggtggccggcggcgtgcccattgtcggaaacgacgacgcgaccaagatggttagctaccagatgaggtgcaagaacgcagacggtgaggactgcgtggtagcttccatgtacctaccagagccggccatgaacaagttcaaggagaagatcctcatcttagcaacttcaaagctagcgacttgaaacaaaaccataatgttctagtactccttaccatgtatggtttcggtaataagtaagttatatgcatctcaaaaaaaataaaaaaaaaaaaaaaaaaaaaaaaaaaaaaaaaaaagagggcgcccgccgaaatatgagctc

SEQ ID NO: 15045 - DNA, 172 bp, Zea mays
  Clone ID: MRT4577_11371C.1
tacttcgtgtttcgtataataataacgagaaaacgaccaatgcggatttatctggatgtcatgtattgaccaccgtcattgctggcttggatttcaaacccaccatgcatactgatgcttgaagaccgaaccttctatcacacttgcccatataatatgcattggaacttgt

SEQ ID NO: 15046 - DNA, 168 bp, Zea mays
  Clone ID: MRT4577_113720C.1
cacctctatcgtgggcccggactaggtactccgaccacatcccagtgaaccctttctttccgtacacgtctccatccatccatctgccttgaatcgcattcacgtccctccatgtctctcactcaatactaatggaatgaatgatatggtaacaaacaaagctatggt

SEQ ID NO: 15047 - DNA, 276 bp, Zea mays
  Clone ID: MRT4577_113721C.1
tcatagaaatagatgtggatatcagtgtcgactactgtggcagcggagtcttgtggcttgagtgcggtgcctaactacactaggagacgatctggatttgcttgtgacaggctaatacatacgacaaggtcccaaaaggctgaaggagcattctatgtctatattgagctaaagttcgcgatagtagctgggctgagaagattaatcatctgacctaactctggatgcatagtgcccgacaggattatgccggactggtgagatcactgacagtgt

SEQ ID NO: 15048 - DNA, 248 bp, Zea mays
  Clone ID: MRT4577_113722C.1
gccaccctcctaggagtctctatataaacctacaaaacctgctctcattttgatcttcacggggaacgaaggatcgccaaccgctccctgacaactacatgatacatgagcccttactgtcacgatgaactgatatatacgctgcgtagtgctgatacttcacacctctcaacggcaactgtacacaataaccctcctattattcacgcatattatacttataccggctgcacctctacaattctggc

SEQ ID NO: 15049 - DNA, 502 bp, Zea mays
  Clone ID: MRT4577_113724C.1
gggtgttttttttttttttttttttttttttttttttttttttttttttttttttggccgcaaaaattttattacccaattttacaagttacctcaagctttacccatgacccgagggattaccaaaagggattcaaaaaagccactttgaattgttataggggggggggggtttccaaacctctgctagcttaagggcccctcctcaataaaaaggatagaggggttacttaaacttataagaagggtgggccccccgggccttaaaaccatttttaggagcccaaaactttacccttcaaggagcccctgataaattacctttatggggggaaaacccggacccttagacacgggctcttaagaataaccctaggttaggggtgttaaaaaaccaccacttgcccatcatccttgaactaacccttgaacaggccggtttatccataacccttatcctggggattaatccccccttgggggcaaattggctcgttttccc

SEQ ID NO: 15050 - DNA, 591 bp, Zea mays
  Clone ID: MRT4577_113726C.1
gcagcaccaataagcacaatttttttacttatgattgaacttaaaataaagcctgacgggggtaacagcacccatcgatccgtagtccatgctaggacgatgcatgggtctgctggagccgatgttgaacacaggactaacaactgacacagagcgaccttcaatcaaaaacacagatgggcaacaacaaacacgagacgaacgaagataaacactctggactagggtaaacaacacggtcgcgaacaggataacttggacgggcgggccccaccgttcaggtcctgcagttgccgttggagttgccgtatacgtcgacacggttgacaccgacgaagccgacgacaccaccaccgtagagcaacgtcgtaaccaccgtgcccaacgacacctgcgtaaccgacgccgacatgacagtgcccaacaccttcataaccgtcgtctacaatgccaccaccaaacccgtagccgacagatactacacggtcgtcgttggactggacctacttgacggtgatgttacaagtcgttcatcttcttgccgaacatgcacttgatggtgtaccgaatcgacttcttctaggagaaggt

SEQ ID NO: 15051 - DNA, 445 bp, Zea mays
  Clone ID: MRT4577_113727C.1
ccgaattcggctcgagattgatatgagtgagcttgatgaggattctgatggtttccttcagcgacattaaatggaggcctatatacgaggtctgatacccaacttggcacagttacgtgacatgccaactgcctttgttcaaatgtattgtcgtattgctgcacacaaattcttcttcttttgcgatccttatagacgaggaaaagcttgcatcaagaaagttttgcttaataattgtctccaggaactcatggagctttaccaggaaagtgaagaagaagtcacggacacaaagcaagccgaaaacttgttctctttgacttctgctgaacgcatatgtgacatgtttcttgctcttgataaagatacaaatgggacattaagcaagcattagctttgagaatatgcagatgcaactctggctgatattttattgagagagtat

SEQ ID NO: 15052 - DNA, 382 bp, Zea mays
  Clone ID: MRT4577_113728C.1
accccagcaaagcgcccacaaacaagagggggggaacaaaagacaacaagacaaaacccccccccccaacgcacagaagcgcacccaagccgacgacaccaggacccttcagcaaaacccaacagcaccagaccacccccagagcgcacgcgaaaaccagaaagaaaccagggacgcaacggcgcacagcacaaggccaaggcaggcaaaagcaaaccgacaggccagcggaccgaaccgcatagcacacaacggcccgagagagccgcaagccgagagcaggccgcccaaaccggaagagcccacgcgcggagggacccgggaacgacaccccgaagaaagcggcccgagacgcggagagcacgaacaacacggcaccaaa

SEQ ID NO: 15053 - DNA, 203 bp, Zea mays
  Clone ID: MRT4577_11372C.1
gtgttattgtaatagcacattgatcgcacttgttgacaaagcatcctttcgccaaagatcgcggaatgtggctcaagcaccagacttacgggaacccaacacatactccggagaaaaaggaatgtatcgatgactttgacatcctaacacccgagactggacctttgccggggcccactggggcgcctggctggaaggcaggg

SEQ ID NO: 15054 - DNA, 1412 bp, Zea mays
  Clone ID: MRT4577_113730C.1
ctgagcccccctgcttattagagttgtagtccgaggtgtgctgtgcatcctctccgtatgcaggtaatcgcccgcccaagaaggtttctgagcggaaaggaataggaaagtcccgacgagaagtgcactctatctctttttatatagggactagggagagaggctggctcggtagctcagagacatcctccagtccagctgattttctcgccgcgcgccgtgttcaatacggctacgaaaatagtagggctggcaaaccggtggccggccggcagcgcggcggccgaggagatggggagcctcgacggcggccactcgctgcagcagggtcgccaccacggctacgcccactcccagtctcacgtcggcgcgggtcccgacagcagcaacaacaacaacaacgacgaggacgacgcgtcgcccccgccgccttccggggcgggaggaggtcctcgccggccgcgcgggaggcccccggggtccaagaacaagccgaagccgcccgtggtggtgacgcgggagagccccaacgcgatgcgctcccacgtgctggagatcgccagcggcgccgacatcgtcgacgccatcgcgggcttctcccgccgccgccagcgcggagtctccgtcctcagcggcacgggcgcggtcaccaacgtcacgctgcgggagcccgcgggggccggcggggcagcggccgtcgcgctgcgcggccggttcgagatactgtccatgtccggggctttcctcccggcgccggcgccgccgggggccacggggctcaccgtgtacctggcgggggggcaggggcaggtggtgggcgggagcgtcatgggggagctcatcgcgtcgggccccgtcatggtgatcgccgcaacgttcggcaacgccacctacgagaggctgccgctggaccaggcagacgccgaggagggcgccgtgctgtccggctcgtccgagggcgccaccgcgcagcagctggagcagcagcagagcagcgggggtcccgtcgtgccgccgtccatgtacgccgtcccgcagacgccgccgcacccgcacgacatgttcggccagtgggggcacgcggctgtgacgcgcccaccgccgacgtcgttctagctagcgctagatgcacatgcaccagctgcgacctgcaccggccgcccgcccgccgtataccctctccacctttctagttagatttccacttcttcactagctactactatagctactactctagttgttacgttagctctaccatggcatgcatgtgtgatcgttttcccatttcttctagctctcttccatctggagcgtgtggaatcaatgtacaattcctatttgcgaataccggaatccatcaatgtttacttaaaaaaaaaaaaaaagcgcggccgctcgcgatctagaac

SEQ ID NO: 15055 - DNA, 1889 bp, Zea mays
  Clone ID: MRT4577_113731C.1
aattcggcacgaggcttccttcctcggcagcagcagcagatgcgccagcatcgctcccaccgcccaccggcagcaggaggagcgacaagtacagtgacacggacagagagagagggagagggagcccatcacagcgcctacactagctagccaccgcccaccaggccgccaccaccgatcgaatcgggtgcgtgctgctcctcccggccggccgcccgctcgctcgctcgctcgctttataagccagccacccagccccgcccgatcgtcatctccatagccccgtatccgtccacgcacacccgccttgccaccagccagcactccccctcaacccccggcctcgccgccgccgccgcaccccccacacccgctgccgcgcaggccggttgctccgattgggctggagtgccaatcggagccaacatcagggggaagcacatgctgccgttcgcgcgccctagagttcctcattgatgtcgcctgtgatcagtgagatcctcctctcggggtttatgatcaactccacactccggcgccgcacccacctcgtccagtccttctccgtcgtcttcctctactggttctatgtcttctcataaactactcgcccccgtcaccgccacgcccctctcctcctccccgtccctgctgccttcttctcctccttcttcccgttccatctagtagcatccaccgtcaccctcttctcgtttcttctgcccagtctctgccttcttcttcgtcgtcgtcgtctcggtttcagtcgtttcctaaaactttaccttgcatgcacttccctactactgctgctgctagcgaagacctttattagttattagtagtgttaagttattaccaacaagaagcagaaagaaagaaagaaaaaagggatcaagaagcagagagctgttctgttcttttttttccccccctctcttgcaagaaagggcggttcttgcgcggacggaacgcaggaacaatggcttcctccagcgggagcgggagctcgggcttcctctcggcggcactggacgcggcggcgacggcgggaacggaggaggagctgcgcgcgctcatggcgcagcgccgcgccaagcggatgctgtcgaaccgcgagtcggcgcggcggtcgcggatgcgcaagcagcgccacctggacgagctcacggcgcaggccgcgcacctgcgccgcgagaacgcgcacgtggccaccgcgctcgggctcaccgcgcagggcctcctggccgtcgacgccgagaacgccgtcctccgcacccaggccgccgagctcgccgcgcgcctcggctccctcaacgacatcctcgcctgcatgaacaccaccaacgccgccgccgcctcctccgacccttacctcgccttcgacggcgcggccaccgccttggacgacctcctcaaatcctgccccgacagcatgatgttcgagtaccagctctgctagctcgggaccgaagtcgccatggacagcacaaagcatcgagaggagggaaaaaaacatttttttttttttgctgctggtgtttcaggttagtgatctgctagtgagatggaactgaagggcagatcagacgtggcggtgagccatgaaactaccgtcagctgtactgtgctatcaactgggggtgggaaaaaaaacccagctgggggctggggcactgcacctaattagctagctagatgatgctggggttatggttaatgaactactacttactactaattaccaggtgcaagtgtaactcgaggtctgatctgctttcgtgtactgtgtcactccactccaactgtgtagcaatcagagcagtaaccttactagtatctctgttcaaacaaaggaagtgcaccatacaatctacattttaaccgcg

SEQ ID NO: 15056 - DNA, 415 bp, Zea mays
  Clone ID: MRT4577_113732C.1
ggtaccctcgggtccgccggggtgctttcttagagtgggttggcttctcctccccctccggttcgggttcgggttcgtgaggttctccggggttcggtttcgtgggtggagcggatcgagatggcggcgtctgatgttgagtaccgctgcttcgttcgggggcctcgcctgggccacggacgaccactcccttcacaacgccttcagcacctacggcgaggtcctcgagtccaagggtccgttcccgtcccagatccgttcatggtttcgtccagatctgacctgtcctggcacaccctcgcccggatctgtccctacttcccttcacccctgcagatcatcctccatcgggagatgcataggttccgaggttttggttttgataccttttccactgaggatgcgatgcggaacg

SEQ ID NO: 15057 - DNA, 578 bp, Zea mays
  Clone ID: MRT4577_113733C.1
cctcgaagccggccgggaggtgtctcgacacccgacaccgatggctcgctcgcacctccgcctgctgcgctgccgtcgcagcatgtccgccgctctcatcacctggccctgcctctcactcatatccttgcctcatggtgagtaccgatgcttcgtcggcggcctcgcctgggccacggacgaccactccctccacaacgacattcagcacctacggggaggtcctcgagtccaagatcatcctcgatcgggagacgcagaggtcccgcgggttcggcttcgtcaccttctccacggaggaggtgatgcggaacgccatcgagggcatgaacggcaaggagctggacggccgcaacatcaccgtcaacgaggcccagtcccgcggcggccgtggaggcggcggagacggcgggtacggtggtggccgtgtaggaggcggctacggtggtggcgggagccgtgatggcggcggcggttacggcggtgccggcggctacggtgggggcgcaggcggctacggtggaggcgccggcggctacagcggtggacataggaggcggcggatacgagaactccga

SEQ ID NO: 15058 - DNA, 591 bp, Zea mays
  unsure (1)..(591): unsure at all n locations
  Clone ID: MRT4577_113734C.1
tgagtgcgcgtacttcgacagagtcgaccagctccagggttttggcgccggcaccaaggccagcattggtgagctgctgtgggggttcttccactactgggcgtcccagcaccgctacaagcgcgacgtcatctccgtccgcctggggaagacgatcagaaagcaggagaagggctggacgacgcgcgtcgggggcgaccgccacctgatgtgcatcgaggatccgttcgagaccggccatgacctcggccgcgtcgtcgacaggcagaccatctggatcatcagggaggagatggagcgagccgcccccgtgctgcagaacgacgacgacccctgcgcgactctcttcgagccctatggttatgacttatgagaactgactgactgattgatcgatcgatcgatcggggctctagtgctggctgctgcagaaacgaggctctagtgtttgttgatagctcagatgacagttctctggacattgtgacgatattaataaaattccggagacagcagaaacgatatgggaattgctacgagaaagcaaaaaaaaaaaaaaaaaaaaaaaaaaaaaaaaaaaaaanaggggcg

SEQ ID NO: 15059 - DNA, 1543 bp, Zea mays
  Clone ID: MRT4577_113735C.1
aaatataaaaaaatattatataaaaaaataaaaaaaaaaaaaaaaaaaaaataaaaaaaaaaaaaggggaggaaaaaacaacgtatggggggtctaaccctcaggccatggtcccggccggggtgctttcttagaggtgggttggcttctcctccccctccggttcgggttcgggttcgtgaggttctccggggttcgggttcgtgggtgagcggatcgagatggcggcgtcggatgttgagtaccgctgcttcgtcggcggcctcgcctgggccacggacgaccactccctccacaacgccttcagcacctacggcgaggtcctcgagtccaagatcatcctcgatcgggagacgcagaggtcccgcggcttcggcttcgtcaccttctccacggaggaggcgatgcggaacgccatcgagggcatgaacggcaaggagctggacgggcgcaacatccgacaacgaggcccagtcccgcggcggccgtggaggcgggggcggtggttacggaggtggccgtcgaggctgcggccgggaggacctccaggccgagccgggatgcctggaattggagcgatccgcaaaccctttctactttcttcccctgctcgattcgcgcagctgcatcaccggcgacggcggcgatggcacggaggagaaagacggacgccccgccgcggctggacgaggcagatcgcacgctctactccaccttctgcggcgccgccaactccctctcccagctctacgcgcaggccatggcccagcagaagctcaacttccatgccggcgagcgccacgccttagaaaagctctaccagtggatcttgaggaagcacgatgaagaggctaggctcactgtggctgaaataatgtctcatatccagcatgagatagactatgtaggtactgatgcacatgtctccccaagagtacctcagcatcctcagattgcaaatccattcgccaattcagttgtcccacctggaactggtttgtatgggcaatcagcagctgggtttgctcctagacccagtgtcactgaccagtcgaagaatacaatattctctaatgccttatcaagcccagtgcgcaggagtctccagaactctcataccactcaaggtgctggcaatggaggccggaatgcagaagcaaacttagcaggtgcaaatagagaggccaattctacaagctccaacgacacttctatggatatggtttcagacacgaatgaattctaccagtgatttgcagtaagatgcttctgcaatcaagcagcatcgcatgccagtgttttttttgggcctttcctttcgttgaggttttcacataaactctcaccattatgtgagcaatgtagttgtatatccggtgattctggtttgttcaagttggtatttaagttgaaacgtgttgggcatgctttattccccacaatgtgttcgtgagttcaatattatgaatgtacatgcagattgcgttgtgatataatctcaaacaggaaaaaaaaaaaaggcccctaaaaaaaaaaaaaaaaa

SEQ ID NO: 15060 - DNA, 923 bp, Zea mays
  Clone ID: MRT4577_113736C.1
tcggtttcgtcaccttctccgcgaagcaggcgatccgacacgccatagagggcatgaacatcaaggagctggctggccgcaacatcaccgtcaaccaggcccagtcccacgtcggccgtgtagtcgccgccgtcggcgggttcggtggtgtccgtggaggcgccggcttcgacggtggcgggctccgttatgccggcgccgtctatgtcggtgacgccggtttcggtggtgacgacgacggctacggtggtggtggcgccggctacggcggtggcaaccgtggcggcggttacggcaactccgacgggaactggaggaactgagcggtggggcccgcgcggccaagttatcctgttcgctaccgtgttgtttaccctagtccagagtgtttatcttcgttcgtctcgtgtttgttgttgcccatctgtgtttttgattgaaggtcgctctgtgtcagttgttagcgctgtgttcatcctcggctccagcagacccatgcatcaaccagcatggactgcggatcgatgggtgctgttacccccgtcaggctttattctaagttaaatcctaaggaaaaaaatggtgcttcttggtgctgcaaaaaaaaaaaaaaaaaaaaaaaaaaaaaaaaaaaaaaaaaaaaaaaaaaaaaaaaaaaaaaaaaaaaaaaaaaaaaaaaaaaaaagaaaaaaaaaaaaaaaaaactaataactaaaaaaaaaaaaaaaaaaataaaacagggggggtccgatttaaggaacaaaaattcccctacctaatgatgaactgtatacacttttttttatgaaccctaaaaataaaaaccctgccccagctttaacaagttctggagcgaaaaacccgaggatgcccaaatctaaagatcttagaaaaaaagccccttttacaagaattttgaagac

SEQ ID NO: 15061 - DNA, 564 bp, Zea mays
  Clone ID: MRT4577_113737C.1
tcctcgctcctggccgccgcccacgacggccgctgctccctctcctgctcccgaagaccacacgagcatcgggagccgcggaggcaggcgggggcgctcagagggggcatgccagcccggcgccgtgggagcggggggcgccgctaaccggatccggcattggctcgggggggccgaaagctccaagaagcgatcttgattgctccccgcgccctcgtctcacttcccccaccccgttcttgatttgatttctcactggtgcctgggcgcggcgaatcacgcgcccggatcaagaaaccccggcggtggattcctcgcccgactccttcctcaccctcggatgagcagggaagtaaggaagaaacggatcgtactggaaggatggaagtgggaatgggcggggaagggtttgatctggggttctccgcggtgaggttccggattggggattagcggagaagtggcgaggaggcggagaggaagcgacgagggatttgacccgatggacagggcggcacggtacggcacgtcacggcagcgaggttgagtgagttggttcacgta

SEQ ID NO: 15062 - DNA, 258 bp, Zea mays
  Clone ID: MRT4577_113738C.1
cggggctgacggacgactgaaccaccttcagacttcatggccgactgcgcctgcagcggctccggtctcgactaagcctccctggccagccaacctgcgatctccaccagcttcacgctgagcagcctgatatcagcaaggaaccccatgatgagcacgaacctgcagaggaatggcaagaacacctgcatcacgatttctcgagactggctgcggatgcacctaagcgtgataagcttgcggctcatgaactggatg

SEQ ID NO: 15063 - DNA, 709 bp, Zea mays
  unsure (1)..(709): unsure at all n locations
  Clone ID: MRT4577_11373C.1
actgataaccgcacagacgggcgccttcgctactctcctatctccgcgagccaaagcgctcccccttctcccattcttctctcatatctcaccagcggcgacgctaccccctttccactacaccctgagggagcgcatcctcgacccacatctgccaggccggcatccaggtcgcaaacgcgagatgagagctggactgcctcaatgatgtcatccaggctgatggccatatgaccggcgaccagaccattgattggagagtgatgatgcattgcaacaccttctatcgatgagactggagctaggtaacacgtcccccgtggtgtgtctgatgaccttgacaccactgtcatccatgaagcgaggagtgaaagctatcgccagatcttgcatcatgggcaattcatcagggtacagaacgatgcagccaactacttctctcgagatcacgacaccagtgcatgggatattgttgacctgtagccttgaccgcatcgcgaagatcgcagataattgcactggactccatcgcttcctcgtcttcaacgctggtgctgaatgaacactctctcgagctaggnactctcctcctggagcgcctgactgttgactatgataagaagtccacgctcggatacaccgaggacccatctcctcaggtgtccacatccgtgcttgcaccatatcacagtgtactgtacacccactc

SEQ ID NO: 15064 - DNA, 185 bp, Zea mays
  Clone ID: MRT4577_113740C.1
gctcggttgctcctccgccagcttcatggactactatatgcccatcagggactcccgcaagcagggattcatgggggtggcgtgccgcaatagccagccgatgcggctctactccagcctgtggaacgcggacgactgggcgacgcagggcgggcgcgtcaagacggactggtcccacgccccct

SEQ ID NO: 15065 - DNA, 1392 bp, Zea mays
  Clone ID: MRT4577_113741C.1
ccgagcctgggcctggtgagggtcccagggatcggcttcgtgtacacggagctggcgagcggcgtgccgcacatcttctcccacttcatcaccaacctccccgcgatccactcggtggtggtgttcgtctgcgtcaagtacctccccgtgtacaccgtgccgacggaggagcggttcctggtgcggaggatcgggcccaggagcttccacatgttccggtgcgtggcgaggtacgggtacaaggacctgcacaagagggacgaggacttcgagaaggtgctgtttgactgcgtcctcttcttcgtccggctggagagcatgatggagggctactccgactcggatgagttcagcgtgccggagcaggcgcccggctccggccgcgcggcgttcttgggcgtgggcgagcgcacctgtgcgactgtgtgctctaacggtgatctgagcttctcatcgcaggacttggtcgtgcccgccgctgtgcagtcgccccgagcgccgacggggctgccgttgctgcagtgctcggcgtcggcgaggcagggcactagcggcggaacggtgggcgacgagcttggaatgatgccgtcgaggaggcgtgccagatcggcatcgacatcatcgcccagccaggaggtagtaagaaggaagaggacgtcgtcgcgtgctgccacaagtatgatggacaattttttgagcttatatcatggaggcgatgtggaagaagatccctatggaaatgccaagttcattgacatgcgacacgtgtccgtgctattcgttggtagaccatccttgagtgatgtgtttacaaaggataaacaaaagctagattaccatgaagatgatgacattgcggttgacggagtgcttaacattggtcatccaccaaatgtcataagacgagtcatcccaattgattctcaactagattgggagaattatgttacttcgactatgaagacccagttgcaactcatggaggttgttgtgtggtgggttgtagtagaccttccccctgaagactatgatcgtgctatgaatgatgtgccaactgtgcctgatgctcaatctggccccaatttgatcccattaagtcatccaggagatgacctgcaaacagattcacctgcgtatatccctttggcacagaccaattgcagtaaaatgtcgggcctagtgtgggagcatggagagaatattggtcaaggtttcaggtgcaagtaccgtcatgaagggaagagtggtggaagtgctactcgttccaagcagcatttagcacatcgagggaaggatgtcaagaactgtccatccgttcctcctgaaataaagaaattctttgctggcgagctagacaagacaaaggaaaagaagaggcaaaggattgtctag

SEQ ID NO: 15066 - DNA, 578 bp, Zea mays
  unsure (1)..(578): unsure at all n locations
  Clone ID: MRT4577_113742C.1
gtgtttttttttttttnnnnnnnnntttttttttttaggagatatatagtatcaaatcatatcatcgcggccccattaatatatgggtaccgcaaatgccatcggatcaaccaacatgccgggagacccccctccctccatgagcccaaaaactgacccccaacatgccgagagagatagccaactgaaaaactttgtttttttttttttcacaccccccacacaatacctatgtatggcacccccctcggccccccttattattggtcaaccccccccacaagctaaatagataataatcatatccctgggccgcgatcgaagggatcagcagttgcaggggtcccacttgcaattgccaccccaactgcaaccgggggcggcctcgccggactcccccgcggccttaacaaactcgggcgcggcctttttttccggggccccccccaagaccacgggggcctgcgcgggggtgctcgtctcctccaagtcagggtactttttgccccacttgcaacttgagccgcacccgcagcttgatccccaattgcaaaacatcctccaccttggggggcaaa

SEQ ID NO: 15067 - DNA, 292 bp, Zea mays
  unsure (1)..(292): unsure at all n locations
  Clone ID: MRT4577_113743C.1
atcgagataaatgtcaatcaatatattgattatttctaggaaacacatgccggtntgagggcaccattatcgattacatctcatatgtaatctaaaagatggcacctncaacgatgggttgctgccacgacaaggcagggtncatnaaagagaactggctgtatggnagcaattggggctgctgtaggaagggagtgaccaatgggntaggtactgntagtggattaagtaactgttgtcgctgttgtaggtacgcagtagtatttcgacacagtcagttggttgaatggaa

SEQ ID NO: 15068 - DNA, 684 bp, Zea mays
  unsure (1)..(684): unsure at all n locations
  Clone ID: MRT4577_113744C.1
ggtcgcccagcgtccgataactcttcaggaaaaagaggacaaaaaagtgccaagagccattggattgttcctactactgctggtagaagagagaaagaggagtcatctgatgaattatatgatgcaagcaatggccaagatgctacttttgacatttcgtcaaagaaacgaatacagaataactcttcaggaaaaagaggacaaaaacgcaaaaaagacggcaacattacttcaaggaaatgtggaatctcaattaacagtgctggaggcttaccaaatggatcaacaggtgaagggatggccttggctggtgacaaaaactgggcatcatctgagttattggaattcattggacacatgagaaatggtgataattcttatatttcccagtttgatgtccaggttcttttgcttgaatatataaagcaaaataacctccatgatcctcgcagaaaaagtcagattatatgtgatgcaaggcttagcaatttgtttaaaaaaccacgtgtcgatcattttgagatgttaaagcttttggagatgcattatcttgtgaaacaggcttcaacaccgaatgcagacagtcaaagagcaatttattcagattcagctcaagtaaataatggaggacataatgagttggccgatacattangttttgataggaggaaggctcataagaag

SEQ ID NO: 15069 - DNA, 122 bp, Zea mays
  Clone ID: MRT4577_113745C.1
gagagtgcatgtggatggggtgtacaggacttacggataccaataaacagaccagcggaatgcgaggtggttagctttaaaggacacattgttggatgggttaaatggcccccattttttaa

SEQ ID NO: 15070 - DNA, 519 bp, Zea mays
  Clone ID: MRT4577_113746C.1
ggcaaaaaaacccacggttaaaatggtttaaaaaaaaaaaaacataaaaaagttacaacccccccaaaaaaaacggggccgggggcccaaaagggagcttggggttgtttcccttaaaagctaaaccccaaggccccggggttttgcccaaaagaaacccaggttaaccctacctttacagttttagaaaagggggtttccccccctattttttaaaacccaaccagacaaattttggggttaacccttaaaaaaaagggggcccatcctttaaaaaaaaaagtcccataaggggaagtttaaacccttcttttggggtttttttcctgaaaaaaaatttccgggggcccccggctttatttaaggggcctaaactttttttcccttccccttttttttgggggggccccccgaaggagacccaactttttttattttccaaccgggccaaatttttccttaaggggactggccttcgcttttgaaacccttgcctttgctaaaaccctccttaggggg

SEQ ID NO: 15071 - DNA, 782 bp, Zea mays
  unsure (1)..(782): unsure at all n locations
  Clone ID: MRT4577_113747C.1
accacagtgcaaactgcaaaggtttaccaaaacgtcaattgcctaggccaagaaggtagtagcccaaacagtactccgacaaccgccattagcaatggtgctgctccagttgacaatgtcaaatctccagatggaccagattcttcaaaacagaagcaagaactgacttctggtgacgagcagacaccagattcttttaaacagaagcaagaactgacttttggtgatgagcacacaccagattcttctaaacagaagccagaactgacttctcttgacaagcagaccaaaagttctgagcaattgatatcttgtgaccaagaagtacgagaaccagtgactgttgaaactgaaaagctatctgatgtcaattcaaagaaagatcacaagctttgttcttccattggatctgagatggctgaacaatcaaaggttgttaaagacaatgagagtatagtagcatctgaggagttatccccagggacaaatgatgttgataaaaagcagataacagagaccggcaatataactactgaggaatcatcaaaaccaagtgatactaagcctgctgtggttaagccaaagagaggccgacctccagcagcaaagtctcaggagaaaaagcctgctggaaagaaacatgcatcagacctaanatctgcaaaacttgatcctatcactgattctggagggagagctacacggcacctgaataaagatgctgcgaagtcttcatcaaccaaggctgctgaaggagaatctgagaaagagcaacataaaac

SEQ ID NO: 15072 - DNA, 159 bp, Zea mays
  Clone ID: MRT4577_113748C.1
aaaataagtcgtactaatcatcgtcatgctgtgtacttaggtggtcttcttagatgagcaagaagaatgaacgcagagctatcagaagtacgtcgtgtcaactgaagctaaacatgttgatatgagcatctgttatcgtagaatgacatgtggcaagaa

SEQ ID NO: 15073 - DNA, 273 bp, Zea mays
  unsure (1)..(273): unsure at all n locations
  Clone ID: MRT4577_113749C.1
agccgtcgtcctttttttttttttttgcattttgcttttcactgctccttagtgtnccccaaacaatcaatctaaattcctttaaaaatagggttggcaaactggggccaacaatgtcttattctcaacaatggccttctcaatattcagtccctaaaagtggaggaactgttcaatgtcacccactatccgcgcgtcttgttcgttccgtgcgcaggaagacaaacatccctcacaggtttgggatgttccccccaacttagttgtcaaccc

SEQ ID NO: 15074 - DNA, 405 bp, Zea mays
  Clone ID: MRT4577_11374C.1
tttttctctttttttttttttttttgggttggtgctgggggattttatttatattataggaattgtccaataaaggagagaaggggaaaaaaagaacaggggaaaaaacagctatactttggtggggggggcaccggggcttttatttttgcccacacgcaaacggggctttgaggccggctccggctgctactggaagattcttttttactaccggtactacgcaaccaaaaataaaatttaagggcgcagccagaaacaaatgaaaaacgggcttgccgtcccccgcgacgagagaaaacgcctggcccccggtacaaatcgttcagacaaaacattacattacattgcacgggtggcaatcaaaaaagccgctgcgcggggggtttggattaggtttggcct

SEQ ID NO: 15075 - DNA, 219 bp, Zea mays
  unsure (1)..(219): unsure at all n locations
  Clone ID: MRT4577_113750C.1
tggagagagacagagagaatacaaatgacagaactgttgtcctttattgtagtgacaggacagtttatatacaagtgtctgcagtggttcctaaggggtgtgtcccttggaataactgtcagaggttgatcacatgttatatacatattttgtncaaaaaaaaaaacaaaaagacacacacggaaagaaggagatggacaaagaagcaggactaaacca

SEQ ID NO: 15076 - DNA, 370 bp, Zea mays
  Clone ID: MRT4577_113751C.1
aatcaaaacccaaccgggacggtgcggtctacaccgttctacattcaaaaaaaaactaaaaacctcatagaacactctatatggaaccacacattctttcctaaggaacaccaatgacatggattacctaacatgcttagtcgaaagcataaagtgtaaaaaactgctgtgcctaataagtaaactttttctcattcaatgtacctcgcacacacagctgtaatcattggtgaaaacatcctctcctgctccaaaaataaaattctcaactcgcattgaaagtccgtttgcctatatgacactaaggtgctttttcttttaatcattgagatcggcaacagatgcttgatttttaacgcctagacattta

SEQ ID NO: 15077 - DNA, 334 bp, Zea mays
  Clone ID: MRT4577_113752C.1
tcggaaaaggtcttcaacctcccatttttcatcacagacatgatctctgtgggagccttggagagacctccactacaggcctcctgggagaccgcccacggaactctgacatgcagacctggaagatgtctgcgcgctatgcgcattgcacccgcacattggtatcttgccgtctcgacagggcgcctaagttcgatcgacaccgtgcaccgcttgtggcgttacccgaacttacactcataccgtcttaggagcccgctggtatctcaccacccgaccgccccggccataagggttctctaacatcccgcttgccttggaggaactacctacc

SEQ ID NO: 15078 - DNA, 205 bp, Zea mays
  Clone ID: MRT4577_113753C.1
gtcgattgaggcattgattgcaccggtctatggcgacgatcttctcccaatatacctaaatcactcttgtattggctcatcttcagtttttgcccgctgcaattcttaatctcttatattggtgctggtggttattgccagcaatattatatggatgaatggatgggttggaggcgagtcagatcgatctggcttacgcttgtgc

SEQ ID NO: 15079 - DNA, 578 bp, Zea mays
  Clone ID: MRT4577_113754C.1
aaaaccccccccccgaaagggggcccccttggcataaacccccctttggggccgggaaaaaccttggaaacccttattttttttggccccaggtaaaaaaaaaggggggtggtctaaggtctggaaaggcagaataaaccgggggggggaatataacccccctggggggggggaaaaaccccaaaaatacccctttgcccttgggaggggtggcgccaaacccattccctagggggactttggaaaacccacccctaatttggcaaaaaaaaaaaaggggggggaaaccccccagaaaacccccccccaaaacccaaaggggccccgggggggggggaaaacccaaaggggaaaacccgtggaggcagggggaaccttgtctttaccaaacttaaaaaaggcccggcttgggttaaagttgaaccttttgcccccaagggggaaccccatggtcgggttgggcccaaaaatggccacaccccacggtggtttctcccatggacctggaaaaaccctccaaaggttgataagggaattcaaggaggacccccggggttttgttcgggcaaagtggtttt

SEQ ID NO: 15080 - DNA, 1789 bp, Zea mays
  Clone ID: MRT4577_113755C.1
ggccctaggggccttttttttttttttttttccttttttttttttttttttttttttttttttttctttttttttttttttttttttttcggggaaatccttctcatttaaaaaaaacatactccatccgtttctttttagtggccgtgggatagtacaaaattaaattatccggggccaactaaaaagaaacggagaaaatatataatatgatatagccaagaacaggttacatgtaagcggcgacagaaacaaggcatacatacacggccaatcataagaaactggaaatagcagatgcaaccctggtagtgtcatgcaaggatgggtacattactgtcctctccgtactaacattgtgtttaaaacattgaaacacgcccgtgaatagaagttctacactaagtagtaacctaactactatcaatccagacagaacagagcaatctgaccaaaccaccgacttcatgctctcacctaacagtgacaatgtcatcaatcttcaagatcatcctgacacactcgcaggccagcgtaatggcacttgtgctcaccagcaaaggctgcacgacattctcctccaagatgtttgtgatctgccctttcctgacgttgatgccagcgttcttctcacctctggcgtgacgattcctgagttcggtgacaatggagattgggttgagcccagcattctcagccagtgtgtaagggatgacctcaagtgcgtcagcaaactccttaatgcagtaactctccatccctcgaagctcctttgcccaagcagccagctgcattgacatctctatttctggagcaccaccaccagcaatcaaaaacctcttgttgaccaagcaccttatgacacagagggcatcatggagactacgttcagcttcatcaataaccaactggttcgagcccctgacaactacagtggcggtcctacccatgtccctgataccagtgatcttcacaaccttgccctccccaacagagatttcctcaacaacatctgcatacccaagcttatccgtgcggaagtgctcaatgttggcaatgggaagacagtttagggtcttggtgatgaactccatctcatccctctccacgtccttcaccaccagaatctttgccttagcaagatagtgcagagacaagtcagtgaccgcgtcgcacaagatgctcttctgaatgagcaaaacattgcatccagcagctttgatcttcttgaccatcccgaggatataattgcgctcctcacgtagtatgcggtccatctgtgcatagtccgatacaatgacactctgctcaatgtcagtcttaggtggtgagatttggaactgtatgacagcgatcttggcattctctacccgagttggccccccagcagcatggctagccttcttgtcaaaaatgaggccagggacaagctcagtatcgtccacggtgccaccaagcttcttgatgatgcggatgtcacggaggtcgggaaggtcagggtgagcgggatccaccacggagagggcggcgtcgacggcgaggggcgagagaagggtggagtactgggagacgaccttagagttgagaggatgatcttggactcgaggacctcgccgtaggtgctgaaggcgttgtggagggagtggtcgtccgtggcccaggcgaggccgccgacgaagcagcggtactcaacatccgacgccgccatctcgatccgcccacccacgaaaccgaaccccggagaacctcacgaacccgaacccgaaccggagggggaggagaagccaac

SEQ ID NO: 15081 - DNA, 1325 bp, Zea mays
  Clone ID: MRT4577_113756C.1
ctgtattttttcaaatcttgctatagtgtggagttcagttgttttagtgctttaggtgtactttctgtttgtaaaacatttaaaacaggctgacaatctgaataatgagtacagaggaagggaaggaacgagtttgccttcccatccgctctcaaaaaataatatataatacaataaaaatatttttctttccctacatctctatcgaataatacatcatcatgataagttgtcatttggtctatgacttgtgaaactgcaatccctcagcaatctcttgtgcatttttccttttagattcatgcaattcctgacccaagtcaggtgtgtgttcttataatgtttctcgcttctttttaatgtttcttgctcccttgttgctcagacagagcagttcggaaccttggacatctgatcaggaatgaagaggaaaacaaaaacaaacagtttgttcattactactcaaaagaacttggccattcgtatggtacattcatccatcatatacgtatgttattacaaaaaagaatggtgatttttaaaaagaatcaatagaaaatcagacagctgaccaaaccaaaaggaggaaataccaagaaacagtagcaagcattacagttcatcaaagcaagagcaaattaataaatgaagtagagaataggaaagataatcaattttggtttagctacacttttatcgtctgataccagacgcatgctactgtaggcgtgcaacacgcgcctactgctctagctactcactgtgtttagtaattaaactttaatatgatcttattttgcttttatctcttcacatgatattgacatgaccaaatgcatttactgtgggttctaccaagaggcttgcccagtcgatgctattgttgaggggcctaactttgagttttttatgtcttgctgctaagccttgatatgcatttagccatatgatttcctctcgctggtacctgtcattgaaggagctggagggtcaataactgattggagaggggacaagctctattggcctgttactgcagaatcacaacccacaagttttaatgtggtagcagttggggatgcccgtgtccacaaagaggcccttgatgcgttgcggtggcgctagcgtgctctttagataagcattatactaataaccaactatttagacatttacatgtgatatttgtatgaccaataataagctttacctgtatgcttgttggttggcctcaacctttgcaccaataatagacagcttggttgtaaactaccaagcagtggcttgctgtttgcaccaagcagatattatgtcttgggaacgct

SEQ ID NO: 15082 - DNA, 418 bp, Zea mays
  Clone ID: MRT4577_113757C.1
acagcagagggggtgttttttacaatcttggatagcaactggactgtccaaacggatctatctgctaaagcaataaccgctaatagaacctacctggagaacattacagaggactagtcaaacgaccttaaccggggggagattataatctacatcggcagcactggcggctattgatacacgaaaactgctacagagtctaagctgagcctacaattgacctgctttccctactaatcaacactgaagctatataagggcggagcacgtcttcattgtcataatcctaagcctcctccaagctatggttcgttgacagataaaaatgcacaggggccatcttcatcttggtgatgccagacagtttccaagcaccaaagaagtccttgagttttgttccttcccttaaccgtggaac

SEQ ID NO: 15083 - DNA, 424 bp, Zea mays
  unsure (1)..(424): unsure at all n locations
  Clone ID: MRT4577_113758C.1
gccagccgccgagcgctcgagccgggtgcccggcgcccgtgtgacccgtgaccggctgaccgaccgcagtccgcgtcctgcgttcacgcgtgtacgcgccgcggtggcgttgtccgccccctgtccgcccctgacagacgcgaccagctcaccacgccgctatggcgcactggcgcggttcaagtgtccagccgtcgtccgccaagttgcccggagcaccgtcgcgcgccgcagtccgcagacaaggacataaggtgtctgacagtctgagcacgcggatctgagcagagcagctgtctgagcgcgctgctaaccatgcggtcacgccgctgtatgagcgcacctacgcgcagatctgagcagacaagacaccggtcatcctnctgaacggcatacccgaacgtcaccgcggttcgcctcggcc

SEQ ID NO: 15084 - DNA, 1055 bp, Zea mays
  Clone ID: MRT4577_113759C.1
cacagaggtccctcggtctagggttcgtccccttccccccggagcagccaatccgaaccccatccagggcatgcagccaaggacgtgcacggccacaacatctccgtcattgagagccagtccatcgtcggccatggagtcgacgtcgtcggcgggcacggtggtgcccgtgcaggcgccggctacgccggtgacgggcaccgtgatggcgacgacggctacgacggtgtcggcgactacggtggtgacggcggcggctacggtggtggtggcggcggctacggcggtggcaaccgtggcggcggctacggcaactccgacgggaactggaggaactgagcggtggggcccgcgcggccaagttatcctgttcgctaccgtgttgtttaccctagtccagagtgtttatcttcgttcgtctcgtgtttgttgttgcccatctgtgtttttgattgaaggtcgctctgtgtcagttgttagtgctgtgttcatcctcggctccagcagacccatgcatcaaccagcatggactgcggatcgatgggtgctgttacccccgtcaggctttattctaagttaaatcctaaggaaaaaaaaaaaaaaaaaaaaaaaaaaaaaaaaaaaaaaaaaaaaaaaaaaaaaaaaaaaaaaaaaaagaaaggacaatataaaaaaaaaaaaaataaaaaaaaaaaaaaaaaaaaaaaaaggggggccctctttaaaaaaaccaaaatttcaatcccctggccggcaatttaaaacttttttattgggaaaacctaaattaaacccactggactcgttttaaaaaacatccacttggaaaaacctggggtaaacccaaataaaccccctcgaaaaaaacctcccttcagcagctgggcttaaaatggaaaaaggccaccccccttgtcctttccaaaaaattgcgcagcttgagggggaaacggacaccccctttgatacacttataaaccccctagggccgggtgtttaccctaagttgccccccttaattgccaagtccccaagctcccccccttaagctttaa

SEQ ID NO: 15085 - DNA, 508 bp, Zea mays
  Clone ID: MRT4577_11375C.1
tagaagacaaaaggtacaagcgtgacgcaaaagcaagtaccagttagcgtgaacagtacgggggtactgttcatctatttataggcacaggacgcagtctgtgagaaattacaggggggggcccttacatttattattgacttatatacaattctagggggactagatagccttttcccctttaagtcggttcctttttccgccatttagccgaagctcccttacggggagcttcggagcaactccaaccttcggcacgatcatgctttttacaccggacatgcttttagcttgagtccgaagggacctggcacttgagattccagggaccaacttgctcttcagatgacacggggcctcacagggggcgatgcaatttaacagacttctcggcgccgggcgggttgggggcaacaatgaattccggtaagccattcccctgcttggtggggactttcccctcgagtttttttttttttttttttttttttttttgacgaaccgaaag

SEQ ID NO: 15086 - DNA, 1399 bp, Zea mays
  Clone ID: MRT4577_113760C.1
gggtacctcgaagccggccgggccggtccgattcagaacgaaacaaacccaccacgtcggcgtcggcgcaccgctgctagagtgctaggtgctccgagcgtcattctccgccccgacatttaaaccttgctcccgacaaccgccgccgactcctccccaatgctctcctcttcctcctccacccactcggccacctcgcccttccccggcctcgcctccgcaaaccctaacccccgctctcgcctcctccgcctccgcgccgcctcgcccgtgtcgtccgcggtcttgagcgcgagtgggcccccgccgatgagtacggttagggcctcgttcgccgctggggcggccggccggagagctgcggcagtgggggagttggcgacggagcggctggtggaggtggcgcagcgggcggcggacgctgctggggaggtgctcaggaagtacttccgccagcgggttgagatcatcgacaaagaggaccacagtgtcctgttacaattgcagatagagaagcagaagaagcaatggtgtcagttatactgaagagcttccctactcatgccatttttggcgaggagaatggttggagatgtgcagagaattctgctgattttgtttgggttttggatccaatagatggaacgaaaagtttcataactggcaagcctctttttgggacgcttatagcacttttgcacaatgggaagccggttattggtgtcattgaccagccaatcttgcgagaaagatggattggggtggatggaaaacaaacaactttgaacggacaagaaatatctgttcgctcttgtaatttacttgcacaagcttacttatatacaacaagcccacatctctttgaagcagatgctgaagatgcatttattcgtgtaaggaataaggtgaaagtcccactttatggctgtgattgttatgcttatgctcttctggcttctggttttgtggatattgttgttgaatctggtttgaagccatatgatttcctctcgctggtacctgtcattgaaggagctggagggtcaataactgattggagaggggacaagctctattggcctgttactgcagaatcacaatccacaagttttaacgtggtagcagctggggatgcccgtgtccacaaagaggcccttgatgcgttgcggtggcgctagcgtgctctttagataagcattatactaataaccaactatttagacatttacatgtgatatttgtatgaacaataataagctttacctgtatgcttgttggttggcctcaacctttgcactaataatagatagcttggttgtaaactaccaagcagtggcttgctgtttgcatcaagcagatattatgtcttgggaatgctaaatgtgtgaggtcttacctt

SEQ ID NO: 15087 - DNA, 615 bp, Zea mays
  Clone ID: MRT4577_113761C.1
cacgcctgcatgtaccgggctcctattacacggtcgacctcagcgttcgtttaaagcacatattgttccaacaaaggcacttaattattttggctactccagctccttggtctttatgcttgtgctgttaccgctaccttattgcaacactgctcacaggctcctactatttcccttcttcccccgaacctttcaccaactgggcaaatcaggatgtgaaaacgcaattctttaaccctacaggaaccagcagccaatcttaggtgcaatgttaccttaataaccctacatcttccaacaatcataaaacgtattacagctcacaccatttagtgcatttattggcacaaaacatcaggtgctcaacaactacaacaacatgtactaccaaaccttgctggctactatcaacaacatcaggttctgccatacaaccaactatctgcattgaactctgcttcttattatcaacaacaacaactaccattcatccagctatctgctgactacccccagcaattgcttgcagtcaaccaactgacatcattcaactctcctgcttatttacagcatgaacatctactaccattcatgcagctagctggtgtgagccct

SEQ ID NO: 15088 - DNA, 641 bp, Zea mays
  Clone ID: MRT4577_113762C.1
gcggcggggcgtgctttcttagaagtgggttggcttctcctccccctccggttcgggttcgggttcgtgaggttctccggggttcgggttcgtgggtgagcggatcgagatggcggcgtcggatgttgagtaccgctgcttcgtcggcggcctcgcctgggccacggacgaccactccctccacaacgccttcagcacctacggcgaggtcctcgagtccaagatcatcctcgatcgggagacgcagaggtcccgcggcttcggcttcgtcaccttctccacggaggaggcgatgcggaacgccatcgagggcatgaacggcaaggagctggacggccgcaacatcaccgtcaacgaggcccagtcccgcggcggccgtggaggcggcggcggtgggtacggtggtggccgtggaggcggcggctacggcggtggcgggcgccgtgatggcggtggcggctacggcaactccgacgggaactggaggaactgagcggcggggcccgcgcggccaagatatcctgttcgctaccgtgatgtttaccctagtccacaggggttatctttgatcgcgccgtgtttgtcgttgcccatcagagttatagattgcaaggtcgctctggggcagtggctactgctgt

SEQ ID NO: 15089 - DNA, 837 bp, Zea mays
  Clone ID: MRT4577_113763C.1
cccagcgtccgcccacgcgtccggactagttctagcccacgcgttcgtccacgcgtccgcccacgcgtccggagccgaattggttggggccttgggggatgagatagtagtgattgtctatataggtagcttgagtttttttttatccacaatatggccagggaaattgagtcttcctgtgtgtctatattgggtaattgtagcaactgattcgaaatttaaacttggggtttctactgtgaatatagcaaatgtctaattgggtgaaaaaaataaaaaaacttatacacagaagaagcgatgcaaaaacgccataaaaggcatgaacggcaaggagctggacggccgcaacatcaccgtcaacgaggcccagtcccgcggcggccgtggaggcggcggcggcggcgggtacggtggtggccgtggaggcggcggctacggcggtggcgggcgccgtgatggcggcggcggctactgtggtggctgcggcttactgtggcggtggcggtctactgtggtggtggcggcggttactgcggtggcaaccgtggcggcggctacggcaactccgacgggaactggaggaactgagttgtggggcccgcgcggccaaagtatcctgttcgctgccgtgatgtttaccctagtccagagggtttattctccgttcgacttgtgttttgttgctgcccatcttgtgttttttgaattgcaaaggtcgctcttgtgtcaatatgttagttgctgttgtttattcttcgcttccggcaaaccccttgtatttaaacagtattggactgcggattcgatggattgctgttatccccctgtcaggct

SEQ ID NO: 15090 - DNA, 619 bp, Zea mays
  Clone ID: MRT4577_113765C.1
gccggccgggctgcgataccaccactagatattcagacattaggttatctactccgagagacaataccctatcgagccatgagggtgttgctcgatgacctcgatctcctgatctctcgatgaggaacgccacctccacacatacaaacggagtgtgattgctgccagacaccgctcgccggattgatcgtaccgctcggcgtgagtactctgatcaccatccggagtcacctgccacctccggtgcatctgctaacggcgggacacctgacgacggcgaaaaccctgcctgcgacagacaatgtgatcgacatcgaatcatctgactccgacgccatgacactacgctactgaaccacacaaagactgaatctcatcccgcagcacacacaccatgcatctagtgctcagacgcatcttgctgatgaccagactacaggagaaccagcacatctaggaggaatccgatcttgatccagtgcttgcactgactgatgcatactagcataccgatgatgacctactactgctacacaccgtggcattggctgcgaaatgagcgttgccgatatttcacttacgaggagacaataacacattatcagctttatcttctgtg

SEQ ID NO: 15091 - DNA, 2611 bp, Zea mays
  Clone ID: MRT4577_113766C.1
ccccggttcacggggccacttgtccgcgggcccccctttttttttttttttttttttttgaaaaactggcaacctttgccttattcgcactcaaagcgagagtaagtagcttttcagatgagcacaaccattttgcagcaccaagaagcaccattttttccttaggattaacttagaacaaatcctgacaggagtaacagcatccatcgatccacagtccatgctggttgatgcatgggtctgctggagccgaggatgaacacagcactaacaactgacacagagcgaccttgcaatcaaaaacacagatgggcaacaacaaacgagacgaacgaagataaaccctctggactagggtaaacatcacggtagcgaacaggataacttggccgcgcgggccccaccgctcagttcctccagttcccgtcggagttgccgtagccgccgccacggttgccaccggaacagacaagagcagcgctaatcagtgacagagcatgatgccatccagatgggacaagataaggcatgttatggtgttctctggtttctcatcgagaatagctctttctctttcgtcaagggtttcaccaatggcttgtaacaactggatgtaaaacattttttgttttttaatcgatgtagtgtgcctccccacccgtggctgcagcagacgtagagtacgtattctagacacgtagaatccatcatcagagtatgaggcgtgctttattctgtgtgcttcccacaaaaaaaagagtagcctattataaacattgtattagagcacatgacgttctaagttttgaccacatttctctgctattataatgcagccataaagattcaatttttatgttgggcaccataaagatgtttggcaccattcttcccaaacatttatctactattataatgcgtgctttattcaatttttaggattgttaggagtgaagtcttagtctcaagatagcatattgctgtttgcctatattatttagtgtcgattataattagtattgttgtttagtgcttggttcatactacatctaggcagtgttctaaaagtttgggaggaatggaataggataacggtcggctaacatacatcttttcttcagccgtggtaatgaatttgaatactgtagttactataatgaatgttttttaacttctctactcttctttactaatcttttagaacagtgtccttttctattatttttattacttcactgtgttgattgtcttggtgtttatactcttcttcagttgttctctgtgccaactgtggtcttgtacgagccttctctttggtagcctaataggattttgtgtcttttgtttatctttggtatttaatcttatactaaattggctcgtttgattttcaggaaatgttatggtgttctctggtttgtcatcgagaatagctctttctctttcgtcaagggtttcaccaatggcttgtaacaactggatgtagaacattttttgttttttaatcgatgtagtgtgtttttgcgttacagtccattgtggctatgggggcggcacatgtagtgtgtagtcatcgtgaatttaatagtaactagctctgcagttgtgattggtttatgaatgtgtttggttggacctatcaattggatgtttgttggctacatcacatattcttttaagtttactttgtgtggtcgttgatgttgtatttataaagtgcaggttcattgttttaactcccgtggcaacgcacgggcatatacctagtaaaataatggagttgacaaaaaaagctgggcaggaccgaggacacggacagggcacgtgatccaagattccaaggtgcgtcgcggcgtgtcgtcggctcgttgcctccctgctggctgcctgcgtagatgacggtccttgctcgctcccgacccgtcccaacaacaacaattgtaatacaggaacagcccaggccagagctaaagtaaggtactggaacggctagcagtgcgggcgcgagctgaggagcgggaagtcctgcggcgtcatccaggcgtaggtgaagcgcacggcgcccccgcgcggcgccagcgcccggccgccgcggagcaggcagcgccgggcgtcgacggcgcggatggcgcgcgggtccacggcctccacgctgctgagcccgtagcagcgcagcagcacgcgggactgcgcgcaccggcacgcgttccgcacctccaccgcgtactcgggcttcccctccaccacgcgccccgtcgcgcgctgccgcaccaccaggtcgccgcgccggcaccccgtcgctgttggcgcgcgcgctggtgctggtgccgtcgacgcggcggccacggaggaggcgagggcgaggaggaggaagagaagcgctgttctgattggttccgccgccatggcacctcacttgcggttgcagttgaagttgcaggggggtggcggaagattgtttggcttggctatttgcttatttatttatccacgcatctgcgttgggtcagaagtgtactgactactgagtgacacggtgtgcgtgaacgtggtaagtggctggcgacggagacagcgcaggtggtcccggccggcctcgaggtacccaatg

SEQ ID NO: 15092 - DNA, 4322 bp, Zea mays
  Clone ID: MRT4577_113767C.1
cccacgcgtccgcccacgcgtccgcccactcgtccgcggacgcgtgggtggatctgagactggattatttagagggagtaaatgtataggttaatggtagctactactttgacttatcaatcgtcccgccagctgctcgctgaaacgccgcggatgaaacagatgtccgtccgtcggtttgcgtgctaggctactgtgccgcttgacagaagcgggcactcacctctctctctctctctcccgcacacgttgctgtcggcagcctcaccaatctcggcgccagactgggaccgcgaagggactggtggtcgccggttcctcccgctactccggctgcttttcctcctctctccgtcgccttccccttccgggctgcccatatttcattcagtgccaacaagtgccaagtgctcgtgtccggatgcgccagcgccgcctggtcaacagatttttgccctgcgctgtcactccaccacgctgcttgtactgaaagctttttcccagaataaaggctggggaggaggaagcggcggcggcggcgctctcagaagagagggtgagatgaagactcggagctcagcgagaggggagccgaggcgtctcggaaatgcggctcttctggcgctcatgctctgctccgtcgtcgcgctctccctcatccgggggagattcgccccaattgtcactaccgcaggagatgccatcaaatccgaggacgacgctgcggcggctgcgctcagggtcagcaaggcggccgtcaacgttgacaccggcgacagcgccgacgaggccgccgccgaagctgctgctgaggagaaagagaaggaggaagtccagccgaagcccgctgacggttccggctccggttccggcggcagcgcagccaagccggtgtgctacgagacgagccgccgctccgacacctgcgaggcggctggcgacgtgcgcgtcgtggggagcacccagacggtgtacgtggactcgctggaccgggagtggaagaccaagccgtactgccggaagcacgacaacttcgcgctcgcccacgtcaaggagtggtccctgaagccgctcccctccggcgcggcgccgcagtgcacggtcaacagctcggccaccgcgttcgtgctgtccacgggcgggttcaccggcaacccgttccacgactacacggacgtgctcatcccggccttcatcacggcgcacccgctccgcggcgaggtccagttcctggtgagcagctacaagtcgtggtggatgaaccgctacatccagatcttccagcagatgagccggcacgaggtggtggacatcgacgcggacgacgaggtccggtgctaccgcagcgtggtggtgggggcgacgttccaccgggagctgggcgtggacgcgtccaaatcgccgccggggtactccacggccgacttccgcaagatgctgcgcgacgcgttcgggctggagcgcgccacggccacgcccagcggcgaccggtgggacatccggcgccgcccccggctgctcatcatctcgcgccgcccgtcccgcgggcgcgccttcatgaacgagcgcgccatggcggacatggcggccagcctggggttcgacgtgcggatcggggagccagacaccagcaccgacacgtccaagttcgcgcggctggtgaactcgtgcgacgtgatggtgggcgtccacggcgccgggctcaccaacatggtgttcctgcctgccggcgccgtggtggtgcaggtggtgccgtacgggcggctggagtggctggcgcggaacacgttcgcggagccgtcggcggggatggaggtccactacctggagtacgtggtgcagctggacgagacgacgctgagcgagcagtacccgagcgatcacccggtgctgagggaccccatggccatccacaagcaggggtggaacgcgctcaagaccacgtacctggacaagcagaacgtgcggccgccaccgcggtggatcaagaacaccttgctccaggcgctcaagatgctgccgcacggccgggacgattgataagtcaaattagttgattcacctggatctcagcctcagttatttagagggagtaaatgtataggttaatggtagcaactgctttttttttgcctttatttgtttgtacgagtaagaggatgcaccagcgtagctgtgaatggcttcacagttctcagagacgaactagtagtgttaactgttgatattttattattatatatgttgctttggtagcaaaaaaaaaaaaaaaaaaaaaaaaaaaaaaaaaaaaaaaaaagtgctttcttagaggtgggttggcttctcctccccctccggttcgggttcgggttcgtgaggttctccggggttcggtttcgtgggtgagcggatcgagatggcggcgtcggatgttgagtaccgctgcttcgtcggcggcctcgcctgggccacggacgaccactccctccacaacgccttcagcacctacggcgaggtcctcgagtccaagatcatcctcgatcgggagacgcagaggtcccgcggcttcggcttcgtcaccttctccacggaggaggcgatgcggaacgccatcgagggcatgaacggcaaggagctggacggccgcaacatcaccgtcaacgaggcccagtcccgcggcggccccggaccagcctaagcatgtccgcccctccaaccaggcccagtacaagaagggccatctccgcccgcatcaccacgcggccgacaaggacgcggccaagaagcaccaccatcttgatgtcaacaccttgagggggcatactgactccgtcactgcacttgccttctccaatgacgcctgcaacctagttaccgtatgtgctgatggagccatcagggtattcaggatcgatgatacctctagcaagagcttcaagattctgaggataaacttgccagctggagcgcaccctacggctgttactttctcagagggctcatcatctgttgttgtggcggcgcaggcgcttctgggatcatctctttatatgtatgcggatgttagcgctcctccaaccgcggaaaacaaactgcagggaaagctttctccacctgaaatcaagtggagtcaccccaagatacatggcaaggagtctgtgctcaaccttgcagcggcccgtgcaactcatgggtctggtgatgggagcactattatcatttcatgctcagaagcaactgatatcaaagtttggcatgggaagagtgggaaggagtttggtacagttgacaccaatcagttaaaaaataatatggctgacatatccccaaatggtcgcttcatagctgctgcggcttttactgctgatgtcaaggtgtgggagatagtttactcgaaggatggttcagtgaaggaggttaataaagttatgcaactcaagggtcataagagtgctgttacttgcttgtgctttgctcccaattctgagcaaattattactgcatccaaagatggttccattcgagtatggaacattaatgtaagataccaccttgatgaggatccaaaaaccttgagagttatgccaattccacttcatgactctaaaggttctgtttgccagtatgatcacatgacagtctctcctgatggtaaaattctggctgtaacaagtggatcaacgttgcaatggttacttgtggaaactggtgcagttttggatacagctgacaaagcacatgaaggtgatataactggcattgcttgggctccacggacaattcccaatggtggcgtgcatgtttttattttggcgactgctggtgtggacaaaaaggtgaaactttggacagctccagatgttggttcaacatgagtggtcgaggattgaatctgcataagacagctttgccaagggcacagaattgaaggtgagacaatagatggatgcaggcttgatgtagcccagaacagtaggtgctccactgataatattgcactgaaccgaggcagacattgttagttttgttgcgtagagtttgagaggaggaagggaagggaggcctggctgttactgatgagaccccaatgcatcacgcaggcggcagccttggggctgtagtttcgctaccttttatacaataaactgaatgttgtctgcatttgtattttttttctttccttcctttttactgttggaatgatctggctgtgtgatcaacataatttaagctgctgctgcttggaatagacgtcattttattttgtcaagcaaatgtgctgctttgcgcattgtttgacattatattgtttgataaagtgtgctaagtatgaaaatgcc

SEQ ID NO: 15093 - DNA, 738 bp, Zea mays
  Clone ID: MRT4577_113769C.1
gccggccgggcctgcaagctgaacgcggcatccttcctttcctcctcccttctgcccccatttcgttcctttcacaccggagaccggcgatcgactactcgaccagccctctccgctcttgtctccgatggcggctcgcgtcctcgcggccctcgcccttgccctcgccctcgccctcgtcgccgtacccgctcccacgcgggcgtccaacgacgagggggacgcgctctacgcgctgcggcagcggctgtcggaccccaacggcgtgctgcagagctgggatcccacgctcgtcaccccctgcacctggttccacatctcctgcgaccaggtcggccgcgtcgtccgcctggacttgggcaactccaacgtctccggctccatcggccctgagctcggccgccttgtcaacctcaaatacctggagctgtacaggaacaaccttgacggcgagatccccaaggaattgggcaacctcaagaacctgatcagcttggatctgtacgccaacaagctcacgggaggaatccccaagtcactctccaagctcgactcactcagattcatgcgcttgaacaacaacaagcttacaggatcaattccaagggagtttgccaagctctccaacctgaaagtcatcgatttgtctaacaatgatctctgtggaactattcctgttgatgggcctttctcaaccttcctctccgagcttcgagaacaacagcaggctcaacggtc

SEQ ID NO: 15094 - DNA, 529 bp, Zea mays
  Clone ID: MRT4577_11376C.1
aaaaaaatcagggcttccgaacaggactggtgtcacaaaaaaaaacgtgcgcaatgtggtcccgatgacaagttagaattatgaaaacaaaataaaatgatatactaacctgccaactaatcctttacaaggaactgcaactaacaacaaactaaacttttatgtttcccccccacggtcttccgaaaaaaaaaacactttcttgttgaaaatgtaaatatatcctatcgaaccgaagtatacgaaggccaggaaagcccatgtacatcaaaccacccaggatcccatgtcaacggtcacactccatcggaagagtcggtcttctcatttccactcccaccaatgcgcccgtagaacaagatgtagccatgatcagtgttgcccgaatattcacgagaagagccataaaaggtctgtagggtagactccgggatcatctcgacattgtcatcatcgaaggacaaccaatggtcatggcttttgatcatggctacgtatgcccctggttggggccgctccccaggtggac

SEQ ID NO: 15095 - DNA, 303 bp, Zea mays
  Clone ID: MRT4577_113771C.1
tttttcttacaggcgggttaagcgcgaatctcactacccggaacacatttgaaaaaatggcaggcctaacctttaccatgtattgcttgaagggaaaaagaaactcctggttccagctattgggcaaaagtgctctgaaattggtctcgacattgatcagcggcgtcacaagtggctgatcataaaccataggtgttttgccaggcagaacaactttaggcgtagccttgcttggggtccgctcatcagcatttggtttcccaagatcaacggcccaaagaccctttcccctatgggcgttcc

SEQ ID NO: 15096 - DNA, 831 bp, Zea mays
  unsure (1)..(831): unsure at all n locations
  Clone ID: MRT4577_113772C.1
acctcgaggcggcgggtctcttttcctttcggtctttcacaccggggactggcgagcagagccgcgcacagcagaacgcggaagcaagaggaggcgatcgactactcgaccagccctctccgtgtctccgatggcggctcgcgtcctcgcggccctcgcccttgccctcgccctcgccctcgtcgccgtacccgctcccacgcgggcgtccaacgacgagggggacgcgctctacgcgctgcggcagcggctgtcggaccccaacggcgtgctgcagagctgggatcccacgctcgtcaccccctgcacctggttccacatctcctgcgaccaggtcggccgcgtcgtccgcctggagctgtacaggaacaaccttgacggcgagatccccaaggaattgggcaacctcaagaacctgatcagcttggatctgtatgccaacaagctcacgggaggaatccccaagtcactctccaagctcgactcactcagattcatgcgcttgaacaacaacaagcttacaggatcaattccaagggagtttgccaagctctccaacctgaaagtcatcgatttgtctaacaatgatctctgtggaactatccctgttgatgggcctttctcaacctttcctctccgaagctttgagaacaacagcaggctcaacggtccagagctacaaggattggttccttatgattttggatggtagatgccgatcaacaatgtaccaccttccccagttngaaggggggaaagacnagatagtatttatcatagaaacctagctttcagaatgtcgtgactatatatatgtatgatattaagact

SEQ ID NO: 15097 - DNA, 2411 bp, Zea mays
  Clone ID: MRT4577_113773C.1
cgcatcaaaaagtgcatacatagcgaatcagacatttagtttaaaccaattatttttattcttgcaaatcacaacagtaccacaccgccaagagtttaattttctggtcctcaagcacgagcaatacaagcacaatctaagagttcaaaagcccaggcatattaagttcttacaaactagccattgcagtcacactgcggatccatacaagcttatgaagactgtcgaagctctgggcgcacgaaatctgcatcagcggtcactgagatgtcaacggtgggcctcagctgagcacagacttcgatggcaccgtgcacagggtcagacatgaagttgctgatgaggtcttggttgatcggtgctttcttgtcaacagtcacaaacgcctgttgggtcaagatgtaatcgaagcgtggtgcccatttcctagatcccaaacgagcagttgtggagcagttatcgaccatgaaggccacaccgcgagcatgcatgaacgggttcaacgagtccacggactcgatcaggctctcgttaattatctctgagtaagagtggcccttcttcctaaggacctcaatctgagccatcattaatgcaacatacactccggcagtgaagggatgcagtgggccaagatcaccttgtggcctggttgaacggaccctttcacccaccttccacatacgtgtttgatcaatttttcccatagggaaagcagggagcccttccttctcataaaatctcctcccagccaacaccacacttctaatctcacttccagaagagacgtcttcatagcactcatacaatatgtccatgcatgggtaatatgctgcactataggcctcaataaactgcttctttccttcttcagtcagagagttatacacttcaagcatacccttctttgaaatagttttcgatataattccagtgatgctctctacagtattcttatatgctgagtcctcatccattccttgttctgtgtatctcctgaaaagagcctccaccatgccatggacagcaccaagcaaaatacctcgctcgccaaaaatgtcactccggtactcctgctctagagtagtagcaaatgtgaaaggagaacctaaagctactgaccaccctagagctacatctgttgcccttccatcaacatcctggtgaacagcaaagctagcattgataccagcaccattgatctctttgccctgaacataaagtcttctgactgatgggcccattcccttggggcatacagcaatcacactgatgcttttagggaaatcaaaacccagagattgcaaatgtccaaggagaaatccatgtgacaaaccaagaatactgtttggtttcatgtgcgagaaaattttctcgtagttatcagcctgagcagaatcagatatcagtagcaaaacaagatcactgtttgatacagtctcccatatatcacccagcgtcccactctcttcggtgaatcctgctgctcgggcttcttcaaaagatttagaacctttccggagaccaatcttaacaacaatatctgactttgcctcaacaagtgagtctctcaagttctgagcttgcgcaggaccctgcgagccccagccgattacgccgatctgtttgattcccttgaaggcctccggtaacagcgggaacagatccctcccacccctcacaatatactcctcatggccggccagggacaccttttccttcttgaagacggaggtctcgaagtcgagcgacggcatggcggtgccgatgaccgacggcgacgagaccttcgcagccacggcggtggcgggcgccgtgatggcggcggcggctacggcggtggcggcggctacggtggtggcggcggcggctacggtggtggtggcggcggctacggcggtggcaaccgtggcggcggctacggcaactccgacgggaactggaggaactgagcggtggggcccgcgcggccaagttatcctgttcgctaccgtgttgtttaccctagtccagagtgtttatcttcgttcgtctcgtgtttgttgttgcccatctgtgtttttgattgaaggtcgctctgtgtcagttgttagtgctgtgttcatcctcggctccagcagacccatgcatcaaccagcatggactgcggatcgatgggtgctgttacccccgtcaggctttattctaagttaaatcctaaggaaaaaaatggtgcttcttggtgctgcaaaaaacaaaaaaaaaggaataaaaaaaaacaaataaaaacatagaggcccccctgtttaaaagatgaaacataccctaccccgggggcggcccctttaaaggatccaagtttacatccccgtgcatgcaacggaatattttttttttagtggcacctaaattaaattatctggccgccgttt

SEQ ID NO: 15098 - DNA, 912 bp, Zea mays
  unsure (1)..(912): unsure at all n locations
  Clone ID: MRT4577_113774C.1
cgctatactgtagttgcgctgacttgaccacccactggccacagcagctgaaccaagttcaggcagtttcgtgcccttttcttctccaccagctcaaagctgaacgcggcatccttcctttcctcctcccttctgcccccatttcgttcctttcacaccggagaccggcgagcagagccgcgcacagcagaacgcggaagcaagaggaggcgatcgactactcgaccagccctctccgctcttgtctccgatggcggctcgcgtcctcgcggccctcgcccttgccctcgccctcgccctcgtcgccgtacccgctcccacgcgggcgtccaacgacgagggggacgcgctctacgcgctgcggcagcggctgtcggaccccaacggcgtgctgcagagctgggatcccacgctcgtcaccccctgcacctggttccacatctcctgcgaccaggtcggccgcgtcgtccgcctggacttgggcaactccaacgtctccggctccatcggccctgagctcggccgccttgtcaacctcaagtacctggagctgtgcaggaacaaccttgacggcgagatccccaaggaattgggcaacctcaagaacctgatcagcttggatctgtatgccaacaagctcacgggaggaatccccaagtcactctccaagctcgactcactcagattcatgcgcttgaacaacaacaagcttacaggatcaattccaaggggagtttgccaagctctccaacctgaaagtcatctttgagaacaacagcaggctcaacggtccagagctacaggnattggttccttatgatttttggatgttagatgccgatcaacaatgtaccaccttccccagttgaaagggggaagacaagatagtattatcaatagaaacctagcttc

SEQ ID NO: 15099 - DNA, 1195 bp, Zea mays
  Clone ID: MRT4577_113775C.1
gccggccgggcccacgggccgggagtttcgtgcccttttcttctccacctcgtggcagctgaaggcggcatccttcctttcctcccctcttctgcccccatttcgttcctttcacaccggggaccggcgagcagagccgcgcacagcagaacgcggaagcaagaggaggcgatcgactactcgaccagccctctccgtgtctccgatggcggctcgcgtcctcgcggccctcgcccttgccctcgccctcgccctcgtcgccgtacccgctcccacgcgggcgtccaacgacgagggggacgcgctctacgcgctgcggcagcggctgtcggaccccaacggcgtgctgcagagctgggatcccacgctcgtcaccccctgcacctggttccacatctcctgcgaccaggtcggccgcgtcgtccgcctggacttgggcaactccaacgtctccggctccatcggccctgagctcggccgccttgtcaacctcaagtacctggagctgtacaggaacaaccttgacggcgagatccccaaggaattgggcaacctcaagaacctgatcagcttggatctgtatgccaacaagctcacgggaggaatccccaagtcactctccaagctcgactcactcagattcatgcgcttgaacaacaacaagcttacaggatcaattccaagggagtttgccaagctctccaacctgaaagtcatcgatttgtctaacaatgatctctgtggaactatccctgttgatgggcctttctcaacctttcctctccgaagctttgagaacaacagcaggctcaacggtccagagctacaaggattggttccttatgattttggatgttagatgccgatcaacaatgtaccaccttccccagttgaaagggggaaagacaagatagtattatcaatagaaacctagcttcaagaatgtcgtgactatatatatgtatgatattaagactagatttgataagggtggcatagcaagtcctgatattctgtgtgcattcagaatagctgcttttatgcccttgtgttgatattttgcaaaccaaaacaaactgttctgaaacgagggcacatattgttcatgaataaaaaaaaacaaaaaatgccaaaaaaaaaaaaaaaagcggccatacataacaaacaaaaaaagaaagagagaaggaagaaaggg

SEQ ID NO: 15100 - DNA, 307 bp, Zea mays
  unsure (1)..(307): unsure at all n locations
  Clone ID: MRT4577_113776C.1
aatggcgcagcgacagaacaggacaatcagntgttgccatgtaacattacgaagcttttatcaaagctacgacttctgcatgaatttcaagacagcagtgatcagacggttttttcttgggtgttgctggaccaccgacattgcggatgacagaaatcattgaattgcagagcaggcggggagactgatgctctaccaaaacggattggaaaacaaggacaagcggatcggcccagaggtggtatagaactagagctgcatgcaggcccatatagcacgatctgcctatgacttactaacatggccc

SEQ ID NO: 15101 - DNA, 426 bp, Zea mays
  Clone ID: MRT4577_113777C.1
cggacgcgtgggcggacgcgtgggtgctgatgtaactgttatgtctgaagcgatttcaaacgaaagagagaagaacaatgctagtatgcctcttattcatggaaaggcattataccaacctaataaaataaaattaaggaaacctgcaaaactttggaaactccggtgggtccaatttccgacaatgcgaaggaactgcattccatggtaatgaagcttggacacctttcaagtcttcatgctgggaatcttcacaaggctctagaagttccaggagaaagggaatctatgagatcccaggatttgctctcaacacatcctgatcttttgcaaagtgattcatcaactgagaaggatagagcctctcttggcatggattctggctctccagatttggaattgaatactgacatttgtttgcaagat

SEQ ID NO: 15102 - DNA, 340 bp, Zea mays
  Clone ID: MRT4577_113778C.1
ggaagaagccccaaaacaatcaacaattcccttttttttcaacaataattcgcccctccatacaagctttttttttttcaaaaagcaagggggtttagggcaggggacttttggcccacaaaaaacaaaagtttttgggcgttaacgagtacatgggaaccttggctagttctttttacgatctgccggatcagcacttaacaggcgtaattggggggggggccacctgactcatccctatcgggctcgggatctttgctaggatctgcactccttaaagctctctcccaggggggcacttttctcagcttcctagagctggcctccattccccaaacta

SEQ ID NO: 15103 - DNA, 473 bp, Zea mays
  Clone ID: MRT4577_113779C.1
tggttgttggacagcaaaccatgagctgaagaagccatcaatcagtctgttgtttccaacaattgacagggtgaaaaaaggggcttgtggaattcaattgtgcaggaatttgctttctctacctgagaaaacatggcaaagactgagatctaccggtttatttcatgatgcaatcccgcaaccaaatgccaggatagggcatcctatgcatgttaaggttgctcaaagacgcttcaagtcttgttttggtgagcattcattcggctggacttattgtgggtctcataacttcagtccggctgcatggggacagcctctgtctcctccctccaaagcaaatcctagcaaagccaaatcagcaccttctagtccaatgctacacatttgcaactatgagcttggcatcatacttattgctctgccaccaggcatgtcaaagcatgcatgtgaaagtaggcacaggatcgaggaca

SEQ ID NO: 15104 - DNA, 508 bp, Zea mays
  Clone ID: MRT4577_11377C.1
atcatgcttctgaagggtgcgtgaggtgaggcgaggctgagcgacgcagtcttgcaggctaagctggtcttggtcttgtctgctgcctgttgcattttgcagctttcatggccaccaaattggagtagagtatatgtgtatatatgctgggatctctcatctcccctgttttcagctctggacttagactattgctgtacaagtactagattttttctttggtttttattatataaaaaaattcaccaaacacttcacactttggggttagctgttaggtacaccggaccggagctgccaaatctgccactaaggccagaccgaccgtgtcttgaggccacgagtcagtgaaaaacctacctcgttgacatgttgttcgcaggcaccatgcatcctggttactcagatatgctagtttacgcgcctgatgcatggaggcctccaagacagccatgaccatgaatgatgggagcaaaaaggcttgctgcctccattgtttcccctcccc

SEQ ID NO: 15105 - DNA, 499 bp, Zea mays
  Clone ID: MRT4577_113780C.1
ctgtgactccagcaaggccggcgtcggaaagaccaccacaaccgccagcctcgccgcctccctcgcgcgccacggcctcccagccgtcatcgtcgacgctggcctcctcaacctcgatctcttgttcggcttcaagaaccgtgtccacctcaccgccgccaccgtcctcgcgggagacttcccactcgactaggcgctcgtctgccaccatgcgctccacgacctccacctcctctgcctccaagcctcgctccatgctgcccctctcgttcggatccaagaccctcacctgggtcacagacgcggttacctctgttggagcgaaggtcgcccaccccctcgctcggctcattaataatgggaacatgacaagttataacggagggagagcgaagtctacttcaactaagcgaaggctttgggatggagggatcgaccaggacaggcaagggccttgccaactcccgtaggcctagcgccctaagacgcaggctgcagt

SEQ ID NO: 15106 - DNA, 252 bp, Zea mays
  unsure (1)..(252): unsure at all n locations
  Clone ID: MRT4577_113781C.1
aataaaaaatattantccnctctnctttttatcttaaccaaaaagctaaaaaaagagggcgttcgcgttcaaggtactaaaaatttttttctcgtgctttcgcaagcataccatctttctataaggttcccctataataaaattcttggccggttgtttaaattgccctgtctgggaaaaccctgcctggtcccaatttaatttccctgggctacatgccccttttcccagaaggggtaataacgaaaaggg

SEQ ID NO: 15107 - DNA, 996 bp, Zea mays
  Clone ID: MRT4577_113782C.1
ttgggaccctcgaggccggccgggtccaactggccccgcctgcgcacgccgcctccacagctggccccgcctgcccctccctctccccaccccctcgtgcttctttgatgacgtgctgcattttgctcggccgacgcaagggcacgtcgctcggatgtagttgagtgactgtgactccagcaaggccggcgtcggaaagaccaccacaaccgccagcctcgccgcctccctcgcgcgccacggcctcccagccgtcatcgtcgacgctggcctcctcaacctcgatctcttgttcggcttcaagaaccctgtccacctcaccgccgccaccgtcctcgcgggagacttcccactcgactaggcgctcgtctgccaccatgcgctccacgacctccacctcctctgcctccaagcctcgctccatgctgcccctctcgttcggatccaagaccctcacctgggtcacagacgcggttcaggttgctgcaatacatgcgactcagaagtattttgtgagtgcttctggggataacttgtggtgcttcgaattctatgatatttcaacacgatcttgcctaacacagattacctctgttagagcgaaggtcgcccaccccctcgctcggctcattaataatgggaacatgacaagttataacggagggagagcgaagtctacttcaactaagcgaaggccttgggatggagggatcgaccaggacaggcaagggccttgccaactcccgaaggcctagcgccctaagacgcaggctatagtcactactcgcgcatgttattaaagcgggcccgtgcggctgacatcctggatcgcctgaccccacgggtaagcctcagtctaggtaggatttgtggtgtgtcagtccgggttgtatttaactacactataatgacctgtaataacccttgaagggaaatattctacggataacgtaggtaaacagggactgtatttacgaggatgagacttgttggtcg

SEQ ID NO: 15108 - DNA, 399 bp, Zea mays
  Clone ID: MRT4577_113783C.1
ctcactctccggtggtcgctcactctcgcagctccacccttcactcagtcttagacggttattagctctaggctctagctagccgcgccactccttcgcgtagccatcagccttctcatcgtcaccaatggccactgccgaggtccagaccccgaccgtcgtggcggccgaggaagcgcccgtggaggagaccacgccgacatccggcgatcccgaggagtctgcccccggcgaggtcgatgccgaggcccaggctgctgctactgctgatccagaggagcttaccgcggccgagcagcaagcagccgtcgatgcggaggccgcggatactgctggtgccgaggagctcgtcgcggcctaaccggacgacgcggcagaggctgatgatcctgctggtcc

SEQ ID NO: 15109 - DNA, 502 bp, Zea mays
  Clone ID: MRT4577_113784C.1
accacaaaaaccaaaagcgggatacatccgggatatctaacgggtttttttcaaacggggaaaaacaaaacaacaaagtttttacgggtaaccccaaattaaaaaattaccaaagcgggggacccacggggggtgcattctcctgccgggcagttagagcagtcccaaaacccaacattttgacaggacttaagttctaaaatggctggtggggctgctggtgagctggagggccataaggggggtggtggtgccctccacctgcatgcggggggtgccaaaaaaaactaacctggacctgggctgggtgagctaacatcggctggaaagggggatattggggggggtagggcatgcccgggggaggcatgtacccaccgtatggggggggggggggatagtatgtggggatcccgcccatgggagtatggggggggggcaagatacccccccccttgggctggggtgcttgaagcctgaacttgcccggtttggtggggcc

SEQ ID NO: 15110 - DNA, 112 bp, Zea mays
  Clone ID: MRT4577_113785C.1
tcctgcccctggctcatgccttattttaagtctccaggttacagtcgagtacctcaataaggggtattgttataatttttcattcgccttcacaccctcctcatcttcaccc

SEQ ID NO: 15111 - DNA, 267 bp, Zea mays
  Clone ID: MRT4577_113786C.1
agatggggatggcgcccgtgaaaggtcaccggtgcatgctgctttgcttcagggaaacaccggactttacaggtagagtgtactactagcagtccacttcacatatctgcgagctagaccttaaagattgaaagcttgcatttgccatcgaagcttgaggaccaacaacaaacaacgactcacgcacgcacgcgggatataaacaagagccgatgactgtgcgctcaagcgacgcacaccggcgggtctcacgggccacgcctaacg

SEQ ID NO: 15112 - DNA, 389 bp, Zea mays
  unsure (1)..(389): unsure at all n locations
  Clone ID: MRT4577_113787C.1
ngattgnttttttttnnnaaaannnttttttttttgtttttttttgggggtttttcgggttttaccctcnncccccgtnggggggaaaaagggggaccaaccctggactaccaaatttttgggcaagacaaaacccaaagcgggcccaaaaaagggggggcaagagataaaatgtcccttttacccaggggtttacttaaaagcccttaaaaagggcgggcatgtggaaaaaaaaaaacaaccccttttttttttccgcaacctcccaaaatgtctttccagggaccagctcaagaacgttatctaaattgtcctgagaaaaaccaagggtggccccagcctttgaacctaaaaaaccaggggcccgtttttgaaattgctccccaagc

SEQ ID NO: 15113 - DNA, 716 bp, Zea mays
  Clone ID: MRT4577_113788C.1
ttgatctactctccgatgacagctgcgatcgacctggtcactgctaccaccgaggcgatgcgggtccaggtcacctaccactagacttctcaggttgaggaggtcttcacttttttcgacgacgtcctttatgatcgcatatccaccctcgatctgcctactgtgatgcgcacctggtcccttgatcctacacaggctgacctccaccacatgatcaacgaggccgatgctgatgtaaacggcatcatcgatttcccagagtttctcaaccttatggcatctcagataaacgacaccgcactctggaagaagagctcagggaggccttccgagagtgtgacaaggaccagaacggcttcatctcggccgccgagatccgccatgtcatgacaaatgttggagataatctaactgatgaggaggtggacaaaatgatccgagaggctgatgtcgatgctgatggacagatcaactatgaggagtgtgtcaaggtacatgatggccaagtgagtcacagaatgataatctgaaggcagagaagattctgcattgcatattatgcaagatagaacgtgttattccatcgactgctagagaaacattcagataattgtagttgctgaaaatggcaatgcagtgcctgctatgatcttcccaccagagtgttgtcatagactgatgattcaggtgaactagcaatgattggcctctctgcg

SEQ ID NO: 15114 - DNA, 347 bp, Zea mays
  Clone ID: MRT4577_113789C.1
gagcactgatgcagagctagcgaactgcgtgcccaaactctcacggccttctccagaatagctcgccatgtaacgctgctgcggcccctgatactgctggcctcgccggcagtcactcgcctagcgtccgccgcctgcgcagacgagaagttcccggcggctcgtgcgtactcgtcatgcgaggacctgccgaagctgctcgcgtcgctgcactggacgtacgacgcgtacaacagctgcctgtccatggcgtgcgcggcggcacccgatattacagctgatcactggcgtatggcctgaacccaactggcgatgtcatacactgtgcgcatgcacttacggcgctt

SEQ ID NO: 15115 - DNA, 446 bp, Zea mays
  Clone ID: MRT4577_11378C.1
gccggccggtcctcagaaccacacgcacaccaagagatagtgattgctggtcgagaagaagagatgttacatatataataactactgtaggcagcggcatctcctgctgggacgaaggttcaagaagctagctaagagagaagggcataacgagataataagcagcgcgcgaagatgcaagactgggcgccggtgttcgtctcgctggtgctcttcatcctgctgtcgccgggcctgctgttccagatgccgggcaagtgccggatcatcgagttcggcaacttccagaccagcgccatctccatcctcgccgcgcgcgccatcgttctcttcttttatgttctctctctatatatatagtctgtatgaatgaatgatatcatataataatgtacgtaccgtcgtccatgcatttgccccggaaaaaaaaaaaaaaaaggccccta

SEQ ID NO: 15116 - DNA, 465 bp, Zea mays
  unsure (1)..(465): unsure at all n locations
  Clone ID: MRT4577_113790C.1
cttatcacaacacacctgagcacagcggttatggggataatatggcagcttcattctgacgatgctgggtcattctatgtcatctacgctgccatctaaggccttatgaccatctcactactgtataacattgcacagggtggcttgcttccattcccaataactgcattcttccttataaacacactctcttggacctaccgtcgacgcacgacgccagactacgaggtgagcaacctgatcgatagcgcacgacttcatcaagacagtgaacactagcaacagagtacctgcaatatgcatcttctgcacggacttgatgaactgcatcccgccgattgtgcgccactacgtcgagcacatgggctgcctncgcgagctgatggtgttcgtcactgtgaggcatctgcctgcgacgtctgtgctgcctgaggagcgcttcctcttcgacaggctggaaccttt

SEQ ID NO: 15117 - DNA, 127 bp, Zea mays
  unsure (1)..(127): unsure at all n locations
  Clone ID: MRT4577_113791C.1
ttcggctcgagagcgcgnttgcgagataaaccgacaaagataagctacagagtcactgaccgaccgctatggcatcgatgcagaacacgcgttatgcacgctccgagtcttacgcgcggagcgcttt

SEQ ID NO: 15118 - DNA, 1498 bp, Zea mays
  Clone ID: MRT4577_113792C.1
cgcgccggccccatgttccccggccggggtacttggggccgacgccggcgcacccgaaaaataaaaaggaaagctttgtaagctgtgatggtatggtagtgtcactcagagtcagagatgaacgtgacaggtgattgagggcgcgctgagggacagcgccgaccaccacgggaaggaggccctgacgagggtggcggtgacgcggtcggaccacgacatggacgcccagaaacagaacgaagtcctcgatcgctcatcgtctcctctgctccggtttcgttggagatccaggcaatggccgacgaggtgcagcaactcaccagggccttctcaggccttggcgggctcggcgtggacgagccggcgatggtgtcggcgctggcacggtggcgcgggcagcccgagaagcggtccgcgttccgcaagggattcccgggcttcttcagcagccacggcggcgacatggaccggcgcgaggaggagtacatgctgcacctggccgccgagttcgcgcggttcagggacctggtggtgctgtgggcgacgcacccgtgggagcgcgacgcgcggctggcgcaccacgtcctgcaccaccaccaccaccacccgcccgccgtcgtcgtggaggtcgcctgcgcgcggtccgccgacgagctgctgggcgcgcgccgggcgtaccaggcgctcttccaccgctccctcgaggaggacgtcgcgcaccgcgcccgggacaagccctactgcagcctgctggtcgggctggtgagcgcgtacaggtacgagggcccgcgggtggacaaggaggtggcgaaggcggaggccgaggcgctgggtgccgccgtgaagcgcgccgggaacgggaagctggtggagaacgacgaggtgctccgcatcctgaccaccaggagcaagccccacctcgtgcagacgttcatgtactacaaggagatgcacggcaggcacgtcgaggaggacctgggccaacgcggggaggagaccctgctggagaccgtgctctgcctcgtcgcgccggcccagtacttcagccaggtgattgagggcgcgctgagggacggcgccgaccaccacgggaaggaggccctgacgagggtggcggtgacgcggtcggaccacgacatggacgacatcagagccgcctaccaccagcagttcggggccaagctggaggacgtcatcgcggccaaggcgcacggacactacagggacgcgctgctctccttggtgggcgccggcaattcatcagtctgaagcgctgctgcctgctcaggagtcgtcaggcccaataagatgtgcaagagtttctttattacgcactttcgcgaggaaaaaaagtcgcattttccactcgatgaggaaaggttgttgcttgttcttttgcttctcctatgcgtttcgtctatcattgactacaggattcccaataaacatttttaatttctactttggtctcaaacgtttttatgaatctaaaaaaaaa

SEQ ID NO: 15119 - DNA, 508 bp, Zea mays
  Clone ID: MRT4577_113793C.1
gcattgtgagttgtccttacattttttttttttttttgttcagaacaggattcatttttctctaatttattgtatttgttacaccttgctttattggaacaaaagtggccccctttttttgtttccaagcccgccaataaccgtggggtttcaaccttctgaggacctgagatcaatggggataatttctacagaactacagggggggtgatctacccatttgttccgtggggtgggtacgcataccagttctggttgaatttcaaagccgccttacatgcgcttggagctaacgaacacctgctatggcccttcttaggttgggccccagagcatagagataatgaactccctgaccccctcttccgaggggaccttgttcctgggtggggggcccagtttcccggcctgctcaaaggtagtaacttgagccttgccgagacaggggacctaacgcactccttttttacctcgagacaggcccccttgggtcttgtaccccctccaa

SEQ ID NO: 15120 - DNA, 392 bp, Zea mays
  Clone ID: MRT4577_113794C.1
cttgccgggacacgcttcccgttcccggcgcgcttcacggcggcacccagcgcctcggcctccggcttcgccacctccttgtcccccgtgggccctcgtacctgtacgcgctcaccagcccgaccagcagctgcgcacacgcaggaaaaaaaaatcgcggtcaggtcaggagcagaggagctttgctgccagagagagcgcgagcgtcggcagctccgtccatccagctgtgcgcggcgctcacgctgcagtagggcttgtcccgggcgcggtgcgcgacgtcctcctcgagggagcggtggaagagcgcctggtacgcccggcgcgcgcccagcagctcgtcggcggaccgcgcgcaggcgacctccacgacgacggcgggcgggtggtgg

SEQ ID NO: 15121 - DNA, 851 bp, Zea mays
  unsure (1)..(851): unsure at all n locations
  Clone ID: MRT4577_113795C.1
gccggccgggcctgcaaaagcacacgaaagcgacgaccaagtgagaatccgtcaattccccaatccccccctcttctcaccggcgcaaacccgcgggatccgtcgcgatcgcgacgcagcctccaattcgcgccgatgcctgcccccgcgccgtggcccgtgtcgcaggacgtcgcggcgctcgccgatcgcgccagctccttctcccgtgctgtcgtcgggccccgcaacgacctgggtgctctcgcggcggcgctccttcggatccagcccgtagcccgcgagctcgagcgctggaggtggctcacgcccggcgaccctgaggtgcccgacctgcacgcctggctcnncgagctcaccgacgcggtggccgacgccgagagcatcctagatgagctccaccgtcggcgccagatcggccctccgctctcggcctgcgtatacgccacgttccgtggccccggacggaagctgaggcggctgacggagaggctcaaccgcgcccgcgacgattcggagcgtctgcgacctggcagcgctgcggccatctacggtgtgcggtcgccgaacagggtaaccggctccgttttcgcggagcggaaggtactcgggcgtggggaggagtgcaactccataatctccaggctcgtcgacgattgcgaggaaacatgccgtccggtatctccggttattgcagtgattggccatggaggcatcggcaaaaccacggtcgctcagtgcgtgtacaacgatgcgagggttgaagcgcggntcgatctgagagcctgggtctgcgtctgggacagatcagatgaggccgagctcaccagggagattttacagtccattgg

SEQ ID NO: 15122 - DNA, 319 bp, Zea mays
  Clone ID: MRT4577_113796C.1
gcccagcttccgacatggtgatgaggatagggagggtcatggggatcacaggcatggatatgaggattgcgaactatgcgtcaatacctgtgatatcatgtataggcactacaagtgctgcattatagaaatctatcacatactgtaaccatcactgggatgatacacatcgatgagttgaacaaccctaatggtacagcagaggatggcatactgtaatggcgtccttgtcaaataagctagatcagggcacgactattactcatgatgcgtttggcctggccatgtcgaaccaatagttcaccgagcagcaaaagtg

SEQ ID NO: 15123 - DNA, 202 bp, Zea mays
  Clone ID: MRT4577_113797C.1
cgcaggtttatctgcaagctggtgaacatgggcgagcagctacttaccgaggaggccttaatgacctgaggcaaatttacactggacaacctgtcttacctgggcaattcagaccgtctcggagccgaccgtcagtgcgcacgcctcatggagtcgcgcacgaacctcagtaagtggtgggacactgtatcccgccacgact

SEQ ID NO: 15124 - DNA, 1221 bp, Zea mays
  Clone ID: MRT4577_113798C.1
ccggtaccggaccgcagttccgggctagacctacgcccacgcgttctacaaaggccaatgaaatgaaggatggaatcgtccttttaagtattgcgacgcaagtgttgatgtaatgggagccaacgcttgtccaccctgttatttccaatacatcacttaatactcccatgttgaccctggtacagctgtattcctacatcttaattaaccaaagaatctgaagttgtttagtatactaatcagcttaggtttcctgtacctgctcatttgtgacacccacagaggatggctactagccctctgtgcctccaaaatccagttacgtgctcatatatcatgtcttgtctgttgaggtatttacagggaaatagcagctgaaactatctacaaggaaagatgcatcactgtagacaatggggatagttggaccaagtacatgtccatttctggttcttcagaggacgagcatgacattatcaccctgcagtacacagaggaggggttactgacaatagatgagaaccgagatggccgtgcagctgcatttggcgatgatattgccattgaatgcctagctactgaattcaagagagaagtttacgtggtgcaagcccatggagcggatgcaatggttgacgaggataactgtgtgttcttcctcccacacagtcctcgaggagaagtttgcgagccaccgatttttcttttcatgaaaggaacagcatggtgtggtgctggtgctgaccattacgagcctttgatcgccactgtcctccagcatgttactccagacaaggcagctgtcatcctttgagaatgactgcagttttttctacctcccttagcttttagtcagcggtggagttgagacaattttgttattggagctagagtgctgaattgaggagcgacatcaatatgcccaagagattagagagacggccaacctgagtatcttgctctgttgcggggttttgcctgcttatgaagctgtgtatggtgattttgttgttgtatgtttatgagtaggctctgactagcgaggatattctgagtgtagaacgtcgaatctagattttttgagggtctgatgttgtttgccattgtcggccggcatttttgtattgcttattgtgaggattttcgtttcttgacgcctgtttctagggacatcatgattggacatttggaatgcaaacaattcctttgtggtgttgggtt

SEQ ID NO: 15125 - DNA, 807 bp, Zea mays
  unsure (1)..(807): unsure at all n locations
  Clone ID: MRT4577_113799C.1
ttccggaggccgctacgcccttggccccttctctctcttcgtcgcgccgccgtagcacaactccgactcggccatggcgacacccccagctctcctattcccttcgccctcttcggcatcttctccgccgtcatccgcgcaggtagaggcggtggtcctcttcaacgtctgcgacagctacgtgcggcgaccggaccaggcagaccgtgtcatcggcaccctccttggatccctcctccccgatggcaccgtccacgtccgcaactcctacgtggtcccccacagcgagtcggccgaccaggtcgccatcgacatcgactaccaccataacatgtacgcctcgcaccagaaggtgaaccccaaggaagtcatcgtcggatggttctcgactggatttggtgtttctgggggaagtacgcttatccatgagttctattcaagggaagtacaaagccccatccatcttacagtcgacaccggcttcactaggggggaagcttccatcaaagcctacgtctcatccaacctgtccctcggtgataggcaactcgctgcgcaatttcaggaaatccctctggatcttaggatgatcggggcagaaaaggctggatgtatgtgtcactttcctgtatgctaattcattcatcgtgtattatatattgatgattgttttggattaccggactgaattttgaagagcagaaacactttaagaaatatgtaaatggcatagaaagatgaacttgccgcattgaatgagaacccatcaatcctgctagctgtangcttgcagtatttgcagtgttt

SEQ ID NO: 15126 - DNA, 729 bp, Zea mays
  unsure (1)..(729): unsure at all n locations
  Clone ID: MRT4577_11379C.1
cggccgctcgagcncggcgggccgggatggttctatatgattgccgaggatcgccggttcaccaccactcactcttgcaaaccgcacttgagttcgccagttttccattcattctctgctaatcagcccaacctctagcgagttgcaaatcttgtgactgtgagccggcatggcggagaagacggtggtcctctacccctcactaggcgtcggccacttgaaccccatggtccagctggccaaggccttcctccgccgtggcgtggccgtcaccatcgccgtcgtcgacccgccggggaaggaccccgtgctggaagccgcggtcacccgcctcgccagcgcttccccctccatagcagtccacctcctgcccatccagcctgcgagcaccaatgagcagtactccaacacagccttgcgtatgctcgacgagctccgcctcgcgagccctgtgctccgagagttcctccgctcgctccctgccgtcgatgccatcgtcctcgacatgttttgcgtcgacgccctcgacgtcgccgcggagctcgccgtccccgcgtacatgttctacgcgtccgcagccgccgacctcgcgatctacctccaggttcctgatatcttccgcgcggcgcctttctcgttcaaggacatgggagacacggcgctccccttctccggcgtgccgccggntcgcgctctggagatgccggacaacatggcagaacgggagag

SEQ ID NO: 15127 - DNA, 268 bp, Zea mays
  Clone ID: MRT4577_1137C.1
ccttttgggtggtggtcttctctttttttttttatgttctcaaccgcgggaataataatatactcggaaggaaaatcatccgtggggggatcattaacaaaacttccggtgcagattgagatcccaccacattaaagcccattagaccagggtatttgtcccaaaaaaaaaaaaagtgtttcgaacctgaacaaagattacccgaggctaatctagcgaaaactacttgatgagcggaaaggccacaggaaccaaaacgggttccttt

SEQ ID NO: 15128 - DNA, 263 bp, Zea mays
  unsure (1)..(263): unsure at all n locations
  Clone ID: MRT4577_113800C.1
acgatcgccatcgccgacccaagcaaaggggcggaacaacaaggaggggggcgggcaccaaaacccactcnaggaggaagacccgaacccccaagcccaacacacacacccaaagcctggcagcaaacacaacacagacgcgcaacccacctaactgccaaacccccaaaaccacccacccacacccaaaacacgccgtgaagcagcacacaccgaaccagcagacgacaaacacacagctgaaaaaccccaaccacagcgaa

SEQ ID NO: 15129 - DNA, 317 bp, Zea mays
  Clone ID: MRT4577_113801C.1
acgccatgcacgctctaagctcgaatggctcgaggactgccgcgcgcgacctcaagagaggagggggggtccccaaaagagagcggctctgcccgtgccgagctatctatcgccacccacctcaagagagagagaggggtcccaaaaagaacggtttcccgcccgacctatcgtatcgcgcgcttaacctgaagacagagagggatccccaaaagaacgttgtccgcccgcccgagcatttgcgacacatggaagactggggcgcaagtcggacgtggaagagcatcaaacagagcgagagacaaagagagcatgcg

SEQ ID NO: 15130 - DNA, 343 bp, Zea mays
  Clone ID: MRT4577_113802C.1
ggccgggatactacgcttttcctctgcactgcaacagctctgatgcttaatacattccgctggcagtcgatgctgagcatatccacattggcggccgaagatggagattaactcgaaaacctgcgttcggaatgccatcagatgtcgaggttgagtccgctgacactgtcgacttacatgaggtgatgatgacaagatagcctggttttctttcttcttccacactggatcatcttccaagacaagcgcctcctaccggctgccgcactacgcgactacggcgtacaggatgaatacaccgtgcacctggggctcccgctactacgtcgagcccacaagctac

SEQ ID NO: 15131 - DNA, 339 bp, Zea mays
  Clone ID: MRT4577_113803C.1
cacccttggatgccacctattatgtcatctatattcacacctatatccaattcactacaccgcctttaataacaaaaccactttcgatacccaacttaatacccttctaacacatcttcctttacacacctctcttaatatctaacatgccagcacctatcccccttcccaacattttcacaaacttaatctcaaattgaactccccctgtaactccccattaatctccgcatttatattttttactctcatctttaccattacacttaccaacaccctaactccccctcctttccttttttttccttcctttttttccaactttctcccatttttccc

SEQ ID NO: 15132 - DNA, 296 bp, Zea mays
  Clone ID: MRT4577_113804C.1
atcgcgagcggccgtgcttgctcgcccgtgtcccgattcccacttacaacatgaaactgatcccatccatcttgatcgctaaacatgatcgagtcaatgaacttgtcgcaatccattgggtctgacttgctttaccaaatcagcatgcagagacttaggcactatacgttatacatcgtataacactatcaaaagtaactgtgtccgggccctaatggtggcgcgttcggctaagcagacatactcagtgctcgaggtgatgcaacttgaccaggtgctaaacccaagatatctga

SEQ ID NO: 15133 - DNA, 248 bp, Zea mays
  Clone ID: MRT4577_113805C.1
tcctcacgcgtccgctcgaggactgatcatagcgagcctctgtggtcatggctcataaatcggcgcaagggagctgatcaggaaccattctagtgattggttttctaaaggaataggaattcttactcttttcttagttgatgccttgatgatattgagcttccgtaatcaagattccataagatacaaactgtcaccatcttgaataactgtaacatcattaatttctgcttatttttgattgaaca

SEQ ID NO: 15134 - DNA, 792 bp, Zea mays
  Clone ID: MRT4577_113806C.1
ccggccggggctggtttccggccggggggaggccggaacttcggtcatcttcactaaccttcgcagccggaattgaccaacgtcacaatgggccgtcttcaggaatacgaggtcatcgggcgccacttgcccaccgaggctgaccctacacccgccctctaccgcatgaccatcttcgcccctaacgagacggtcgctaagtcccgatactggtacttcttgcgcggtctcaagaaggtcaagaaggccactggtgagatcgtcagcgtcaaggtgctccacgagaagcaccccctcaaggtcaagaacttcggtgtctggatccgatacgactctcgttccggtacacacaacatgtacaaggagtaccgtgagctgtcccgaacagatgccgtcgagtccctctactccgacatggccgcccgccaccgtgcccgcttcaggtccatccacgtcctccgcgtcgtcgagatcgagaagactgaggacatcaagcgaccttacatccgccagctcacccagaagaacctgagcttccccctcccccaccgtatcaccaaggagaacacccagaagttgttcagcgccaagcgaccttccactttcgcttaaatgatttcggtttagaggatggttaggctctgcgggtgttacacgggatcatggaaatatcaactgactttgctcaataaaatgggcaacgaatgaaccaaaaaaaaaaaaaaatacccgaggctggccggtgtgatgcacaattgattgggtttataaaaaactagcaatgactaccga

SEQ ID NO: 15135 - DNA, 303 bp, Zea mays
  Clone ID: MRT4577_113807C.1
aacagccgactcgcaggatggcgccgcagtaagacaggaagcccaagatggcaacctggacgtctaatttggaccttactcctccagtagaagatggaatttgtgattctggagattttggagcaatttctacgggagaaggtgatagtcaatggcaaaactgggaatctcgggtatgttgtgcacattgaacgcttcaagaatagtatcacagttgtttctgagaaacagttctctaaaaggtatttgaaataccttaccaagaaataccttaagaagaacaatcttcgtgattggcttcga

SEQ ID NO: 15136 - DNA, 336 bp, Zea mays
  Clone ID: MRT4577_113808C.1
gctatttgatgaagagaacaccggccgtaaggggagggactttcatcattaacgtggtgtggagaaacatcctgggacaggccttggtccagatccttgacatggggggcctacagacagaggaacagtggctgattgttgctgaggagcatatctaggacgtagtctcgatcacagtgtacatcattcagaaggagagcaccctgcacttgatgttgggtatcacggggggcatgcagagatttgagaagactctgactggcaagactatcacccttgaggtcgagtcttttgataccatcgacaatgttaaggtcatgatacaggacatggagg

SEQ ID NO: 15137 - DNA, 653 bp, Zea mays
  Clone ID: MRT4577_113809C.1
ccggccgggacaaaggaattagacctatcatcatcttctccgatccatacacaatcgaacaagagcgatcgaaagataagtaaaaataaccaaatcgctctcccttctctctggctttctttcctgctagcccctgactctcatctgtgccccgctgctaccacaggccgagaagaagagagccttactccaccgccaccgaggagaaaaacgtgcaggaccacttctgctcgacgatgagcgagggcaggaagcggatggacctgtggacgagcaaggagtcctgctacctctcgcagtgctacaacctgcggatgtaccgactggatccagagcagggtgaagtgcacccaccacaacggcatcaccgcgacggagatgaacgagtggcaagagcagtgcgacaaggactacgtggtcaacgtggctgaggtcaccaaggactgcaataccacctgcgacgagggaaatcattctctgctacagaagaactgtaagacggactggcaccgctcctccttcctgaacggatagcacgaccgacaggtcgtcgacgtctgtctgcttgcgtgcactgaatcactgatacatcatcgtgcatgcatgagatgcgatgactgtttgatgcatgcatgcatggggtatacctacca

SEQ ID NO: 15138 - DNA, 660 bp, Zea mays
  Clone ID: MRT4577_11380C.1
cattgggtacctcgaggccggccgggaggccacacgcacaccaagagatagagattgctggtcgagaagaagagatgttacatatataataactactgtaggcagcggcatctcctgctgggacgaaggttcaagaagctagctaagagagaagggcataacgagataataagcagcgcgcgaagatgcaagactgggcgccggtgttcgtctcgctggtgctcttcatcctgctgtcgccgggcctgctgttccagatgccgggcaagtgccggatcatcgagttcggcaacttccagaccagcgccatctccatcctcgtccacgccatcctcttcttcgccctcgccgccatcttcctcgtcgccgtcggggtgcacatgtacctcggctcctaggcggcgccggcgcgccgtaccttctctccctctctatctctctctcgctgcacgcgcgccatcgttctcttcttttatgttctctctctatatatatagtctgtatgaatgaatgatatcatataataatgtacgtaccgtcgtccatgcatttgcccttaaaaaaaaaaaaaaaaaagcggccaaaaaaaaaagcgaattcagttcttcagttttttttcctcctctaaaaaaaaaaaaaaaaaaagcggccctcgagctc

SEQ ID NO: 15139 - DNA, 780 bp, Zea mays
  Clone ID: MRT4577_113810C.1
aaaaaaaaaaaaaaaattgctgcgaaatagagatgacaggatgagagggggtccgggcgggttgagagcgagggacctggtgggagaagggggaaagatatgaagctacttgcttttgagtgaaatgttgtctggttcaaggtcttgctttgcgatttgaggatgatccatgcttgcatgtgttgttttttattcctcggatatgcaagatctcggaccaggcttcattcccctcaggaatagcttcaaaataataccgtcggagagttattaggaggagctgctagtactacataaacttgtgttcttggtctttggttctgaaatatttgcttggagtgttcgtgagtttcctggttgttcttgtagtacggtgtggagtactactgtgttttccactcctagctagctagatcttacttttccacatggtgcctttttgtttgcttgcttgcttgctgcggagatcgaggtcgaggagcaacaagattggtgtaatgatggcctgcttccacttctctctttcttatgtgtatctggcaggtgatgaaagttttcatcattacattttgattgggagaaacttcgctctctctctctctcctctctagcttctcttgcccgttatctgtctctgcttcttcgtattcattgttcttcctctccgtctctccgctatgcttgcacagattgttgttactgtgctcacatggttttgtagagcatggtatattcacacaaggctggtgtaaacttcatatatatattttgttttaagat

SEQ ID NO: 15140 - DNA, 647 bp, Zea mays
  Clone ID: MRT4577_113811C.1
aaaaaaaaacaaaaaaaaaaaaaaaaaaaaaggaattttaaaaaaaaaaaaaaaaaaaaaaaaaaaaaaaaaaaaaaaaaaaaaaaaaaaaaaaaaaaaaaaaaaaaaaggggcctccttcttaattaaggaacacacacccccgcaaacggaaaacctccccaaaccgttttttttccctccttggttttttgtaaaatctttgggttcgccatggacgctccaagaaattgcacccttcctgggcgccccaagggaccaaaaaagctgagctttgttgttacagttgtttgcccctggcccaaactggcaggaggtaggtagttaataaaaaagcagttagggctaacctggggggcgaaggggaagttaaagttagtttgggcacccccaggggcgggctaactagttagcttgtaagctggggacaacctgggaaccagcagcagcagcacagtaccagtagtcggggaaaaaaggaatttttttggggacatgtcgggggaaaaagccccggtcctggtaaggcacgggggcggcggcttgaaggccctccggcagttcccgccggggttccggttccgccccacggacgaggagctcgtggtgcataacctccggggcagggccatgggggggccgttccc

SEQ ID NO: 15141 - DNA, 416 bp, Zea mays
  Clone ID: MRT4577_113812C.1
tcgcttacattgcaggcctcgcgtatgcagtggcagggcaagacaaaggagaggatggcgtcgccgataccgagcgagtggatcgggctgcagcaatttccggcgggtactcagaccaagctgcactaactgctcggaaaactcaaggaggaggatgtgagcacatgaacaattctggcgatggggaaaggtggagtgggaaagtcatccactggtaactacgatcgttgggagagggctgcctatgtcagcggtttccaggggatactttgaacattatcgacactcctgggcttattgtaggtggatacattaatgaggaggccgatgacatcattgagagacttcttttaagcatgactatcgatgttctcctggacctggatcgaatggatgcgtatataatggatacactg

SEQ ID NO: 15142 - DNA, 607 bp, Zea mays
  Clone ID: MRT4577_113813C.1
atatccatatccatctaggaaactcaaatactaatattccccaaatgtatctaggatacagaactgtctaatgcaggccaccacccttcaataagtaccgaacacagacacacacattcttcgatcatcatcacttcatcagccatcagatacttagctagcactcctgttcatacgaccatggcgtcgtccagcaagcagaacgccgcggtggccgccatctccgtcgccctgctcctcacttcgcatctcgcagtcgcagtcgcagtcgcagctggagcagaagcgggaggagtagcgccgttgaacacatgcgaaacgccgatcgcctgggctccctgcttcggcaagacctgggtctgcgttcccctctgccttggactgcactacaccggcggtttctgccagcaggagcagatgagcgagggagacgccggcgccgagcctgctataatcggaggcgccatctgcgtgtgcaccaagcagtgtcttttggatgtggaggcggtgcaaggtgcaccggcaccgtcgcaaccgcccgtcgccgaacctccgcgggggatgcgtggggttgggatgctcaactgatgatggtctatattgcttg

SEQ ID NO: 15143 - DNA, 773 bp, Zea mays
  Clone ID: MRT4577_113814C.1
caaatattagtatttccaaactaatcagttgattattttgaataaaatggcgtctgatatttggatatccatatcgatctcgaaaattcaaatactagtattcccaaatctatctaggatacagaactgtctaatgcaggccaccacccttcaataagtacagaacacacacaccttcttcgagcatcaccatcagccatcagatacgcagcactcctgttcatatgaccatggcgtcgtccagcaagcagaacgctgtggtggccgccgtctccatcgccctgctcctcacttcgcatcgtaagtggccagcaaactaactcccgtttccaattttctgcagtatttgttcgaaacactacctaatggttgaaaataataataataaatctgaaacgggattacggtggttgcagtcgcagtcgcagctggagcagaagaagcagaagcggaaggaatagcgccgttgaacacatgcgaaacgccgatcgcctgggctccctgcttcggcaagacctgggtctgcgttcccctctgcattggactgcgctacaccggcggtttctgccagcagcagcaggtgatcgagggagacgccgagcctgctataatcggaggcgccatctgcgtgtgcaccaagcagtgcctgcttgtggatgtggaggcggagcaaggtgcaccggcaccgtcgcagccgcccgtcgccgagcctccgcgggggatgcgtggggttgggatgctcaactgattttagatcccggcccggccggcct

SEQ ID NO: 15144 - DNA, 334 bp, Zea mays
  unsure (1)..(334): unsure at all n locations
  Clone ID: MRT4577_113815C.1
cgtcctccccttgccccctgccgcctccggcggcgatcccgcggtgaacctacgccactgccactatcgcgttgcgtagcaccaaaccgtacgggcaggccctcatagattaatctgcgccgaggcggcggacgaggcgcctgagnancctgntatgtccagggtggggggggggggntngcatangnngaagcaaattggctggggtactctggtcacctgcgtgggtgcagcacgcttggatggtccggctggcgaaacaacgnacaaagggataatggtcttcgctcacctggttgtgggcatcctgtggcaatactcgtggccccttgcc

SEQ ID NO: 15145 - DNA, 446 bp, Zea mays
  unsure (1)..(446): unsure at all n locations
  Clone ID: MRT4577_113816C.1
aggggggatcggctcccatcaatataaaaaatcggcctcaagtttcccacgtacccatgcatgcatgatgcattatcaactgaccctccacaatccacatcgggcaaagcaggggtcggaagcatcacgacaaccgccttaatttaactgaggaaccgatcggggttttaacaaagggcgccgtcggacaaaacgctgttccctggtgccggcctgccgatttgcaagcaaggtatggggggcacggggnggggggtacagttccccgaacgcctgccaacaaaaggggtcgaacaacaggcgggggtgctggggcagcggcaggggctggagctgtatcccggggagggggatccccgagcagggggagctgtcgctgcaccccaggggcccggccctgacggtgaaggggcccttgacgtcctcgtactggacgcccgaaacgg

SEQ ID NO: 15146 - DNA, 1310 bp, Zea mays
  Clone ID: MRT4577_113818C.1
acttgttcttggcttcggtcttacagacgacggtcaccggcaggcggcagccttggcgggttggtcttgtgacattgtttccttgttgttgctgctgccatcaatggaggtggtgaacaggtacgtcgccacccggcaccacatcgagggcgccccgacggaggccgattttgaggtgaaggaggagacggcgaggtgggcgccggactccggcgaggtgctcgtcaggaacctgtacctgtccatcgacccgtaccagctcaaccgcatgaagcggagcagcgcgtcgcacctcgccgtcgacggcaccctgcccggccagaggatcgcggcgtacgcggccggcgaggtggtggcgtcggcgtgcgaggagtacaaggtgggcgacgtggtggccggcgtgctcgggtgggaggactacacgctgttcaagccgtccccggccgtgctcatgtccaaggtcgccgacgccgacgccgcgggcttccccctgtcccaccacatcagcgtgctgggcaccagcggcatgaccgcttacggtggcctcttcgaggtgggcaagccggtgaagggggagaaggtgttcgtgtcggcggcgtcgggctccgtcggcagtctcgtcggccagttcgccaagctcgccggctgctacgtcgtcgggtgcgccgggactacagccaaggttgatctgctcaaagacaagctgggattcgacgatgctttcaactacaaagaggaacctgacctgaaatcggcgctgaagaggtacttccccgatggcatcgacatctacttcgagaacgtaggcggcgagatgctggaggcggcgctggccaacatgaatacctatggccgggtggcgctcagcggcgtcatctcggagtacacgggtggtgggcggcgcgcggtgccggacctgctggaggtgatctacaagcgcatcaccatccggggcttcttcgcctgggatttcctgcccaggttcgcggagttcaacgccgtcatcggcggctgggtccgggacggcaaggtccaggtgctcgaggacgtctccgacgggctggagagcgtcccgtcggcgttcgccgcgctgttccgcggccagaacgttggcaagaagctcgttaagctggcgtagaaagagaaccgtcgtccgtggaggtagcatccaggacccggaggccggagcatgtacgtctgtcatgcatgccggtcattcagcacccgtagaacctcattgcagaggtgcttcgaggctttattggggtagtgggggtgaaatgcagtgaacttgttaatttaaccgaaac

SEQ ID NO: 15147 - DNA, 1498 bp, Zea mays
  Clone ID: MRT4577_113819C.1
tgtggtaccctccttggcttcggcgggtagctcgtaggatacaacggcaacgggtgacgtccgtgtattttaggacgcatccgctagtgtcgtccctcccagcatccgcatccgcgtgacacaattgttcacttgttcttggtttcggtcttacagaccgtcaccggcagcggcaggcagcagccttggcgggttggtcttgtgtcattgtttcctggctgccatcaatggaggtggtgaacaggtacgtcgccacccggcaccacatcgagggcgccccgacggaggccgattttgaggtgaaggaggagatggcgaggtgggcgccggactccggcgaggtgctcgtcaggaacctgtacctgtccatcgacccgtaccagctcaaccgcatgaagcggagtagcgtgacgcacctcgccgtcgaaggcatcctgcccggccaggctgcttctactctattatctccgtctccgtccgtgaagaggatcactacgtacgcggccggcgaggtagtggcgtcggcgtgcgaggagtacaaggcgggcgacaaggtggccggcgtgctcgggtgggaagactacacgctgttcaagccgtccccggccgtggtcatgtccaaggtcgccgacgacgccgcgggcttccccctgtcccaccacatcaacgtgctgggcaccagcggcatgaccgcatacggtggcttcttcgaggtgtgcaagccggtgaagggggagaaggtgttcgtgtcggcggcgtcgggctccgtcggcagcctcgtcggtcagttcgccaagctcgccggctgctacgtcgtcgggtgtgccgggaccgcagccaaggttgatctgctcaaaggcaagctgggattcgacgatgctttcaactacaaagaggaacctgacctgaaatcggcgctgaagaggcacttccccgacggcatcgacatctacttcgagaacgtgggcggggagatgctggaggcggcgctggccaacatgaacccctacggccgggtggcgctcagcggcgtcatctccgagtacacgggcggcgcccggcgcgcggtgccggacctgctggaggtgatctacaagcgtatcaccatccggggcttcttcgcctacgacttcttgtccaagttcgcggagttcaacgccgtcatcggcggctgggtccgggacggcaaggtccaggtgctcgaggacgtctccgacgggctggagagcgtcccgtcggcgttcgccgcgctgttccgcggccagaacgttggcaagaagctcgttaagctggcgtagaaagaaccgtcgtccgtggaggtagctagcatccaggagcatgtacgttcgtctgtcatgcatgctggccgtgcccgtcattcagcaccttaggctatctggagcagcctctttataccactttctaatttactctatctatctcatcatctatttcaaactctaatttatctccattacaaaatagtattttgcccatc

SEQ ID NO: 15148 - DNA, 611 bp, Zea mays
  Clone ID: MRT4577_11381C.1
ctccgttcctctcctccccacgaccttctgccgccccaccaccaccaccaccaccttcctcccgccccacccccgacctccactgccttctgccgccggggccgccaagcgccgtgccgccgtccgacccagccacctccaacacctggcgcaaccagcgccgccgctcaaccaccagcatccgcgcgtgccgccgtccacaccaacctgcgcgccgccgccgctctgttcatcaccacccaaggcgacctggctacctccaaccgtcgccgccctgccgaatccggtgagatccggccgctcgggtgacccggctacctccaaccgccgctgccctgccggatccggcgagatctggccgccccgccatggctcgccccctaccccgacgacctcctactacgtaagtgcgccatggctcggccacgacctccctgctacgccgctgtggtcggccccgacccccatggatcggctgcccccgcacctttctcctactgataggcagcggacaccccctccctcccctcgccaggctccctgctgatggatgcagtgcgaggtgctgggcaatcctcaatctaacgaaccgcacgctgtgctggagcgca

SEQ ID NO: 15149 - DNA, 225 bp, Zea mays
  Clone ID: MRT4577_113820C.1
gtgtgtgtttttttgttttttaaaaatttgctttttattaagctttaaaattggtgacacgtagatgctcacacttcctagggcgtttgtcctgtgttgtctgtcgggtgttggtttagctgctttttttctttcgcgccttatcttttctctgtggggggggcagctccatgtttggtgaattggggtgaactgggctcttgccgttttgctggggcgtgatgc

SEQ ID NO: 15150 - DNA, 472 bp, Zea mays
  Clone ID: MRT4577_113821C.1
ggaaaaaggggaacaagggcatggggtggggttcaaaaacaaaacatcaaggccaagacccaggtgggaactagataatccataggggcccaaaaaaagggggggggggaaaaggggaaggggccaaccccccgggtctccgggaaattttaagcctaatgggaaaatttaaaacagccgggccccctttcccatagggcttttaagggacaagcatttaacattttgccaattttttttaaagagcgacccggggaaggggcccctcttttgcccattttggaagatctggtttttatccatgccggaggtgccaacaggaacccccatgcaaaggacctttttaagggggaacttaactggggcctttggctcgttaaccctggacccaagggattccggggggggcaccaagggggggaattttcctgccttggtaagacccggccccaaaagacgggggatttgctta

SEQ ID NO: 15151 - DNA, 355 bp, Zea mays
  Clone ID: MRT4577_113822C.1
gggttttaacggccattctatttcaaaagttttgcattttgctctaaaaaaaaaaaaaaaaaaaaaaaaaaaaaaaaactgaaaaacaaaaacaacgcaaaaacttcatgtatggttaactaaaaaaaacgcgatcctcaagctcaggctatacctcctctctagggggggttatttgcgcccttgtctacattctgcaaatactgcgttccttagtaaaatagtttccgctcaaataccgagccaactaacgacctgaactttaaagtgcaaaccgtggggtgcccagggggggagcacacccagcaaacttgcgtagcgctcactgccccgtaccgagacagaaaacgtgcgg

SEQ ID NO: 15152 - DNA, 264 bp, Zea mays
  Clone ID: MRT4577_113823C.1
gttcggagcgcgcatacacgcaaccagatctgacccagatcgaaacgtcggtaccttggcttctcggtacgacgctcgtgctttccaacgttaacgagactaacgcaaccgtcaagttccagctcaagaaggtccattgcatgggtgtcgacgtcggcaacatggcgatggaggagaagcagatccagcagaacatccaggtgagcgtcaacatccgtgtttcgcttctgaggaagaactggcaggatgtgagatccctgtacg

SEQ ID NO: 15153 - DNA, 795 bp, Zea mays
  unsure (1)..(795): unsure at all n locations
  Clone ID: MRT4577_113824C.1
aattttcgggtcgagcccaccgcgtccgcaaacagccatcaggtagctagcacctagcacgtagcatacccgcatctcactggctcccatcatgccacatgtagcagctgggttcctagcaagagtcttagctctgcttcccaactgttacancttcggcatgagcttgcatttcgttcgatcgcacacgcttaaactgcgatggcaccagtgtcgtcggaggcggctagctacctggtgctcatcaaaggcggcagcattgccgcctcttcgcgtgccgtttacccttgggatggctgcagcgcgcggggaaggatgacagagaccgacagcgacgacgacgacgacgactacgactgcgctcctgctgcctgatcgagaacccgccgcgttctggtgaaattgatctgcgtgtgttctctgagatgatgagatatgctgccccgtacgtaggcggtaggcgaaccggcgaagagcatgtagtatgtagtagtactacgtattgttaatcgcagaatagagtacgtacatacgtgccgctgcttaaagctaataatttggtcgtttaatttccactcctaggtaatgggtatacatgtatttcgggtagctgatttatgagccagtgtggttttcgtcccgggactaagctagagatcatgcaggctagctagattgattatgtaagcaataaacactgggatagatcttccggtacttcgtatctgataacgcaataaactgaatctagttttttgtaaaaaaaaaaaaaaaaggaaaaaaaaaaaaaaaaaa

SEQ ID NO: 15154 - DNA, 237 bp, Zea mays
  Clone ID: MRT4577_113825C.1
acccgtacctaggcttctatcttctgaaccgcccgctttttttttttttgttttagaggtagtttgcatttgcatcttacgttcataccaagtagagcctaaaggtgatggatcataccatatatcttaccgacacagggaagctaccctgcggtcttggccaaagccaaattgaaccctacacagatgcgttgtccatcgtcagcgggtctgtacctcctcatcgaacggccaggc

SEQ ID NO: 15155 - DNA, 578 bp, Zea mays
  Clone ID: MRT4577_113826C.1
cgcatcccggcgccgacgccgaggacccgcaaccggcccggcagctgagggagagcttcatctccagcgagagtcgcaaaccctccatgagttccccattccccaaccttctgattttgacgccgggtcgtgggcaaatcaggtagagcggctgcggattttggcgcccggcctcgggagtttgggagcttagcgactccacagtggaagactggtggacggcctttgcccgcgctgcgtcttcccctgcttcgcgatgggaggctcccctgtatgggacgggactctgtctccggacagcttcaacacctccgcggcggcgcttgttaagaggtggaaggagatcgaggtcgacgattcccttcctgaatggacgtggaagccgtgcagcaaattgggggtgccgtcggaggtagaagggtatctagccctggaaagagtgtaccgcagctgtggaacaagccagagtgttcttccaggagcagatcgaagagatgaagttcgatggtcaggggatgtagcttgggtcgagagctccagcgacaatgttcatgtttatgatttccatgctcgctaca

SEQ ID NO: 15156 - DNA, 410 bp, Zea mays
  Clone ID: MRT4577_113827C.1
gtccggacccaacgcggtccgcctatgcttccgagaagcgctctagccgtagccggggtgattatagtgagctagctggtgcacaccggcatggcggccacggtgtactccgaggcgctcctcgggagcgcagcgcctagccgacgctccaggctcagggctcctacctaagtacaacgtgtgccagctcggcttccaagaaggaccgaggaggttcctgctcagtgcgaaggccgataccgagagacacaacggcctccagcgacgagtagatagaggacctcaaaaggaagtgggacgccaaggaggacaagcccaccgtacgttagaacgggggcggcgccggcgtcggactttggctgacagccgtggccgagggcgacatcaacagcgtgccgctgttccccaag

SEQ ID NO: 15157 - DNA, 321 bp, Zea mays
  Clone ID: MRT4577_113828C.1
agatgcccgatggcgtacccgcatgggctttagcgagtaaccattccaggtagttccactagaacctgacggccagcgacgtgcaccacaacccgcagggctactaccactacggacagatcaacatcaccctcaccatcaaggtcatggtctacctcggtcacatcgaccgcaagcttcgatacggcttcaacggcatcttctacagtgacaccgagacccccctcaagctctccgagtacttcaacgtcacctaccgagtgttcagctacaaccagataggcgacatgcctccagtcgtttacggtccactacatgtca

SEQ ID NO: 15158 - DNA, 806 bp, Zea mays
  unsure (1)..(806): unsure at all n locations
  Clone ID: MRT4577_113829C.1
gccggccgggcctgtcaagttcgggcaatatttacgggctgtgttggagccgttcgggggacactgtgcccccctacgttcggtccggggagatgtaaggagcaccgttggagagagcctaacagcgttgattggtgggtggaggttagacaccagaggctgatggagcagaggtcgtaggcacaaataggtggaggccatggaggcgcagtaggagccgtgaattggtggagcggaaggggctggagtgacttgatgaggcagcaggacttgccgctggattccaggtttttgtggggcgactgctgctaagaagaaactaatgacgcagtctcgtggtgttaataaatatttgaacaaagctgacaatgttagccatgtgctcatgaactctgatgacacttctaaaattggtggtcgctgcctgcatggtacacatgatttggggactcagctagattctgatgctcagaggtatgaatgttagccatgtgctcatgaactctgatgacacttctaaaattggtggtcgctgcctgcatggtacacatgggtttggggactcagctagattctgatgctcagaggtatgttctactggtaattaataggagtttgaactgctgaacaaaatgtccagctatcgtattctttgatgaatggcctattgtttttcctggtatacatactacttanaatcaccatatctgtacctattcacttattcattacataagaaagattgagtagctcatctcctggtgaaaatatggacaacaaaatcagaaggccaccaaaatatgtac

SEQ ID NO: 15159 - DNA, 340 bp, Zea mays
  Clone ID: MRT4577_11382C.1
aggcctatctgtgctcgggtgccggttaccgaattgttgtgttttttttttattttttgttgttgtttgtttttttttgtgcttttgtattagctttttttttttgggggagaaagttccgggagggaccaaaaaacacagttgtggagaccaacactttgaccttgggccagcgcccaaaaaggggggaaaaaaaaaaaaacccatcaggggggtcaaacaaaactctttgtttataaagaacccccaaacctgggaaaagggcctcttggccgggaaaaaggggtggatcaaaaccaaataaaattggaccccaataaacgggatggagggggggacc

SEQ ID NO: 15160 - DNA, 106 bp, Zea mays
  Clone ID: MRT4577_113830C.1
ggggatatttgacaaaccaggggcgcaagctccaacaataatgagctcgaacccctcctttacgggcagcgaaaaccatgattcgttcaaccaaatggtgggcccc

SEQ ID NO: 15161 - DNA, 557 bp, Zea mays
  Clone ID: MRT4577_113831C.1
caaaccctcaacaaatggtttgagatcccagaatccgttcacgacttactggacactgttccaccataacgccttaacactagagaacatgctctccaacagcccagttcctgttcaatcaaaaaaaaaaatgaatgaaagggacacaggcaagcgtcctgaaaggagacagacctccagcagctgcagtactcttgctttttgaacatgatatacactgttccccatatagcttaccactcccatttatagccaatatttctatgcctcagcttaattgctatagctgacccgatactcacattatagtgattgcaaaacacagatccaaacaaaaaaaatcacattccatattgtaatacattggatgctgctacctacccccggtgagcatacaaggcagaggagcaacccagcaccttacgagcgcacgattacactgtgttgccagactacgatgttcccatcttgagctccaagtcgtattagcgtccgccacacttctttttcctggggatacacgtcgagcgcttaactctatagccggcgacatgttt

SEQ ID NO: 15162 - DNA, 149 bp, Zea mays
  Clone ID: MRT4577_113832C.1
aggggcgttatgacaagcgcccataataattttgccccaccacacaatttgacacttcttggagcacatgtgttttacagctccataagcataatccatgatccatccaggagggcatttttattctgggcgcttgtaatgccgcccct

SEQ ID NO: 15163 - DNA, 242 bp, Zea mays
  Clone ID: MRT4577_113833C.1
gcgagcggccgcccttttttttttttttgggaccaaacttggctggggtcgaaatccgtataggacccgagattccgccagctaaaactttacaactatgaccccaaaacgggaatatggacctaacccgagcaaaagggccctagattgccagggcagggcccacttaaaccttgaaccccctgctgctcctccttcctctggccttctaaaacttccaacctttcgagcgaacataaggc

SEQ ID NO: 15164 - DNA, 304 bp, Zea mays
  Clone ID: MRT4577_113834C.1
ttttcccctgcgccgcattccacctgggggacacccagtgcagctctagggtttcctcagcggcaagcgcgactccacgagcggtggaagaggtgaagctccgtgcgatgtgggggcagtcttggggcagcagtcgctgatctacgcgttgggggcccgcggtacggacatactggccgactacaaggattccaccgacaacttcaccaccatatactgccagtgcctcatgaatctctccgcaagcaacaaccagttcacctactactgcgaccgtcacacttccaatttccttgtggtagac

SEQ ID NO: 15165 - DNA, 335 bp, Zea mays
  Clone ID: MRT4577_113835C.1
gtaagtttttttagctacaaagttatgtctgtatacgtgtgaattgaaacaatatccatgctgattttattcgggtccccattggagctcacattgtgtcaggtgtaacgtacgcacaacaacatcagagttgtgtagcataaaaaaaccaacggacataaacctaaccggtgaaatatgtgtagtgactaacccaacagcttctagaagggcagactacaattttacaagataaatcaattttcttattcgtggcattccccttacatatgtgtgaaagctgaatgcataggaaaagtaagaggggttcctaagggtagtttagatcaaacacc

SEQ ID NO: 15166 - DNA, 615 bp, Zea mays
  Clone ID: MRT4577_113836C.1
aacttcttcctcatgcgtcgccagcaggaactttggcttgtaaactgcactgaccagagctacttgagctacatgcaatactctttgcgtctgacatgcacatgcctcaacgtgtctatgcatcagatgcctaggccgatcagatctcggccaaggactactactcgacactctccatctcggtctcacgactgatggacttgtatgagctgcatcgcctagtgcatcactgcaacgtgctgccatcgatcgatgtacatcgacacactgctcttcctctacattacctgggtcaccgggatggaggactatgaccagacggactcatcaaacgtgcgggccccgactcgttgtgtagaagtgctcgatatcctcaatatctatcgggccttctgcgacatgatcttcatcctcgactacttgcaccgctcggacatctcaggaggccacatcaaccctctcgagagcttcggcctgttccgtgacaagaaggagaccctcgaccgaacgctgatgctacattctcgaacagcgtctgcatgccatctgcgctcgtgtgcctcgtatggacttccagagcgcctactacgtgctctactgcgagatcgcacacga

SEQ ID NO: 15167 - DNA, 284 bp, Zea mays
  Clone ID: MRT4577_113837C.1
tttctttagagaagaagcagaagagccactgggattttgttctggaggagatggtctggatggcaaatgacttcacacaggagcgtttgtggaaaaatacagttgcagcacagatgtcccattggatttcttctagaggtcgagcggtatttgaagaagcaagcattcagagaaagcagaaatctgttgctagagttctagccaatggtattatgaacttttggtgttcagttcatactttacgagctagtggtggtattcctaaaccagtagaaatcgagcaa

SEQ ID NO: 15168 - DNA, 491 bp, Zea mays
  unsure (1)..(491): unsure at all n locations
  Clone ID: MRT4577_113838C.1
tcttatatgcgtactgcgatctcaacacttgctatgactgataagaagcattactgtgcttctgaattttatcattataggcctctgggggctagcgtgtagcataatacatcttgtctggagttgctatcatctgcttcacacctaacgggtaaggctggtcagattgctctcggctctgctacatgctatggagtttcgattcttttaactatggctgctaggatgcttgatttcaacaggacatctcttgcgtgatgatgcattgatcatgtatttgataaagttgacctgttcgggaatctccggatctatgcttattttcctctccccgaagcattttgtcggttgctactcccttcctcgtctctgttgcctacgtttccacctgaagcctttgctcttttgaacctctccattaacgntaaggctatgccatcctacggcgcttctcaatgggaggatcgtatcaacgttcatgatcccccgtt

SEQ ID NO: 15169 - DNA, 250 bp, Zea mays
  Clone ID: MRT4577_113839C.1
aaatttacaattccctcaatatatatactaatactttcattcactttcctaaaattccctatacatttaattctccaacaatatatcattctttcaactataatattctttttccacatacaaatccattcctcaatcacaacattcctcatattgttatctacacatacatctctttatactccttatacatctaattatcataataatattcttaaataataaaatccaattatgaataataaaacaa

SEQ ID NO: 15170 - DNA, 338 bp, Zea mays
  unsure (1)..(338): unsure at all n locations
  Clone ID: MRT4577_11383C.1
ctgtcctttgctcattggtgaggttgaatggtggcgattgtttatgttttttattggtgtggctggagtgtacattgaactgggtggctcagatgacggatcgagggcggcgcacaccgagagctcgtgggcggaacagactgctgagattgaggatggatcaggagcttgatctccacaaagctttgcgggggcattgagtagtagagttgtgnagaaagggtggaggcatctggaaccatatagtctctatcggaaagtcgtgacctatgagttggtgaacaagactgacctgaatatgctcgcgaatatatggcggcatgaacggagaaagatca

SEQ ID NO: 15171 - DNA, 359 bp, Zea mays
  Clone ID: MRT4577_113840C.1
acctaaataaccaatatgggggggggttatttttttataaccataaaattccatcccctttcatatttaacaaactgcggcttattcaacactccatttaaaagctggtttgataaattcattaccttcacgaacaaaatagcgccctttcttaccagccttaacacaaggttctaaatccacccgattagatcctgccccaggggcatttacacaaggatggcctgaagttccatccccagattgtaatacggaattatttccaaaaattccgcggcgaccgggcatataccaaacatgaacacccccaaaagcacaaggactaacacccagcttgggaaacccctcctaactgaaaa

SEQ ID NO: 15172 - DNA, 278 bp, Zea mays
  Clone ID: MRT4577_113841C.1
ttcacacctacggtctgaccaaggagctgtaactgacatactgcgtgtttgtacggaaggaatatactatggatgaaccacgattgaactccatccgggttgcattcaatcacgacggtccaaagtatgttccgaactcaattgatcgacaggcattcttattaactggatgcgagttaggacagtagttgaatgatccagcttaatgaaggcggggccttatagagcactaatcagatgtatgctctgctgtataacatgaatcatggaggtgatat

SEQ ID NO: 15173 - DNA, 533 bp, Zea mays
  Clone ID: MRT4577_113842C.1
ggacaaaagggattggtttgcaaatgacccaactgcttgacaaaatagcctttttatttaacaacatgctacagccaatcggggtgggttcacatccaggaattacaaaacttcccttactggtggggggggaacaaaacctaacccgaccttttttttgactttgcaactagaccacccccccgagttcgggacagtaatccaaaaatttaaagggctgtttacttttttttggggtccccagccttggtttttttgaccccacggatttttttggccctgttcttccgctttttaatttgctggggggacttttcaaccttagtagcaaaacctttcctgatgagggggtttttgggctcaaactttttggcaaactcgaggttatcgtaaatgaggcccaacccaggggacttgcctccaccgaagggggggcggaacttgaaaacaaaaatggggttggggtccttcacctcgtacattttggaaagcctttctttaaactcccccttggaaaccttggcccggccggg

SEQ ID NO: 15174 - DNA, 840 bp, Zea mays
  Clone ID: MRT4577_113843C.1
gccggccggtccgggaaagcaaaacagactcaggaggtcgtggagatagcctattgtctgccgaatcttctttctgtcttcatggcagtgccggacatagttgcagttggaacttctacggaggaacacacacagtgccggtgcgaatcaatggtggtttcatgacctcttgattcgcttcgtctacctccgtaagagccatcatctaccccagtacacccctacaccgttccccctgcctttttcttctcccgccgttcacccacgccacttccctacgcggctacgccaggtgccccggtgtagtagcctcgtcggatccttcgccaggtcttcctcgggccctgcgccggcgaggagcgcctactaggattcaagatgggggttcaccgtaggaattattcagatgatgaattttcagttgctggcgagaggccagaagtagaattcatggacttccagaacgacgacacctttcaggattattcatgtgaagatacccctgtgcttgtctcagctcctttccctttcgaggatggaaaaccaaaatctgcacttgtcggagaaacatcagctgataccatacagattgagaatacctctcctgaatctgtaaatctgtggagtgtaagaattttctcttcgaacccagaagacagctatgttctatcaatgatgagaccaccgtcagacgatgctaatgaggaggaaaagcatgcttttcttgctttgacgtccgtggaagaccgtacacttctgcctgggacaacccttacagtttggctgtcttgtacgccaaaagatattggcctgcatacatcaatcgtgcatgttgatatc

SEQ ID NO: 15175 - DNA, 204 bp, Zea mays
  Clone ID: MRT4577_113844C.1
cccatagcacacacgaacgtcagcacaaaatacaacacaacgcatcatacaccacgtgctcaagcaccccaacagcaaccgcatgtcagtcacgtccttctacaaccacaccgacatcttcccagagaccacgctcgtcaagacacgaagaggaccgcgccgaagccgaaattacaggccacggaacccaagttcgaggccata

SEQ ID NO: 15176 - DNA, 384 bp, Zea mays
  unsure (1)..(384): unsure at all n locations
  Clone ID: MRT4577_113845C.1
ggtcaggagcagcatttacagcgccagctccttcttgtatatccaagcgtgcttctccttattcttcttcacggtggcggcggcagcggcagcgcacttcctcgatgccgccgacaggagctcctacttggcaacngctgtaaggttcggcacggagcccgtcctcgtcgagtgaagcttcacggactccttgagcggagccagcgcgatgaggtccaccctccgacgagcgacccgactactaggccaccaccaactcgtactcgctccacagctggaacagccctgagatcatcgcgtggaacttggtcacggacatggatgactcgaagagcaagtactggatgacgaatgggaacgacttgtgggaccgcaggacgctca

SEQ ID NO: 15177 - DNA, 497 bp, Zea mays
  Clone ID: MRT4577_113846C.1
ccccgctggagccgccgcgccataacttccgggtcgtcccacgcctgtttttacgcgaccgcccacgcggtcgaacattgtggctctggcttggctgggctgctgacgaccttccttctgcatgcatgcatgggaaccgatgcttgatgatgatgtgaatcagtcggtctctctaatcgacttttcattcgcttaggcaaactcaatggcgtatcagccccaaggtttatcgaaacatacctcgggtgagcttagtgctcaatacagccggactcctatatatccaggaggtgccgcacatatgatatacggttggccaatgctatcgagatcaaacaaaaaacaataggccaggctatatacaggatacagacctacagccaccagcatccgacaggataacattaatatggcttcacctagatagacaaaactggcctaaaaataacaacaaagggactgggatatacatgacctacctaacttacatctcatgc

SEQ ID NO: 15178 - DNA, 369 bp, Zea mays
  unsure (1)..(369): unsure at all n locations
  Clone ID: MRT4577_113847C.1
agattgcaaatataccttcggcttgaaggaaaaagtgcaagtgtgacgcaaaaaatgaatgccaagtcagcgtgaacagtacgggagtactgttcacctatttataggcacgggtcgcagcccatgtaaaattacatccaggtcctttgcttttgataataactctatagtaatccatcgaggtctagatagtcttttcctctttaagtcggtttcctcttttctgccatcatgccgaagcttccttgtgcatagcttcggctctgttccatctttcgntctctttatgtttcttcatacaacgattttgacttgtccgaagggtccatgttcgaaggtaccttgttcatgcattatactttcagaaac

SEQ ID NO: 15179 - DNA, 662 bp, Zea mays
  Clone ID: MRT4577_113848C.1
gcaggccatctcgctggcgttcccgggcgtcaagtgcagcgtgctagacctcgaccacgtcgttgccaaggctcccagtgacactcaagtgagctacatcggcggcgacatgttcgagtctgtaccgccggcagatgccatgttcctcaagtgggtgctgcgtgactggggccacgaggagtgcgtgaagatactgaggaactgcaggaaggccatccctccgagggaaggaggagggaaggtgataatcatcgacatggtggtcggggctgggccggcggacccgaggcacagggagatgcaggccctgttcgacctctacatcatggtcgtcaacggcatggagcgggacgagcaggagtggaagcagatcttcgtcgaggccgggttcaccgactacagagtcacgccggtcctcggcgtccgctccatcatcgaggtgtacccttgaacgaacgaacgtcgtctggtgccatgtgtgtgtgtttttgtggggggagggtcatcctctattttcttttttgttttgtttctgcattctgaagacacggacagtgctctctcctcacggcacatgctgatgctgttcttttggttttcttcgtttgaacgaacccgttctgcttttcatctccgaaaaaaaaaaaaaaaaaaggccccta

SEQ ID NO: 15180 - DNA, 430 bp, Zea mays
  unsure (1)..(430): unsure at all n locations
  Clone ID: MRT4577_113849C.1
tgngccggtgggtgagagcaccacaccagcctcatgttctgacaacagcatgaggccatcaccgcagccttgttcaagtacctggattcagggggtcaaggtgccctacctccagaacatcgtccaccgcacctggaccaagcagccgaatggcggacatgcaggacccatccggcattacatgcaacaacggctggacaacacctgagcagaccacaaagatgacacacgacagcacgaacaagacgcagaaaggcaccagcaccgcatagatggaccgtccgtcatagcattgctgggcgggggtggaacctgaagtgggtgttgagcgagcacgtcgtccggagcccgatcgatataccgccggtcaaggccctcgtgttggcttagctcccaatccaatctgtttgacggccggcaggaaccgtct

SEQ ID NO: 15181 - DNA, 263 bp, Zea mays
  Clone ID: MRT4577_11384C.1
gaatgtgaactagatactcaaacgtgcgatggtgaaacaagtatcgactgcacaccgtacattgattcacccttagaacacgcgctgcatacagacacagggtccaacccaggcgcctggcaagcggacacggtttgtagaacacacattcatataataaatgctaggttttacaggacaatcaacagggtaaggtcgccccagcatactaattggactaatactataggtacgtgcgcacagggtgtgatgcaacctcgagc

SEQ ID NO: 15182 - DNA, 477 bp, Zea mays
  Clone ID: MRT4577_113850C.1
gggctcaggggccgattcaaaggatcggcccaaaattttacttaagttttatatatagggccagggaccccgggttttgcccggagtctactttaaaaagcatatttaacgaaacaaagtcctcaatttgggccaaaacacaggactgttaattaaactgtataagccatcatccccagctgctgcggcaggggaggcaaagggatcggccccaaaaaaaaaccctggacttgccggcggttgggggggaaaccggaactttcttccaaaccccgggaactgttggagggtctgggcaaaggccggggccttggggatggggggggcactcacgcggggaggggggccctttagggacccctcaaaggggccacccttgttttagagaaagggggcaacctcgacttcccccaaaggccggggggtggttttactgggcccctcccttggaaaaaacttgtaagaggtctccctggg

SEQ ID NO: 15183 - DNA, 336 bp, Zea mays
  unsure (1)..(336): unsure at all n locations
  Clone ID: MRT4577_113851C.1
ttgcgatgcgtgatgaattttgcatgttgtatttagtatttcatttttatgactccactcgggcctcatgcagatcgaacgacatgaggcttaccctaaaggcactggagcgggccggagcatagtggatctcgattgcctgccttcccgactacttcgacttggactgactctgctcgggaccccacgccggctaccacgcgagggaccggtcgcaagctttatgtgagggaacgcccccaggaagcagcttgccaccaaggctgcccgtaagtctgcccccaccactggtggagtgaaaaancctcaccgntaccgccctggacctgttcccct

SEQ ID NO: 15184 - DNA, 369 bp, Zea mays
  Clone ID: MRT4577_113852C.1
gctccattctcagccttcgccaatcccttcccgtgatccgcaaccgctgagtgagaataacagatggccgggaaggtggatggaccgggtatccggctcgatctcggcacgacgtactcttgcgcctgcgtgtggcagcacgaccgcggcgagatcattgccaacgaccagggtaacggcaccacgccgtcctacctggcctatcccgactccgaacgcctcatcctagatgggggcactaaccagggcgtcatgaaacccatcaacaccgtctttgatgcccagcgtctcatcggcaggactgttacggacgggggcggccacaatggaatcaacctgcggcccttcagagtccttccagggccaggt

SEQ ID NO: 15185 - DNA, 1202 bp, Zea mays
  Clone ID: MRT4577_113853C.1
tgggatctaagattagcatgtcttcttctatatgcatttgatatagaagacaacttttggcagttatattctgattttttgccaagtgttgatgaatgcactagtttgctgctggcaccaaaggaagatctaatggaactagaagatgaagatcttgcttcacaaatgttaaaacaccaggaacgagcaattgacttttggcaaaagcattggatatgttgaaccactcacccaatgctaattgcttcctgcattggcgttttaaagaccgtatgcttgaagttatgattaaggctggacaagctatcaagaaaggagacgagatgacgatagattatatgagtggcgtcaacagcaaatttatggaaagatatgggttctcatcaccaacgaatccttgggagctcataaatttctcgagtcctgcaacaattcacatggattccttcttatcggtcttcaatatcgctggcttgcatgatgagctgtaccacaattctgcattgacctcagtagtagaaaccgactttgtggacggagcagtcgtagcagcagccagagcattgccgacatggtcagatggtgatgttcctgcaattcctagtgtggagagaaaatctgctcaggcactgcaagaggagtgccgccaaatgttggattcattcccaactaccatcgaacaagaccagcagatcctagattccgatgcgcatatcagcaaaacccgagaaattgcgatcaagtatcgtctgcaccggaagatgctcctacagaaaatcatggacgcactggacatatatcaggatagaattctgttctagctgtagaggcggcgctacctgtgctcatttagagcacagaacgagtgcccagttctactgctagtaaacctggggccattgtagaaaggggattttgtagggcagcctttcagttcatagcgtctgtaggttaacagcagaggatcccagaaggaaatcaacattaggataggctggttgccaggaaatatagctgctgtaagttcaagtcagcaagctgccatgtaacttgtttgcacagggcggcaatctgtcatagccacctgcatatctctcaggctcagcttcacaacaacttgcactgctgaaagaaatggcctgtgggctgtgtcctgtcacctgtgtgtgtgaaatactatccatatgattggttggccgcaa

SEQ ID NO: 15186 - DNA, 211 bp, Zea mays
  Clone ID: MRT4577_113854C.1
aggggaggcccaaactccggtgccttttcggtaagttcccgttcacgatcgcggggtggccgccacccctttccaggcaagttttttttccccaccttttttagccaattcaatgatttgccaacagtttggggaatgaattgggccggagtgcccattttaggccctgggcgtttagctgccccagataaattatttttggacaacccaa

SEQ ID NO: 15187 - DNA, 1153 bp, Zea mays
  Clone ID: MRT4577_113855C.1
ctcccgccagtgctgatgaatgcactagtttgctgctggcaccaaaggaagatctaatggaactagaagatgaagatcttgcttcacaaatgttaaaacaccaggaacgagcaattgacttttggcaaaagcattgggacaaaccaattcctctaaagctgaaacgccttgcacgtgaccatgagagatttctctgggcactgagtatagtacagtctcgttctgtcaacttgaagttgagaatgggagccttcatccaagatgcaaatgtgctagctccttatgctgatatgttgaaccactcacccaatgctaattgcttcctgcattggcgttttaaagatcgtatgcttgaagttatgattaaggctggacaagctatcaagaaaggagacgagatgacgatagattatatgagtggcgtcaacagcaaatttgtggaaagatatgggttctcatcaccaacgaatccttgggagctcataaatttctcgagtcctgcaacaattcacatggattccttcttatcggtcttcaatatcgctggcttgcatgatgagctgtaccacaattctgcattgacctcagtagtagaaaccgactttgtggacggagcagtcgtagcagcagccagagcattgccgacatggtcagatggtgatgttcctgcaattcctagtgtggagagaaaatctgctcaggcactgcaagaggagtgccgccaaatgttggattcattcccaactaccatcgaacaagaccagcagatcctagattccgatgcgcatatcagcaaaacccgagaaaaatgcgatcaagtaggtgaactacctatttgttatgatgggctagtgattgatttgtgtgtatatatgtttttactctgggactgcttgtggataattttttgaaagtaggttgttgagttaccttctttcattctatgcgcaggtatcgtctgcaccggaagatgctcctacagaaaatcatggacgcactggacatatatcaggatagaattctgttctagctgtagaggcggcgctacctgtgctcatttagagcacagaacgagtgcccagttctactgctagtaaacctggggccattgtagaaaggggattttgtagggcagcctttcagttcatagcgt

SEQ ID NO: 15188 - DNA, 610 bp, Zea mays
  unsure (1)..(610): unsure at all n locations
  Clone ID: MRT4577_113856C.1
cccacgcgtccgtggatacacaaatttggtatacaatcttctccactctacttggtggaatttacggtgctttccaacggctcggagagattcgtactctggggatgctgcgatctcgctttgattcaatacctttagcctttaactcgtgcctaattcctgttgaaacatctgatgcaaaaaggaagaaaggtctgaggtcttacttacacaatcgtttcaaagagatggaacatgctgacaaggagaatatagcagcaaggttcgcacaaatgtggaatgaaattgtcaccagctttcgagatgaagatcttatagacaatagggagaaggagctgctacttgttccttatgtgtctgatcggacccttggtgtcgtgcagtggcctccatttttgcttgccagcaagatcccgatagcagttgacatggctaaagatagcaatggcaaagaccgagatccgagaaagaggcttgacaatgattattaatttaagtgtgcaattgaggaatgttatgcatcatttaagaatatcatcaatggccttgttcaggggtaaccanagaaaagggtcataaataagatatttgtagaagttgaaaaatgcat

SEQ ID NO: 15189 - DNA, 307 bp, Zea mays
  Clone ID: MRT4577_113857C.1
agattgatgggaaccacataaaacccacaaaactcaggagggtgatcccctccccgacacaaagaaaatgtttgttgccccctgaacatggcaccacaaacggaggtaagggaaggactaaagcccttgatatttgaggtcgaaaataaactaggggaatgtatttagtgggttggcttggtatcgcctggatccttacccaaatcaggatcaggcttgtttagcgaactgaaccttgctgggttctttgccacgaccaccacgaccaaatccagggagcctcttaccgcccctctaatgggtacaa

SEQ ID NO: 15190 - DNA, 224 bp, Zea mays
  Clone ID: MRT4577_113858C.1
ctggggtgcccctccggaatttccgggtcgacccacacgcgcgctatctttctttttttttattcttaatgatttggggggttttttaattaatctcggggtatgctactcttggggcccccctcaggcccccccttttaatatcaatattaaaaggagagagggttacaaaggggacctaagaggaatctaccctgcgactaatggttttctatcctttcaaa

SEQ ID NO: 15191 - DNA, 306 bp, Zea mays
  unsure (1)..(306): unsure at all n locations
  Clone ID: MRT4577_113859C.1
ncccacccctccnnctttgcctcctttacttttagcacatctcctcntaccccggcggggactatctccggctcacgggggcgccacnanacctcctacatcaacaccttcntcttgggcgtctctaaccgctgtgcgtccgtgcgcgtgggcctctacacctataatgaatgcaaattctacttctatgaccggatgcctgcctccaacatttacccttacgtcgtgacctctctcatctcttatacaaccattctgtgtgagcccatccactccaacttcgactacaatggcccccccgctcct

SEQ ID NO: 15192 - DNA, 1102 bp, Zea mays
  Clone ID: MRT4577_11385C.1
tccgccctcgggtacatatacaattcgaaattcgtttgcttcctgccctctccacctctctgctgcgcaacccgccggccgctgctccccacagaatcggcctacaaatcgagcaaggctcagccacatcccagtctcagtctcatacctcatagagtccaagaattgttgggaattagcagtccgcccatgcgttcttcctctcctcctaagcatcccgtctcgtcgtcgcccgggcccggcccaccattgttgttgcccgttgatatgttcccgtactgctgctatctatctgtcctccttccaccatttcttgttgctgatgacataaaggttagagccgtagagatgatatatttttagaggtgtacacaaggaattgtgactcgacaaaactttctcgcctctccaccatcgtgggaggaagacttggatcgcgccaaaagattgcagggccgagacccctctgctcttgaacgatgatgccatgcacgcgtcccgtcaaagaagtgatgcaaccattgtgcatggcatgatgatagtcggatcccgtgggtgggagatccagagcttagtattttcttcccttgacggaggtaagagctattattatgataataatacagtactagtatgtagcatatgggttgcggaactcgatcacactagcgtgtttctgcctccctagaacatctcaaactggatgggattgggagtttgttgtagcaaaaaaagctgtagccatcacccacccagtcatttgtaaatctgcgcgacttaaaaagagcttttctgtgtggccccgagacagaaagaccagcttgaatcatgctggagtactagctagtacagtggtggcacttttatgttcttgtatactagtactactacaacctactgtgctgaatccatccatgatcttaaaaaaaaaaaaaaaaaaaaaaaaaaaaaaaaaaaaaaaaaaaaaaaagggcggcgcgattgaactagctctgcgtcgcgcccctgtttggctgggtgttttttgttttgttaatggagtaatcgctcctccgttttgctccctaacaaatgtcgctgttaagaaagagagttcatcccc

SEQ ID NO: 15193 - DNA, 312 bp, Zea mays
  Clone ID: MRT4577_113860C.1
gggtaagagccattctaatgtatcatcagatagcacaggtaacaagatagctgggtccggcaagccataacagaaaccgacttcaaaaccaaagaacaacagcattgtagataactcagttattaagacccgacgacaggcttattttttgataccaagtgggccaatgattctgctgaagcgtcacactctgcagctgcgaattacagctcgtcctcattatccataacctcttcatcgggatgatcaggctgtgcatcaggctcattctctatctagcgggcccagaacttttaggggtctgttaccagc

SEQ ID NO: 15194 - DNA, 363 bp, Zea mays
  Clone ID: MRT4577_113861C.1
gtttacaagattaattgtgacggtgcttttactcctacttctaaaaatgctggatggggctttgtaatcagaaatcatcttggtatagttgtagcagcaggagcaggttctgcatatgctctgctgccagctgtacattttctcttgtagtatgcagctgttctgggaatcagaaatgttattttggagactgatgcagctgttctagccgaagcgctgtctaactcaagtgttgataggtctgtgctatgagttctgatggaggagattaaaacctttatgtacccagattttgtaatgttgtagctgattctctggcggccattggcttgaaaaaaaaaaaaaaaaaaaaagggggggccg

SEQ ID NO: 15195 - DNA, 107 bp, Zea mays
  Clone ID: MRT4577_113862C.1
ttgtgttggggctgccgatcacgcgacgaagctcgcattcgctcgagtgtgatccaaacccgccactgcacagatgcgcgagatcgtcagcgacaaggacgcctctg

SEQ ID NO: 15196 - DNA, 2409 bp, Zea mays
  Clone ID: MRT4577_113863C.1
atggcgcaccggacagtccggtgcgccaccggtgcgccaacggtgcgccaccggggcctagatgctttcagaaggtctgttatggagcagctacaggagattcaactccttgttagggacttggtccaatatggctgcgtcctaccagacagttttcaggtgaatgcaatactggcaaagctcccgccttcttggcgagactttgtgacttcacgccgccacatgaagaagcaaatgactctcactgagttgtcagctgcgattaatgtggaagagcgtgcaaggtccagtaacaagccatcccagcaactccaggctcacgttgttgagaagggtggagatagaaaattccagaagaagaagaagaactctccacagaagaatctgaaccaacctaagtccaaaaagatgaagaaaaaaaaggactttatctgctacgtttgtggtgtctccgggcatacagctcggaggtgcaatcttaggaagggaaaaggtcctccacctcagcgcaaagaagggaacgtggtggttaactccaccccagggtatgcacttcaggcctttatggcatgtccatcagatgactggtggatggattccggtgctactattcatatttgtgctgatcgatccatgttctcttcattccagggatatagcagcgcaccagtcttgatgggaaatggtgttccggcagcagttcgaggtactggacaggtctacctgaagttaacttcaggaaagacgctcgtgctcaaggtcgtactctatgttccctcgatgagccagaacctcatatcagtgtcgctgttatgtcgacaaggtctcaaattagtgtttaagtctaataaagtggtcctgtctaagtttggtacttttgttggaaagtcatatgagtcaggcggtttgttccgtctttttgttttgaacaatcattcttcttaccatgttaatgtgatgatgctagctaccaggttctgttatatttatttacttagaaccaaagatgaggcactagaacactttaagatctataagactgaagttgaaaaccagttagacaagaaaattaaaaggttatggtctgatagaggaggtgaatacctttccaacctttttgatgagtactgcaaagagtgtggaatcattcatgaaaccaccgctccatattcacctcagtcaaatggggtagctgaaaggaagaaccgaacaatgtgtgacttagcaaatgctttgttgcaaagttgggggatgcctgacatctggtggggcgaggaagtactcacggtgtgctatgtcctgaacaggctgccgcctcgcaaccgcgataagtgtgtgtattatcgcttctctgggggcaaaggtgtcatcatgtgtttatacgttgatgacatattgatatttgggaccgatttggaggctatcatggagacaaaagtattcctctccaagaactttgatatgaaggacttgggtgaagctgatgtaatattgaacatcaagctaataaagggtgaggatgggattactttgtcacaatcccattatgtggaaaaggtcctgacttgctttggacatatggactgcaaaccagtcaccacgccctatgatccatcctacacgctcagtaaatatgaaggcgagcctgtgaaccagctactatattcgcagatcatcggatctctcatgtgcctgagcagtgcaactagaccagatatctcatatgaagtatgcagactggctcgttattcggccagtccaggagatagacactgggtagccttgtacagagtgcttcagtatttgaagggagcgatgaatcttggtattaaatataccgaatttccgtcagtacttgaaggattcagtgatgcaaactggatctctgactcggatcaaatgaagtctataagtggctatgtgttcactttagctggtggggccgtgtcatggagatcgtctaaacaatcagtgtcgacacgttccaccaaggaggctgaattagttgcacttgattcagcagcattggaggctgaatggttgagagacctgttgtcagaccttccaatgttagcaaagccaatactggctgtcctagtatactgtgacaacacttctgtgttgctgaaagtgaacagtagaaaagacaaccaaaaatcctcgaggcatatcagaagacgacttgattcatgtcggcatgctagagagacgggtgtaataaccgtagattacatcaagtctcaaaggaaccttgctgatcctttcaccaaaggacttgctcaaaagccaatccaagcagcgtgcatgggaatgggactggttgagcgatatgctcttaatgaagtcaatgctataagcagggaaattgtcctacagaatttccttaatgatttcacctatatgagctaa

SEQ ID NO: 15197 - DNA, 3772 bp, Zea mays
  Clone ID: MRT4577_113864C.1
gaggttcggccgggggatttttaatttccaaatggacctgtgtagctattttacatgtttacatgtcttagaattgctactgttcattgctgctataattacatatggcatttatctgagttatatgcctgttttattcggaattagaatatttaatttatttaaatatattgaaagcatgtcacttatttctctaaatttacaacaatccagaaaaccaattcgtattatggcctctagttctgatgtcattaagcctgaagcgttcgacggcgcaagctttaagcgctggcagattaagactcgcatgtggctcactgacctaaaattattttgggtagtgacgtcggctgttccccaggctgcatcagatgattctgatgatgcagcgaaggccgccgcactagcggagaaggccaagtgggacgaagccaatgaggcatgcttgtctcgtctgctgaacgtcttgtcgaaccgcttatttgacgtatactctggttttacctccgccaagggtctatggactgaacttgagaacgagttctctgaagttgacaatggcaatgagtcattcacaacggaaaactacctcaactataaaatggttgagggaaggtctgttatggagcagctacaggagattcaactccttgttagggacttggtccaatatggctgcgtcctaccagacagttttcaggtgaatgcaatactggcaaagctcccgccttcttggcgagactttgtgacttcacgccgccacatgaagaagcaaatgactctcactgagttgtcagctgcgattaatgtggaagagcgtgcaaggtccagtaacaagccatcccagcaactccaggctcacgttgttgagaagggtggagatagaaaattccagaagaagaagaagaactctccacagaagaatatgaaccaacctaagtccaaaaagatgaagaagaaaaaggaggactttatctgctacgtttgtggtgtctccgggcattcagctcggaggtgcaaacttaggaagggaaaaggtcctccacctcagcgcaaagaagggaacgtggtggttaactccaccccagggtatgcacctcaggcctttatggcaagtccatcagatgactggtggatggattccggtgctactgttcatatttgtgctgatcgatccatgttctcttcattccagggatacaacagcgcaccagtcttgatgggaaatggtgttccggcagcagttctaggtactggacaggtctacctgaagttaacttcaggaaagacgctcgtggctgaaggtctcaaattagtgtttgagtctaataaagtggtcctgtctaagtttggtacttttgttggaaagtcatatgagtcaggcggtgtaaaatgtggtatttgtgtgcaagctaagcagccaagaaaaccgtttcatacggttgaaggcagaagtaccactcctttagaactaattcactcagatatctgtgagatgaatggtataatcacaaaaggcggtaaaagatactttcttaccttgatagatgatgctactaggttctgttatatttacttactcagaactaaagatgaggcactagaacactttaagatctataagactgaagttgaaaaccagttagacaagaaaattaaaaggctacggtctgatagaggaggtgaatacctttccaacctttttgatgagtactgcaaagagtgtggaatcattcatgaaaccactgctccatattcacctcagtcaaatggggtagctgaaaggaagaaccgaacggtgtgtgacttagctaatgctttgttgcaaagttcggggatgcctgacatctggtggggcgaggcagtactcacagtatgctatgtcctgaacagggtgccgcctcgcaaccgtgaggtcacaccctatgaaggatttaaaggaaggaagccagatctttcgcatcttcgaacttggggctgccttgcaaaggtgaatgtcccgttgccgaagaagagaaagctaggccctaagaccgtagactgtgtcttcctgggttatgcacataacagtgcagcttatagatttctagtggtccattccgagacaagcgaaatcgctgtaaatgtaataatggagtctcgggatgtgacattctttgagagcatcttccctatgcgggataaggaagtagtagccccagatggtccatctcggacatattctctgccctcgagtgtccatgaccagactccagatttggagttaaggaggactggttgcaagcctgtgggctgcaaatggatctttaggaggaagaggagacccgatggtactattgaaaagtacaaggcccgtcttgtggctaggggttttactcagaagaaagaggaggattattttgatacttattctccggtggctcgattgcccacaatccgtgtgcttctggcactggctgctgcttataaacttcttgttcatcaaatggacgtaaagacagcattcctaaatggagagctggaagaggaaatttatatgcagcaaccagaaggatttgtggttaaaggacaagagagcaaagtgtatcgcttgattaaatccttatatggtcttaagcaagctcccagacaatggcatgagaagtttaataatactctgaccactgccgggttttgtgtaaacgaagccgacaagtgtgtgtattatcgcttctctgggggcaaaggtgttatcatgtgtttatacgttgatgacatatcgatatttgggaccgatttggaggctatcatggagacaaaattattcctctccaagaactttgatatgaaggacttgggtgaagctggtgttatactgaacatcaagctgataaagggtgaagatgggattactttgtcacaatcccattatgtggaaaaggtcctgactcgctttggacatatggactgtaaaccagtcaccacgccctatgatccatcctacacgctcagtaaatatgaaggcgagcctgtgaaccagctattatattcgcagataatcggatctctcatgtacctgagcagtgcaactagaccagatatctcatatgcagtatgcagactggctcgttattcggccagtccaggagatagacactgggtagccttgtacagagtgcttcggtatttgaagggagcgatgaatcttggtattaaatataccggatttccgtcagtacttgaaggattcagtgatgcaaactggatctctgactcggatcaaatgaagtctacaagtggctatgtgttcactttagctggtggggccgtgtcatggagatcgtctaaacaatcagtgtcgacacgttccaccaaggaggctgaattagttgcacttgattcagcagcattggaggctgaatggttgagagacctgttgtcagaccttccaatgctagcaaagccgataccgactgtcctagtatactgtgacaacacttctgtgttgctaaaagtgaacagtagaaaggacaaccaaaaatcctcgaggcatatcagaagacgacttgattcatgtcggcatgctagagagacgggtgtaataaccgtagattacatcaagtctgaaaggaaccttgctgatcctttcaccaaagggctggctcaaaagccaatccaagcagcgtgcatgggaatgggactcgttgagcgatatgctcttaatgaagtcaatgctataagcagggaaattgtcctacagaatttccttaacgatttcacctatatgagctga

SEQ ID NO: 15198 - DNA, 656 bp, Zea mays
  Clone ID: MRT4577_113865C.1
caaccccacgagtccggtcagcccgcaggccgtcggcggcgggcagtgcccggcgctcgggtgccccatcaacctcaactgcgactgccctccccagaaccgcaccgccgagggcgccgcgtgccgcggcccgccggagtacttcaagaaccggtgcccgctcaccaggaccacgcccaccgacgtcgagcccgtgccgcagagctgccgcgccccgggggagctcaaggtcatcttttgccaggcgaccatcgtcacatgcggcggcgaagcagagcgcaccgtcctcgccgacagctagacagatcgagccgtccagctccattcgcctccaggctccgctgaatccttacagtaattgtcatgctttcttttgctccatgtgtttgttagctttggcttcgacgcgcgtgtactccggtggttttattttagaaatcagcagtgaagcaaaataattgtcttcggatatgttaaactggctgagccattcaaaatccacgaagcgcgagtgaggtgcatctgaatgtggttgtggttggcgaatggggacgatgaaaacgcttacggccgtgctgtagcaagttttggcatatattccttgtttctaccgagagaaaaattaaataattattaacacatagacaattataatg

SEQ ID NO: 15199 - DNA, 147 bp, Zea mays
  unsure (1)..(147): unsure at all n locations
  Clone ID: MRT4577_113866C.1
gaaaagtatgacnnaanattcaatcatatacttgagtaatactttggacaagatgcaaactccttagttacaatattttttacatacataaaaataacggncagatnttgggacacaccataggctacaacctaaacatcactcttc

SEQ ID NO: 15200 - DNA, 5589 bp, Zea mays
  Clone ID: MRT4577_113867C.1
ttcttttgtgcgaagattctcacactagggtggggggggtgaaggcgtaatcctccgcttactcgtgcagggttggagtacactgggataggctttggttcaaacctaacaagtgcctctgccgaaaagtagtatattaaacagtacgggagctcaatgacattgatcagaaaataagagggaggatggtggggattgctgttcattttgtagggattttccctttattttcgttatggaaaatatgagaaatgaaattaaaaaaaaggaaggaaaaggccacccgctgggccgctaccaggcctgttgggccgagcagcccagcagggcagccagcataggcctgggcggccgtagggcatgggcaggggtcacacaagcgagagtgcctgggtgaccgcaaggctgagcggacgagcgcaggctcagccgcgactcgggcggcggcggcgcccaactgccgatccgcttcctccgtgtaactggcgaccgaatcttgcgcccacgatggatcggcctctggtaaaagctcctgctcgtctcctttacataagtgaggtgattccccttgctcggcataggctagagttccagagactggaaatcttggctcctcccggccggcttctccgctgctcctctgcaaccacctgcggctcgcccggctccataagtatagcgtcttgccccctgttcaggccagctcgcaggacgcaatctctgttcttcttcccctctcagttacagtcgcgatttggagcgatttgttcgttcctggtgttcttgtggcgattcttgccggtggtgattgggagtggaagagagcagagctgcgttggaggctctcttgtgccctgtttaatttccaaatggacctgtgtagctattttacatgtttacatgtcttagaattgctactctgctataattacatatggcatttatctgagttatatgcctattcggaattagaatatgctcgatccgggcgccatgggagcctgctgggccgctgccaggccgcttggccgagcagcccagcagggcagccggctggtaacaaaaggtagggcacgtcgtgccttacgcaggggaggaggcaagcggccagggggcctgtggcggcggcagcttgtgctgttccgatctgggcggcgtatcctgccggagctctcgcgatatggttgctgctcctcctctcggctccatatatggaggcttgttcccctggctggctctccacgggagagaagctggttctgtgttcttctcccactcactgtttcaatcgcaactcgctcgatccactgctccaccagtggctgctccacggaggttgtgctgctcgtgcgcagtgaggatctcaggtgctctattgcttcaccagtgcgcgtgtgtgctgcggttgattctctggtgtctgtccaccgtggcctggtgcttgggctccctgctgcgcggtgttcctcttctcgggccggtgccgtggacgtctccctcggctccggcagcggctctagtatctccgtcaacctcccgccgtgcagaatgtttaatatatttaaatatattggaagcatgtcacttatttctctaaatttacaacaatccagaaaaccaactcgtataatggcctccagttctgatgtcattaagcctgaagcgttcgacggcgcaagctttaagcgctggcagattaagactcgcatgtggctcactgacctaaaattattttgggtagtgacgtcggctgttccccaggctgcatcagatgattctgatgatgcagcgaaggccgccgcactagcggagaaggccaagtgggacgaagccaatgaggcatgcttgtctcgtctgctgaacgtcttgtcgaaccgcttatttgacgtgtactctggttttacctccgctaagggtctatggactgaacttgagaacgagttctctgaagttgacaatggcaatgagtcattcacaacggaaaactaccttaactataaaatggttgagggaaggtctgttatggagcagctacaggagattcaactccttgttagggacttggtccaatatggttgcgtcctaccaaacagttttcaggtgaatgcaatactggcaaagctcccgccttcttggcgagactttgtgacttcacgccgtcacatgaagaagcaaatgactctcactgagttgtcagctgcgataaatgtggaagagcgtgcaaggtccagtaacaagccatcccagcaactccaggctcacgttgttgagaagggtggagatagaaaattccagaagaagaagaagaactctccacagaagaatatgaaccaacctaagtccaaaaagatgaagaagaaaaaggaggactttatctgctacgtttgtggtgtctccgggcatacagctcggaggtgcaaacttaggaagggaaaaggtcctccacctcagcgcaaagaagggaacgtggtggttaactccaccctagggtatgcacctcaggcctttatggcaagtccatcagatgactggtggatggattccggtgctactgttcatatttgtgctgatcgatccatgttctcttcattccagggattcaacagcgcaccagtcttgatgggaaatggtgttccggcagcagttcgaggtactggacaggtctacctgaagttaacttcaggaaagacgctcgtgctgaaggacgtactctatgtgccctcgatgagccggaacctcatttcagtgtcgctgttatgtcgacagggtctcaaattagtgtttgagtctaataaagtggtcctgtctaagtttggtacttttgttggaaagtcatatgagtcaggcggtttgttccgtctttctgttttgaacaatcattcttcttaccatgttaatgtggtctgtaataacgattccattaataatatatggcattcccgtttgtgtcatgtgaattttgaggccattaagagattaagtgacatgtctttaattcctgaatataaacatgttaaaggtgtaaaatgtggtatttgtgtgcaagctaagcagcccagaaaaccgtttcatacggttgaaggcagaagtaccactcctttagaactaattcactcagatatctgtgagatgaatggtataatcacaaaaggcggtaaaagatactttcttaccttgatagatgatgctactaggttctgttatatttacttactcagaactaaagatgaagcactagaacactttaagatctataagactgaagttgaaaaccagctagacatgaaaattaaaaggttacggtctgatagaggaggtgaatacctttccaacctttttgatgagtactgcaaagagtgtggaatcattcatgaaaccactgctccatattcacctcagtcaaatggggtagctgaaaggaagaaccgaacggtgtgtgacttagctaatgctttgttacaaagtttggggatgcctgacatctggtggggcgaggcagtactcacagtgtgctatgtcctgaacagggtgccgcctcgcaaccgtgaggccacgccctatgaaggatttaaaggaaggaagccagatctttcacatcttcggacttggggctgccttgcaaaggtgaatgtcccgttgccgaagaagagaaagctaggccctaagaccgtagactgtgtcttcctgggttatgcacataacagtgcagcttatagatttctagtggtccattccgagacaagcgaaatcgctgtaaatgtaataatggagtctcgggatgtgacattctttgagagcatcttccctatgcgggataaggaagtagtagccccagatggtccatctcggacatattctctgccctcgagtgtccatgaccagactccagatttggagttaaggaggagtaagagacaaaggactgaaaagtctctgggtgatgattatattatttatctagtggatgaagaaccacgctccctcacagaggcatatacatctccggatgcagagtactggagggaggctgtccgtagcgagatggattcaatcatctcgaacagaacttgggagataattgatctcccagctggttgcaagcctgtgggctgcaaatggatctttaggaggaagaggagacctgatggtactattgaaaagtacaaggcccgtcttgtggctaagggttttactcaaaagaaagaggaggattattttgatacttattctccggtggctcgattgcccacaatccgtgtgcttttagcgctggcagctgcgtataaacttcttgttcatcaaatggacgtaaagacagcattcctaaatggagagctggaagaggaaatttatatgcagcaaccagaaggatttgtggttaaaggacaagagagcaaagtgtgtcgcttgattaaatccttatacggtcttaagcaagctcccagacaatggcatgagaagtttaataattctttgactactgccgggttttgtgtaaacgaagccgacaagtgtgtgtattatcgcttctctgggggcaaaggtgttatcatgtgtttatacgttgatgacatattgatatttgggaccgatttggaggctatcatggagacaaaattattcctctccaagaactttgatatgaaggacttgggtgaagctgatgttatactgaacatcaagctgataaagggtgaggatgggattactttgtcacaatcccattatgtggaaaaggtcctgactcgctttggacatatggactgtaaaccagtcaccacgccctatgatccatcctacacgctcagtaaatatgaaggtgagcctgtgaaccagctactatattcgcagatcatcggttctctcatgtacctgagtagtgcaactagaccagatatctcatatgcagtatgcagactggctcgttattcggccagtccaggagatagacactgggtagccttgtacagagtgcttcagtatttgaagggagcgatgaatcttggtattaaatataccggatttccgtcagtacttgaaggattcagtgatgcaaactggatctctgactcggatcaaatgaagtctacaagtggctatgtgttcactttagctggtggggccgtgtcatggagatcgtctaaacaatcagtgtcgacacgttccaccaaggaggctaaattagttgcacttgattcagcagcattggaggctgaatggttgagagacctgttgtcagaccttccaatgctagcaaagccgataccggctgtcttagtatactgtgacaacacttctgtgttgctgaaagtgaacagtagaaaggacaaccaaaaatcctcgaggcatatcagaagacgacttgattcatgtcggcatgctagagagacgggtgtaataaccgtagattacatcaagtctgaaaggaaccttgctgatcctttcaccaaagggctggctcaaaagccaatccaagcaacgtgcatgggaatgggactcgttgagcgatatgctcttaatgaagtcaatgctttaagcagggaaattgtcctacagaatttccttaatgatttcacctatatgagctaa

SEQ ID NO: 15201 - DNA, 1747 bp, Zea mays
  Clone ID: MRT4577_113868C.1
cctcgagtcctgccggcttctccgctgctcctctgaaccacctgctgctcgcccggctccataagtatagcgtcttgccccctgttgccgggagctcgtagagacgcaagtttctctgttcttcttcccctctcagttacagtcgcgatttggagcgatttgttcgttcctggtgttcttgtggtgattcttgccggtggtgattgggagtggaagagagtagagctgcgttggtggctctcttgtgccctgttgctcgatccgtgcgcctgtgtggtgttcggtctgttctgattattgtccaccgtggcctggtgcttgggctccctgctgcgcggtgttcctcttctcgggctggtgtcgaggacgtctccctcgactccggcagcggctctagtatctccgtcaacctcccgccgtgcaggtccggacgtgggcggcggaattggttttctgggacagaacctcgtgttcgctgagctggtcttcccacgtagacaatctacgtgctaaaaccaattcctattatggcctccagttctgatgtcattaagcctgaagcgttcgacggcgctagctttaagcgctggcagattaagactcgcatgtggctcactgacctaaaattattttgggtagtgacgtcggctgttccccaggctgcatcagatgattctgatgatgtagcgaaggccgccgcactagcggagaaggccaaatgggacgaagccaatgaggcatgcttgtctcgtctgctgaacgtcttgtcgaaccgcttatttgacgtatactctggttttacctccgccaagggtctatggactgaacttgagaacgagttctctgaagttgacaatggcaatgagtcattcacaacggaaaactacctcaactataaaatggttgagggaaggtctgttatggagcagctacaggagattcaactccttgttagggacttggtccaatatggctgcatcctaccagacagttttcaggtgaatgcaatactggcaaagctcccgccttcttggcgagactttgtgacttcacgccgccacatgaagaagcaaatgactctcactgagttgtcagctgcgattaatgtggaagagcgtgcaaggtccagtaacaagccatcccagcaactccaggctcacgttgttgagaagggtggagatagaaaattccagaaaaagaagaagaactctccacagaagaatctgaaccaacctaagtccaaaaagatgaagaagaaaaaggaggactttatctgctacgtttgtggtgtctccgggcatacagctcggaggtgcaaacttaggaagggaaaaggtcctccacctcagcgcaaagaagggaacgtggtggttaactccaccccaggggatacagcagcgcaccagtcttgatgggaaatggtgttccggcagcagttcgaggtactggacaggtctacctgaagttaacttcaggaaagacgctcgtgctgaaggacgtactctatgtgccctcgatgagccggaacctcatatcagtgtcgctgctatgtcgacagggtctcaaattagtgtttgagtctaataaagtggtcctgtctaagtttggtacttttgttggaaagtcatatgagtcaggcggtttgttccgtctttctgttttgaacaatcattcttcttaccatgttaatgtggtctgtaataacgattccattaatgatatatggcattcccgtttgtgtcatgtg

SEQ ID NO: 15202 - DNA, 285 bp, Zea mays
  Clone ID: MRT4577_113869C.1
aacgggagcagttttagtggaagaagctcaggcagtccctatggtggtggctatggatctggaggtggaagtggtggatatggtagcagaaggttttaaaataaaacaaacggctacagttcttagcagtagagagagcgaggagttgtcaggaaagctgcaggttactttgagacagtcgtcctaaatgcattagaggaactgtaaaaatctgccacagaaggaacgatgatccatagtcagataatgtactgcagcttaaacaggaagcccttctgttcagga

SEQ ID NO: 15203 - DNA, 495 bp, Zea mays
  unsure (1)..(495): unsure at all n locations
  Clone ID: MRT4577_11386C.1
ccggccgggcaacatccctcatccatcagcatcaatagcaaacatggcgcgtggatggtttgtcaattgcgccgctgtcctcttggccttgaccgccggagtcgacgcgtacactgttcccgccctctccgctcgcgccaaagacagtggtcccaaggccgtcaacatcagcgtgcctgtcgatcatttccacaatgagaccatctatgagcctcactctgacaaaaagttcccattgcgatattggttcgacgcccagtactaccgaaagggcggtcctgtcatcattctcgcgtcaggtgaaacttcaggcgaggaccgaattcccttcctcgagcatggcattctccagatgctggccaacgccaccggcggtatcggcgtaattctcgagcaccgctactatggaaccagtttccctgtgccagacttgaagcctgagaacatgcgcttcttgtcaactgagnaagnccttggcgacacggnttactttgc

SEQ ID NO: 15204 - DNA, 272 bp, Zea mays
  unsure (1)..(272): unsure at all n locations
  Clone ID: MRT4577_113870C.1
tcggaccacaccttcttggtttcacttcggttggctggcattttggcccggccggtcggttcgaaaccttgcgaggcccgaccatgggcaccggcccggggtccgtccaccaggaactcgacaaggcttgcgcccagggtggcaaggttgacccgaacaagnngaaccagaaagtccggttcattaaccttgtgtcacgcttccttaatggggaaggcggaccaaatcggttgagccaggttcagaccccttccggttagggtgggggggcc

SEQ ID NO: 15205 - DNA, 480 bp, Zea mays
  Clone ID: MRT4577_113871C.1
cggaatgctgacaagtcttctcatgaaccaagattgcgtttaaagtctttcttcggctcattatatatatgccgagcagggggagcaagagctgttctacagccctatcctgataatgtgaagcatagtgaaatgatcgtgacttttgccatgcctgctggttttgctggcggagtgggtgctgactggcctcatatttcaaaagcgaagaaatcctaccttgttctcacttgtggaccaccttcaggtactacatcactttcaaaaggtaaaggtgaaaatggagactgcgtgcatccatgatgaccataatgagagcagcggccaagatggctacagaacagtgggcatatatgaaaggaatatgccgttgaagcggcttaatacgaaaaagaactgcaaaagcaatgactggctcctgagaaaaatggagcagatgataaaaagaggacatgatgtgcccgtcgacaccaaatacac

SEQ ID NO: 15206 - DNA, 414 bp, Zea mays
  Clone ID: MRT4577_113872C.1
gtgtgtgggtgtttttttttttttttttttttgtgtttttttttccatttttactttttttcttttttttttttttctttttgccaaagggatccatttaccaaaaaacatcgcccctagcatgttttaaaaacaaaaccacaccttcatttggggggggggggggactgttttcttgaattggaacaacccccccccccttaaaaggaccaaaaggcaacccgccaacaaggaaggaaaaaacatccccccccaaaaaaaggtaagggggcaaccccacaatcatcccatttaaaacagaaaggcccaatagggagctgcgccctcattccatttccaccccaggccatacttgtgggcccacccggggcctggggcctcgtcctgaggccgacccgtctggaccatgcggcc

SEQ ID NO: 15207 - DNA, 214 bp, Zea mays
  Clone ID: MRT4577_113873C.1
tagtgaacgggaacccctcttactctacgtcaccgcagccacctaggtggtagtgaacgggaacccctcttactctacgtcaccgcagccacctaggtggccaagaccactttacttccttagtgaggtattgtctgaaacaaaggtctgatacccacaagtccaaaaactattatacgtggtagtcctggctcgtcgaaaactatgacactac

SEQ ID NO: 15208 - DNA, 557 bp, Zea mays
  unsure (1)..(557): unsure at all n locations
  Clone ID: MRT4577_113874C.1
aaaatgtcctacttgtacctccatacaacctttttaaataaacctattttaatttaattaatgactttaaaaactcatttatatctatttcaatacatatatgctattttaaaaccattatctgactcattaatacaactcttaccaatgcaccagacctgcccttcttcattatcactttattgatcatcaatttttgatagcataacatatactcctttcttatcattttatttcacataacttattttttttattttggtggtaaaatatatataaaacatataaatctaaattcttttaaaaactataattatcagtttcttaacccttacattgttattttatgccataatcatttcaatacaatttcaaatataaacttattcatttttnnatttctttaaaacttaatctcagattaatttctcatctattattttattaaatcacattttatatttcactaactttttaaataccttaattttataattttattatcaaaaatatattattaattttttttatttttacttacataattattttatttt

SEQ ID NO: 15209 - DNA, 371 bp, Zea mays
  unsure (1)..(371): unsure at all n locations
  Clone ID: MRT4577_113875C.1
ttttanccgaccgacaatccaccatggtttggggaagtaaagttaagggacggaattgaaggcagcgcttcgttggagaaaagttaacatgccaacattcctacttcaccgtccaatctaataccatagaaccagtggtttttacacacccaaacaagcctgattcccggactaaaatgcatacagctgcacaaaactgctcactcgcaaatactaggggggcattaagtgtttatgcctggattctagacaccgggacgggcaattacctgaacgtaacttaggccgacaacacttaggagggcgcggccctggcgtttggggggcattcacgacgttcattaggcggacgggtttgcgatgggcgtgct

SEQ ID NO: 15210 - DNA, 512 bp, Zea mays
  Clone ID: MRT4577_113876C.1
gtagcaccaaagacctcccaatttgccttaccacagatgctttcagtcgggtcggaaaagaagtgtgtatttacagaatcatcatcacggcagattggatggacctaagcctagactgaatttcaacatgcttcgaagattaaaatggaaattgatgtgccgagggatgtctaacaaaagcagtttacaaaccgtgaccatgtgcataccttatgaaaacctgatacttccaccactggtgtaaccataaattcaggtgctgaagttcatccgggttcaccaactggaaggatctggtatacatgagcgcatcctatgaaatcactccactgatacgatgagttgccaaggttcttcaaaaccttcgcttccatagctgctcggctgtctgatttgcactgcacagagatcttgccaatatcataatgttgcctgagtatgaggttttcccatgagttgctaccatgcatacaaaagattcaattctggggacattacgttggaattcactc

SEQ ID NO: 15211 - DNA, 241 bp, Zea mays
  unsure (1)..(241): unsure at all n locations
  Clone ID: MRT4577_113877C.1
taccggtaccgccaattcccgggctttctttcctctagtacgccgccgttgggnagccctgcttcggngagaccccaacccttatcaaaccctaaatcaaaactacccaaaaaaaccgcaaaaccagaaaaaaacccaaaatcaccacttgattggagatggcgacgcaagggcaagcggcggctggatccgcgtccgagtccggcggctctccggctgccttagctgcagcagccgcggc

SEQ ID NO: 15212 - DNA, 278 bp, Zea mays
  Clone ID: MRT4577_113878C.1
aaaaaagggcgggccacgccacccgtccccaccacttactaaaaataacatccaaattctaatcaaccaaaaaacaaaggggccgaaaacaatttttttttattccaaaccaaaaaaacaacccaacctggacgcctgacaaaaaaaaggctgaagtttcaacatacagcaaggacgagacttaagattattgctaaaaccaagtcattacaaacaacttacaaaaacaaaacaacgtcacatggaataccctaagaaaaaaaaggtcaaaccacttc

SEQ ID NO: 15213 - DNA, 246 bp, Zea mays
  Clone ID: MRT4577_113879C.1
ggtggatggataacttagtgcaaggtcacttaattatacaacttattatttgtatttcattctctctactaataatttttatatcaaatcatgaactcgttgttcattacatagattttgtatcatgatatcatcagtcattacgatacctattgattatgagaagaacatctatattagagatgaaacccgcgggtaacccatgggtacccgctaacccgatgggtacgggtttgggcaaaatct

SEQ ID NO: 15214 - DNA, 857 bp, Zea mays
  Clone ID: MRT4577_11387C.1
cactccatagggcgattgggtccgcccaggccggccgggaccccacaaagcaagaaacaatccttgcacccctcccctgcgtcaccccaccatatccggccagcccaacgaaaatgtcgcgcgccacagctgcggtcctcttctacatcctcgccgtcgctgccctcagcgcggccgaggcaccggcagagtcaccgaaggcaggcagtcctgccaaggcaccggccgagtcaccgaaggcaggcagtcctgcagctcctgccaaggcacccgagtctgctgccacgagaactgcccccgctaaggcacctcaagccgcctccacccccgccgctgccgctgccccatcgtcgtcgtcgtctaggaagtctggtccagctgccgcgccgaccaccgccgcctctacaccgtcttcttccacggacgaggagttgagcccttcgccgtcggcatccaccgccgaggtggcgtcccctgccgctgatgggcctgctgagggaccggcggctgctgatgcctccggtgctgctacccttggaagcggagctgccatcgctggtgtcgccgctgctgtcgctaccatgatcttctactgagttcaccagggaccgtgtcgtcgagggtgggcacgtagttggctgtgcggtaattgctcgtctggtcgggagggaccaataacgcaagtgttgctttgctttgctcacttcgtttgctcttgtaactttatggggtcaaccgttatataactgaaacgatttgattaattgatactaaaaaaaaaaatttgtcatgcacaaaaaaaaaaaaaaaatttgcggcccattttttttttttttttgtaaaaatgcgcggacaaa

SEQ ID NO: 15215 - DNA, 280 bp, Zea mays
  Clone ID: MRT4577_113880C.1
attagtcgttacagatcataactagcttttgttcgtcgccctatcacagtctcgcagccgccgcgatctgctagcccccgaaccctagctcaatgggaaccgccgcttctccttctccctcactttccctagacacagccgcctcccgtcctgatcctccttccccggaggccaccgctacaccagccaaagaagatcaccagcactccgcctccgacgccgcgaccgccgcagctggcggcggcgcagacgatgcggcggcggctccttctgttggagg

SEQ ID NO: 15216 - DNA, 511 bp, Zea mays
  Clone ID: MRT4577_113881C.1
caaatattcatgtgctgatagtaagaatggaaaattcccaaatgaacagaccaactttgagccttctgggaggataaattactctgtatcagagaatttagatggagcatcactcagtgaagcgccaattcctacagatgagcaagcaataataaccacaccacctacaaagtttgttacagctgctgaggatgatagtactgacgtgaaggctttacaaaggaaaatgtcttctattgccaagaaaaaaacgacttctaaggaagattgcaaagtcaaattgtgtggtaatcgggagtctaaaggagacacaaagcctcgaaaacaagtaatcaaaccaagtaaagatgagctgagggaagctgtctttcttatcttggatactgcggactttgccactatgacctttggcgatgttgtaaaagaagtcgacaaatactttggcaaggatctgtttgagagaaagccactaataaggtcgcttatagaagaggagctctttaggctagca

SEQ ID NO: 15217 - DNA, 517 bp, Zea mays
  unsure (1)..(517): unsure at all n locations
  Clone ID: MRT4577_113882C.1
ggggggcaacantggantttaatcgcttcggggccaacagagaccaccctctcctcccaatcattgggtatactgaaactcttagtccctcaacaaacactcnnnttcacagggggggggtgccttttgaccaatttttgggaatatcaagtctaagctggcactaaagctcccactaaagctaccaccactttttctcacttccatttcacaatttaccaagaatggggaagtccaggcgatcggcggacgtcggggccttacaggttggccccctcagcctggggttccttcttctcacgcttcttttttgggttcttctggtgatgacgccttttatacttcttggggcgcttctttggggatggctcaaatgggggatgggcaaaatctttacccgcgtcagactgagggcaaggttcttcttcctgaaaagctggcctcgggtcacttggggccccctcaaacaggtcttcaaagctaatataatcttctatacgggttttacgagcttttt

SEQ ID NO: 15218 - DNA, 277 bp, Zea mays
  Clone ID: MRT4577_113883C.1
gtacttaagggcaccaggcctgctcacagggggacccaactaaaatagctcacatgacaacaaaaaaatacgaatgcaaggaattgcacaggaaataccggcaacacgacgattaagaccacatcaaaggcaaaagggtggagggcgggcgagccatcacacaattaatttgcctagcgacaatgagcccccttcaagatccgcataacgctgttttttgtgaggcccaagcctcactgcataaggccgggtaatactgatcgtgcgatccaatggc

SEQ ID NO: 15219 - DNA, 586 bp, Zea mays
  Clone ID: MRT4577_113884C.1
cggacgcgtgggggttcctctttccaccagatcgctcactgcttgaacagctctcacttccaggttgctgagagagtattatttttctggaacaatattcacttcgagaatttcgttaagcaaaacagtaaggtgatcctgcctatcatcctccctgcattggagaaaaatataaatgggcactggaatcaagtcgtgcaaagcctcagtctgaatgtccgaaagttactctccgatcgtgaccctcaaatgtttactgaatgcttgcgaaaatacgaggaagacaagggcagggagaaggaatttaaactgaagcaagagttggcatggaaacgtctggatgagattgcatcagcaaaagtcacaagtggtgaggctgtccttgtgtctccaaccttgcctcgtcaaccttcattcttgtagcaacctgcactgaatgagtggtccttgcagagtcgttagacattgtacaggattgggttgtagataaaagggggtatatgaagcctttcaaggctgtgagcgaaattgaagaaagagatctgagaagccaattgtgcatcattttctgtaaatcccatgccat

SEQ ID NO: 15220 - DNA, 1050 bp, Zea mays
  Clone ID: MRT4577_113885C.1
attccatttgatctaaatgagcttcctttagatgagctcgatgaagacttccaggagccggatgatgctaatgagctcggcctcaacgatgtgctgttggaaaatggcaacgattttgatttgaacttacctctagatgagtttggcgcggttgtagagaaccaccgacgaaaagagatgacaaaagatatgaggaaacaagtgtaccaagcgttgttggctagaagcaataacgggagactccacaagaaagatacccaaattgttgccaaccaatttgatctccaccttcggtcagtgcagcgcgtatggaacagaggtaaaatacaacttgcaaactcggtgccggttgtggttgctagtctaaaaaagggaagagttggtcgtaaagcaattcctattgatttggaagttttgcgtaacattcctttaaaggataggatgaccttagaggatgtttgtgccaagctaaacatgagtaaatggaaggtgctaaggtatttgaaacaaggtttgcttaggcgtcattctagtagcatcaagccctttctcactgaaggaaacaaaaaaactaggttgaagttttgtattgacatgattaagagggggttgaatggtgatccaagctttagggattttttttgacttcgttgtcattgatgaaaaatggttctacctatcccaaaagtctgaaaaatattatttgctccccgaagaagatgatccacataggacttgcaagaacaaaaactacttccctaggctcatgtttctcgctgtttgtgctagaccgaggtttaaagatgggcagtgcatttttgatggtaaaattggatgttttcctcttgtcaattatgaaccggctataagaggaaatgctaaaattggcccccccccgcgaaatatggttatgaagcccattcaaagtatcccaagagatgttattagagaattcatgattaacaaagtcttcccggccattaaaaaaaaaaaaaaaaaaaaaaaaaaaaaaaaaaaaaaaaaaaaaaaaaaaaaaaccccccacacccc

SEQ ID NO: 15221 - DNA, 183 bp, Zea mays
  Clone ID: MRT4577_113886C.1
caaaccaagttctccgaggtcttgagagctttaggacaagggcgaagtaatttgggcaacttagctggcttgggtaatcttggtggtggacaaggtcttggtggtttaggacaaggtcttggcggcctcggaaatttggctggcttaggcggtgcaaatcaaggcttaggtgctggtcaaggt

SEQ ID NO: 15222 - DNA, 243 bp, Zea mays
  Clone ID: MRT4577_113887C.1
ctcgcagcgccggcgctccatcttcccctcccaaaacaacggaaaactgcaacactgttcaacgtgatacaaccctcaggctctaagtgcaagcaaaagcagataccaatggcgactctccatatgaacatggcgccctaccaaaaaatgatccacaccacgcccggtgatcaacaggtgagctatcaagccacacagtagaaactggattgctatattcaactgcaggggccacggcctacc

SEQ ID NO: 15223 - DNA, 541 bp, Zea mays
  Clone ID: MRT4577_113888C.1
cacataccaggaactgagagcgagggggacgctggtggcagcgtaactaccatagctggctgccacgggctggggatgcacagctggggcgctgcgcgcgcaggacggtcacatgaatacccccttagacaacacacgccccggcggctacccgctctagtatacctggagtagcagcagggctggaccctgaccggggagctcgtctacttcaacctgtgggcagcgcgcccactagaaaccaacccatacggctgcagtcctgccaacattatatgaggatgacggacgtacataatgttatgaatgatcttattatgataataaagcttgagcgtgccgctatcgacatatacaacctgactagagctagtctctgaaggcagcgagtagcaccaggtgttggcatatcgagggattaacctcatggatctgattatagatgagaacatgccaggcttgggtgtgctatagcattaccagttgtaccatttctatataaaggcctgctacattttcggtggcaatgcgacgtactact

SEQ ID NO: 15224 - DNA, 340 bp, Zea mays
  Clone ID: MRT4577_113889C.1
ggcaacacacatattagaaccgatataaggaaacctttaaacacaggcatgcatggcacgtcgaaaaaggtgccggatcatgccgatacaccggtcagcgagaaggccgagaaaggtgctgatagagaacatacagcatagcgcctacattacatatcttgctgagggaccatgacttctttatgttttgattagcatgttcactaaactcgtctcaaacttctccagtgtgttgtacgccctcatcttctcaataaggacaacatgagccatgagcatacgcctgcagcagtagcgtaacaatgccaaagcattcatagcatccccttcttagaagtcg

SEQ ID NO: 15225 - DNA, 371 bp, Zea mays
  Clone ID: MRT4577_11388C.1
cgaaattggtttgcttcctgccctctccacctttttgttgcgcaacccgccggccgctgctccccacagaatcggcctacaaatcgagcaaggctcagtctcatacctcatagagtccaagaattgttgggaattagcagtccgcccatgcgttcttcctctcctcctaagcatcccgtctggtcgtcgcccgggcccggcccaccattgttgttgcccgttgatatgttcccgtactgctgctatctatctgtcccccttccaccatttcttgttgctgatgacataaaggttagagccgtagagatgatatatttttagaggtgtaaaaaaaaaaaaaaaaaaaaaaaaaaaaaaaaaaaaccacccac

SEQ ID NO: 15226 - DNA, 454 bp, Zea mays
  Clone ID: MRT4577_113890C.1
cggacgcgtgggcagctggtaaatcaacaaaatgcaccagtttcagtttctaatacaggtatagcaagagcaagtttctgctgcagcactcttaataagaatgcatcgttgtctgatggtgatagctcgcacaataggcgctgggacacaattcggtctggtcatattgtttcctctcattcttcagatagcactatgctatcaagaccagccagtgcagtatcatccactgatgtggcatctctgcatagaaaggaaaggagacaagcttgtcctcctggatttgagaagcctcatctgtactccggttcaggcaaagcttgctctggacattgctctgcacctgatgccctggtacaagattgtggtattccagatcaacaagaccttactagcttgactacagattgcctgaaagatgatggagatgtcacacaaaatctaagcatgaaca

SEQ ID NO: 15227 - DNA, 1056 bp, Zea mays
  unsure (1)..(1056): unsure at all n locations
  Clone ID: MRT4577_113891C.1
gtaccctncgaggcttgnccggcactatcattcctagtctaacagttgtactaagaaatctataaagataatatccagcactttcagtacaggaaggctctcctcatgtaatattgtttttttaaagtcctaatttaatcttatggttactttcagttacatgaggatctccctgtatattattgtgcttgtctaaattcccaaatttaatcttatgtttgttttctttggtcaaatatcacatgctggcgtacccatcatgtgttgtgcatttctgctttgattttgatcttgatttacatttcaatttcatcgcaatgtatttccatcaatttgtgctcaagtgcctacagtttcgagccctgaggtctggtcaagattgcaggttcttttttccaacatgtgtttgttatggtggttgtagtgcatatgacaattgaagggcggaagcagatggtaggggttaaatgggatgatgatgccaaaccttgttgcaatggagcacatgtttatgaagcaacttcatccccgaggagccgtagcctgtcaaaggagatcgcaacagcagctgttgcttctgttttcctgggctttgggtctctgttcgtgctccttgcaagtggtgtttatgtttgacgactgcgtatggggccgtgttcttggattcagcatacttagggcatgtacaagtctgagactccatttcgattttctatgtacaagagagactgtatgacataaccttgagactcagtattataaatgcagttaatagacaacatgcgtagagtcgtaaagagacggattcttcgcgaagagctcgtctcttgtatttttttcttcatatagccccttagagaccctcgtctcttgtatttttttcttcatatagtcccttagagacctctcaagagaccctatattaaatagggttgtacatgcacttagtaattgattgtagcatatgccagatcctgcttgtgttgtcctaacggatatggagcatttgaactttcaaactttctagaacaattacgaaagcaaccgagttacagt

SEQ ID NO: 15228 - DNA, 195 bp, Zea mays
  unsure (1)..(195): unsure at all n locations
  Clone ID: MRT4577_113892C.1
tgtctgataacaaattatactctaactgacgatgacttttgaagcaaagagggcttacttataccnaatcttaccccatatttttcttgttttcaaaaaagctcagttatgttcctgtacactcggactcagtcctacatttaatgattcaaatggaatccatattttttcacctaaaataaatttacaatatat

SEQ ID NO: 15229 - DNA, 1275 bp, Zea mays
  Clone ID: MRT4577_113893C.1
aatttcccattaataacatttacagaattacactgacgcgtgggccggccgggggctctggtcgtcacaaagttgtttgtgcatcgcggcggcgacaagggggcgacgaggcaggcggagcgggcggcgactacagcggcagcagatctcacggaatggcggcgaaggcaatctcgagccccgtgccggtggagtggtacccgacgctggccgtcgtcatggtatccgtaggcctcatgttcaccgcctccttcttcatttatgaagcaacttcatcccggaggagccgtagcctgtcaaaggagatcgcaacagcagttgttgcttctttcttgggctttgggtctctgctgcttcttgcgtgtttatgtctgatgactctattgtgctttttaggagccgtagcctgtaaggcgggcgctccgacgcgcccgggtgaatctggctccgctcgtcacaaatccgtctgtgcatcgcgtcggcgaccaggaggcgacgaggcaggcagagcgggcggcgactacagcggcagcagatctcacggcatggcggcgaaggcgatctcgagccccgtgccggtggagtggtatccgacgctggccgtcgtcatggtatccgtaggcctcatgttcaccgcctccttcttcatctatgaagctacttcatccaagcggagccgtagcctggcaaaggagatcacaacagcagctgttgcttctgttttactgggctttgggtctctgttcgtgctccttgcaagtggtgtttatgtttgacgactgcgtatggggccgtgttcttggattcagcagacttagggcatgtacaagtctgagactccatttttctatgagacagctaagagactatatgacataactttaagactcagtattataaatgcagttaatagacaacatgcgtagagtcgtaaagaggcgggctcttagcgaagagcttggctcttgtatttttttttcatatagtcccttagagaactctcaagagaccatatattaaatagggttgtacatgcacttagtaattgattgtaggatatgccagatcctcgaagcttgtgttgtcctaacggatatggagcatttgaactttcaaactttctagaacgattatgggagcaaccgagttacagcaacggttccatccaggtctgcattatatatcatcaatctaaatccctgttgcctatgttaaaaatgcgtgcgtgcgtgccgcaatcgaaccgttgctgtatagaaaaaaaggcccctagga

SEQ ID NO: 15230 - DNA, 271 bp, Zea mays
  Clone ID: MRT4577_113894C.1
atccttttttttttttttttccaaaaaaagggggcctttttcatttccttggggttgctttgcttttacacgaatcgatcgatcgaaaagctagctgaaatagtagcgacatcaatttaaataaccaaccaaccaaccggtcgaaaagtctttagttgcataaaagaagatagccagtgtcgggagtaataaacacacgctaaagaagcatcgaacctcgactccaacgacttaatcggcaaaaaacagctagcttgtacagagagagaga

SEQ ID NO: 15231 - DNA, 1142 bp, Zea mays
  unsure (1)..(1142): unsure at all n locations
  Clone ID: MRT4577_113895C.1
cggccggggagtccgtactacccaggcaagcgatcgtcggagcagagagagacttcctcgcctccatcccatcccgccgccgccgtctctacggtcgctaataagccgccgcatccagggatggagatgaagaagatcgcctgcgccgtcctcgtcgccgcctcggccaccgtggcgctcgccgctggcgccccggtgggggggggggttncccntctnctttttattcatgaagcaacttcatcccgggagagccgtagcctgtcaaaggagatcgcaacagcagttgttgcttctgttttcttgggctttgggtntctgttcgtgcttcttgcaagtggtgtttatgggggatgactggatatgggccgtgtttgcttgtgttctggatcccgagttggagacttggttatgagagatnctcaaagctgttgtgctaacgaatatagaggatttgaacttattntagaacgatgtgtgggtcgcgtcggcgaccaggaagcgacgaggaaggcagagcgggcggcgactacaacggcagcagatctcacggcatggcggcgaaggcgatctcgagccccgtgccggtggagtggtattcgacgctggccgtcgtcatggtatccgtaggcctcatgttcaccgcctccttcttcatctatgaagctacttcatccaagcggagccgtagcctggcaaaggagatcacaacagcagctgttgcttctgttttcctgggctttgggtctctgttcgtgctccttgcaagtggtgtttatgtttgacgactgcgtatggggccgtgttcttggattcagcatacttagggcatgtacaagtctgagactccatttcgattttctatgtacaagagagactgtatgacataaccttgagactcagtattataaatgcagttaatagacaatatgcgtagagtcgtaaagagacggattcttcgcgaagagctcgtctcttgtatttttttcttcatatagccccttagagaccctcgtctcttgtatttttttcttcatatagtcccttagagacctctcaagagaccctatattaaatagggttgtacatgcacttagtaattgattgtagcatatgccaaaaaaaaaaaaaaaaaagcggcc

SEQ ID NO: 15232 - DNA, 426 bp, Zea mays
  Clone ID: MRT4577_113896C.1
ataaagcagcatttcaaatccgtcctcacgtagacgagatccgtgcgccgctcacctactccatgtcggaccagctcgccgacgaccagataggcgagttctaggaggccttcagcctcttcgacaaggccgttgagggttgcctcaccaccaaggagctgggcactgtcatgcgctcgctgggctaaaatcctacctaggatgatctccagaacatgatcaacgaggtcgatgatgatggaaacgatatcatcgatttcccagagtatctcaaccttatggatcgcaagacgaatgacaccgactctgaggaaaagctcaaggaggccttccgagtggttgcccaggaccagaacggattcactctcgtaggacgagctccgccatgacgtgacaaatcttgaagagaagctaactgatgaggag

SEQ ID NO: 15233 - DNA, 126 bp, Zea mays
  Clone ID: MRT4577_113897C.1
gagcttgaacagagatcagacccttaaaggatatactttaaaagtttatggacaggttgaaacaagtagccaagtttgaggacgggaattgtaatttacccatccaaatttattgacgtatcgaaa

SEQ ID NO: 15234 - DNA, 544 bp, Zea mays
  Clone ID: MRT4577_113898C.1
gttcgcttgtttattccaactgaatgtgagacgcggtacgcgcaggcgtaaaaactactactatacatggttgaaaaacaattggaacaatctatgggcgaaggcgtaatctgtgggagaagaacaccagctaacctgttcaatgctcataacactcaggaagcacaatgcgataagacagtggggcgctaggagggaggggcctaaccatgtttgacaaaggcgcactgatcattatcgacacaaggacccagtggtgaccattcttgtaatgaaggccgctaggatcaccaccatgaccaatggaccttgagcatggctagcggagatgttactccttagccaccacgatcagccaactgttgtcttgtaattgctggacctaatcatattccggtactccatggatagtggatatgcaactccttcaacattattagaggcagatggtttattgctatagatagaatgaactatattcgggatctcctgaccaaactctcgggatgatccctagaggcgcgctaaatacagggcacgtcac

SEQ ID NO: 15235 - DNA, 1615 bp, Zea mays
  Clone ID: MRT4577_113899C.1
gtactccctcgaggccggccggggaataaacaacgacacacagagcagcatttcgagtaacacagttgagcacgacgatgggatccctcgctaataacatcatggtcgtgggcgccgtccttgcggcgcttggcgtcggcgggtcgtgcgggcccccgaaggtgccgcccggccccaacatcaccaccaactacaacggcaagtggctcaccgccagggccacctggtacggacagcccaacgggtgccgtgggctcctagacaacggacggtgcgtgcagttatcatagaatcgtgaacgctgctcacccatacagggtgcatgacggcgtcgcggcaacgtccccatcttcaaggacggcaaggtctgtggctcatgctacgaggtgagatgcaaggaaaaacctgagtgctcggtaaatcctgtcacggtgttcatcacagacatgaactactaggctatcgctccctaccacttcgacttgagcggtaaggtcttcggttccctgataaagcccgggctcaacgacaagtttctgcactgcggtatcatggacatccagttcataatggtggagcgcaagaagcccgatgggcggacctcgcgccggggctctccagcacccccctgctaaaagcccacccacttcctctgatcctcttcaacccacccaccgtgggttcgtccagccttccggccttcccccccggtggtcatcacctcccccattttcgccgccccctccgatctcgccgttctcgtctccttccgttggattagggctcttcatctgttcgccgcacttcgtcagtcgcccatggcggatgaggaggtcactgatccaaaggcgctcctagaggatcgttcaaaggctaagtgtgtgtcgcagtggtatgattatcagaaatgtgttaaaaggattgaggacgatgagactgggcacaagcactgtaccggtcagtactttgattactggaaatgtgttgacaagaatgttgcagagaaactctttgagatgttaaaatgacaaattttccctccatttatccacctaaagttggtaataattgtatcacttgtgaggcctatagactattaaggcacttaatatttgtcagagaacttttgcctcttgggtaacacaaattttccactgccagtttgcatttcatttctgctactagtattgaaccagcaaggtttcctccattgctggataaaaatcaatggaatattcccaagattgtggctgagcattaaatgctatattgtaccttaattgcttttatggtgtattttgacgaggacatagctaatcattcaggtccataacttggatgagatggaataacatgtgtacattacttctagctggtggaaatgatttatcatgagaagtttgtagtatcattggaatgaaacattggcacagtatagttttttttccagatgagtgagttgatacgtggatgctgttatgagcagagcttgtggctatatattacagcatctcttgcatcgaaaaaaaaaaaaaaaaaagcgcctaaaaaaaaaaaaaaaaaaaaaaaaaaaaaaaaaaaaaaaaaagtactctgcgttgttaccactgcttag

SEQ ID NO: 15236 - DNA, 434 bp, Zea mays
  Clone ID: MRT4577_11389C.1
ctttgggctgatttatgtgcttggagtattcacaatcttaacagccccgttacccgcctatctcggccctgaaaaggctacgtgagaaaatctgcctcccggatggtgattattggctttatctcgtagcaagaagacagacactaccgccggagagttaacagagcccgattcgttaagtccgaagtaagaagtactaatggcattttacgatctacttctcgaatggaaggggcggttggttaccatattggacgggtcggatgaggttgtttagagacggtcccattagaagacgctagataaggcttagctcgcgacggagagatcgtggaaaatagccattaattccaagtagtgccgactcctactcactaggtaacattccgccgaatcgtcgaccaggacctcccaattagtccgagccggcggac

SEQ ID NO: 15237 - DNA, 320 bp, Zea mays
  Clone ID: MRT4577_1138C.1
taactacgtatctacctttctaagactctaatcttatgacactatttaacaaaatctcaaatttttaatttacatcaccatttatttacttcatttttttccaaaattttattaacaagaatccttgatccaaatccaattacggtatacaatatcacaaaagctgatcgaaataaaatactacccaaaacaatgtatcaattttggagagtctaaaacttactactatacttactagcacataaccaaacatatatgtatatgtaggaaagattcttttatggaagtatagaccacatgcatatatctaaatgaaacta

SEQ ID NO: 15238 - DNA, 618 bp, Zea mays
  Clone ID: MRT4577_113900C.1
cactcctatgggcgattgggtccctcgaggccggccggggtgctcaccacctcccccattttcgccgccccctccgatctcgccgttctcgtctccttccgttggattagggctcttcatctgttcgccgcacttcgtcagtcgcccatggcggatgaggaggtcactgatccaaaggcgctcctagaggatcgttcaaaggctaagtgtgtgtcgcagtggtatgattatcagaaatgtgttaaaaggattgaggacgatgagactgggcacaagcactgtaccggtcagtactttgattactggaaatgtgttgacaagaatgttgcagagaaactctttgagatgttaaaatgacaaattttccctccatttatccacttaaagttggtaataattgtatcacttgtgaggcctatagactattaaggcacttaatatttgtcagagaacttttgcctcttgggtaacacaaattttccactgccagtttgcatttcatttctgctactagtattgaaccagcaaggtttcctccattgctggataaaaatcaatggaatattcccaagattgtggctgagcgtaaaaaaaaaaaaaaaaaagggccctagggcc

SEQ ID NO: 15239 - DNA, 125 bp, Zea mays
  Clone ID: MRT4577_113901C.1
ccgaaggtatgctgccaccacgacgatgagagaaatgcgtacaagcagcgacacacacctggtgcatcccggacggcattggtcttcggccgcctttcgactggttggcgtccttcccgaaggag

SEQ ID NO: 15240 - DNA, 266 bp, Zea mays
  Clone ID: MRT4577_113902C.1
ccacccgtccggaaaggagggacaaagggaggtcaagcacctcctatgctaaatgaatttctcttttatgcacatgatattttgctgtataattcaacaaaaatattgagttaccccctaataatatatcttttagcacttggcccttcttaaaaaaaaaaaaaaaaaaaaaaaaaaaaaaagaaagaaaatatataaaatataaaaataatttatgcgtccatgcgacggcatagcttttctcttagtgttacaccaaatccaat

SEQ ID NO: 15241 - DNA, 340 bp, Zea mays
  Clone ID: MRT4577_113903C.1
cgcacacctaacgcaactgcaactgcaactgcaagagcgcgccacagctgaaaccaacagttccacacgaagcccaataaaaagggggaccctctccctctggcgaattccatccgtcggggcgtaaactgcgatcgaccagaccatggacaatatcctggccttctacatcctgagctcatcaacggctgacatcattgctgacggactgtactggtactagaacgagatgatctagtttgagctcaagtacaagatcaggatccggaaggctgacaatgactcagaggacgaaggctgcaagaacgaaggcactgcacatggagttcttggtgggcct

SEQ ID NO: 15242 - DNA, 404 bp, Zea mays
  Clone ID: MRT4577_113904C.1
ttttaaacattttcataatctttttcgataaacaagagcagccgggaagaaatatggatgggcctagactattaactccggaacgcgccattatgaaagtccccaataaaacaccatgccaaccttgcgccaagaccagtgcaagaacatcttcactgcgagaacaacatcagggggtcaaccattcaatcccaccgtctgcgcccgtacaacattgtggtgggggcttcatgactgactcaccaaagccagaatccgacccagctcttctcttacgtactattgcggattgaggatgacccatatggtgctcagcatcaaaaccgaaaagggccatagccgtcctaccgtgatatggggctttaatggggtagtccgggccaataaacgccaccaggtctgca

SEQ ID NO: 15243 - DNA, 275 bp, Zea mays
  Clone ID: MRT4577_113905C.1
gaactataaaaacacacgcatgtgatgcaccacccaattccttggttctacaggcattactcctgcttcttggcgacgttagaatgcggaacaacgcccgaaaagggccaactttagagagcggggcgacacttttccatcacacccgggaaactcggcctggctttgccgcttcaagttgctcctaaacatagtatacatgtgagcttgcccatttcccggccataccttttttctgaataggtatgggacgacctttaacgttggtgactacc

SEQ ID NO: 15244 - DNA, 315 bp, Zea mays
  Clone ID: MRT4577_113906C.1
ttggaacctttataccgtgtttctatcgatctcttaaccagttaaccaatgccgggctgccttatataaatgggacccttcaacaaaacctcacttaaaagatggacgccgaacgccaaaacttttatagggtttctggcccctaggaaagcgagttggaagaaggccaaaaggaataaatgggaaaaccatattcctggggggacatgaactggggcacgaatggacctacttgaactggcagccaacctggctggggaggggcattgaaaaccccaggcccaaacagcgtgagctgggggcccaaaattttgg

SEQ ID NO: 15245 - DNA, 327 bp, Zea mays
  Clone ID: MRT4577_113907C.1
gcatagcaaaccatggcgactttttttttaatattttgggcaaacaggccacacccacaatgacgcttttggataccccttagcaatttcaagccatgaacagagggtacacaaagacggtctggcaagcctgggatacaaatccgcctctcaaaattaagagcaaagggacagcgttaaaacttagaggagaggcggcccgctagcattgtatttacccaaatcggggagtcgcaaggacccaatcttataaagtttacacactccccattttaaggccccctcccggacgcgagggtcgacccggagaattccagaccaacccct

SEQ ID NO: 15246 - DNA, 441 bp, Zea mays
  unsure (1)..(441): unsure at all n locations
  Clone ID: MRT4577_113908C.1
ttgatgcaaatcagaaatggacatatgaacaggcagttgaatttggatccagggtacaaagtcttcatttggaatacattgaggaaccagtgagctctgtatatgatctcatcaagttctgtgaaaagaatgtcttgcctgttgcacttgatgagactattgacaaccttaggggggatgtaatttgtaagcttcatcaatttgttcatccaggaataattgctcttgttataaagcctagtgttgttggaggttttgagaatgcagctcatattgccaaatgggcgcagctacatgataagatggccgtcatcagtagcacgtatgagagttctataggtttggcatcctatatacagntagcacattatgttgaccaacagagctctatagtctccagaataagaaacaaagatacatgtagagccactgcacatggac

SEQ ID NO: 15247 - DNA, 1784 bp, Zea mays
  Clone ID: MRT4577_113909C.1
ccagattgtccaccggtttgcttgatctgaatgaagctctttcagaacctacgggcttaaacaatccatatgttccgcacgaggaggtttcaaatcttgagcaggcacaggtaggaacttggaatctggatcaacaagttcttggtaatggaagaaaaaacatagactcatcttttgatctgcatggacaggaacaactgagacattctactgagttggacaccacatcaaaaggcaagtccccttgtactctgtcaaacggattccaggattcagtgcatctccaacagaattggagctctatgactttgcatcatggtgtctctcaactctcaactggaggtgaaccttcttcctttgaagttcgagaaagtaatatatcacacagtgagaaacgaaattttagttctgaaacgaacgtggaacaagagttgaggccttctgctggacaaaccttgcgcttgatgggtcatgatcttacagtatccgatactagagttgactatttatctgacgcggcacagaatcacacaaataatactgcagaccatcttaccacaaaggtggtgttggaattgccacgacaaggtcagcctttcctagcattacaaactcagagtattcccagtgtttcagcaagttctgcaaggacagctcaggcacattttggatacagaacaacacataacatcagccacccgttgctcgctgccaatgtgttctctggtgatccatcagtatatgaagacaggtgcagggacttcacaaacttgcaatcacatcgaaattctctattgggatatcctcctctttccaatcatggcagtgctgcatttcttcagaattcaccaccttggcgttattactctgatcattccaccaggagagattcactctcagcgccatttacaccaacagtgatgcagcatgtggcaacaccttcagattaccgtgccaatctgcctcatcagtcatatggtgtgtactctggaagctcaacagttcgacctcttaactctgcaagttttacatgcacaaaccagatagtacaagcagttgacagtagggctactgcaaaccttccgtccagaagtccaacaactggaacgacaagaactcatcacaactccaatacttcatctagcagccgtttggttctgagatcaggccctgtaaagctcagtgccggggcgaagcatatcctgataccaaatgagaatacggaggacgacaattctgcaccaatgtactcttgtgtgtcctttggcagcagtggtgggaatgtttcggcagcttatcagaataaaggagcaggttcccataggcatcagaataaaggagcaggttcccgtaggttctgatccaaaagctggattatcttgctcgttcgttttctggacagctgctgggcaggcggctgcatgttttgaaggaactgaagctgatgacctaggcaatgctgagatgaagatgcaatgcgcagttcggaggatacctgagaccgtgttaattaaaggagggtacttggttttgttttgtggcctgcaagactttgacagatccttttacttctgcagttttattccccccccccccccccctccccttttccaaaataaagaagattttcgttgtttgaaaacgataagtacgctcaggttgtgcagcatgtgaactttgtagggcatacctggagtgtctatgtagctaccggtgatgaagtagaatgttaatgcgactcaaaagctggttgattgtacaacctgtgtcatcaggagttccct

SEQ ID NO: 15248 - DNA, 187 bp, Zea mays
  Clone ID: MRT4577_11390C.1
aaaggacatcgactgcgaaagtgcacgcgcctgcaagcctactacaacatcacaaagtatggcagaccgccaggatgtcacacacaatagatcaagaaaggttgatctacaacatgtcaatggtcccgagccaccactgctaactggagacttctcacatcccatgccgacttccttggctcaccaa

SEQ ID NO: 15249 - DNA, 350 bp, Zea mays
  Clone ID: MRT4577_113910C.1
aaaagggaggaacagttaaaggaacatttaccccaccttttggaaacaaaaaaggccttttattaaatttggaaaataaaattaaaaaggggccttcctatgaataaattcgataactaaaaaaaggtttatggggggtccaaaaagaacagggggttataaatcttaaggctccaaaacttaaacttttttgcccatttaccccacgggctgttggaagaaaagactttttttttttttttgggccgcccaaagcctggctttttttgttggaaccttggaagcggaattttgggaaggggggaccgatttttggggggattttttttttttaattgaggccatttttt

SEQ ID NO: 15250 - DNA, 219 bp, Zea mays
  Clone ID: MRT4577_113911C.1
aacaacatccaacaaaattattttttttttaacttccatctcaactcttttagtacagttttataacattcagggacggcctaacttctaacaaaaatttaaccactacaaattttttaacaacattcatcaacaaattacattataacatatctatctccatcacttatcatcttcattcaataaaaaatcacatcaatatttacaaattcatattaa

SEQ ID NO: 15251 - DNA, 315 bp, Zea mays
  unsure (1)..(315): unsure at all n locations
  Clone ID: MRT4577_113912C.1
atccaactggccccaaggcgcgcnaaaaaacttcctctaggatcacccatcaatatctaccaggcaggccatattagaaaatcctgctgcgtgagagnggggcttagcgcacttctgggggggccggggccggtgtcatggcaagaacttaaatccgcttaaaatgccggtgctntctggcccngtgctctttgtgtctcatagtcgctaacaggtacccttcaacgccttccttcgggttccgtgtggcttggcgtcccccnnggccccgctggnnggtttggaaggcgtggggcctcgtgttaacaccttctt

SEQ ID NO: 15252 - DNA, 249 bp, Zea mays
  Clone ID: MRT4577_113913C.1
ctcgaactacgtacatttggagctggaaattgtggatagtaccgcaccgtatctcgatctgagtatccttcctacatagcattctcgaactttctacctggtctctctgcttgagagttcctcagcctatcctggccactggttcagtcagaaagccttcagattatcacgagctgaagtacaaatctaagtcgcagtctagtaccaatgtgatcttgaaagctgggcaaattagtctactgggtgatg

SEQ ID NO: 15253 - DNA, 408 bp, Zea mays
  Clone ID: MRT4577_113914C.1
cccccccccctttttttttttttttttttttttttttttttaatttgaagggggagggcacaactttgtttatccttgggggcaaggttcctgactcttctacaagcagctccagctcctgctccttgggcttctctaaaggaggtagagctgggcaattcggtttggcaaaacaatttcttatgggcttctttcgaataggggataagaaaaatatagtaggatagaagtcagatttttagggctctagctttcaacaataaaacaactcttttttttaaagggctttggacaaaaaaatttttttttttccatttgacaaagccttgcggtaaagcagagtcgggccgttcaaagagcccctaaacataaaagtggacgggactcgggattcctttccatgcactg

SEQ ID NO: 15254 - DNA, 270 bp, Zea mays
  Clone ID: MRT4577_113915C.1
cgtcattatagccgtgtatgatgtaactgaccatgatagctttaacaatgtcaagcactggctgggtgaaattgatagctatgccagtggaaatgtaaacaagctttaggcggagaacaagtgtaacctgactgacaacaggaatcccatcttacgaggcatggcaagaagcctaggagatgacatccgaataccattacttgatactactgccaaggatgctgcacacgcgcaaaaagcatttataaacatcctacggcatataaataa

SEQ ID NO: 15255 - DNA, 302 bp, Zea mays
  Clone ID: MRT4577_113916C.1
ccggaacggacagcccggctccgacccatcgcgttcctggacacggcgccggcagcccatcaccatgagctccacacgcggacattgatcatatcgacgctagagcatttgttcggccgcatagcgtaatccactcagcacttgaagaagcctagagggtgttcctgtgcaacaagcctgactccgacatttaacttgctgtccatccgcacgcctgtgaccaatacttaccgccccatcctctggcccatctatgccgacaccttatcacaagcaccccacatcggctgagaatcaaatct

SEQ ID NO: 15256 - DNA, 299 bp, Zea mays
  Clone ID: MRT4577_113917C.1
gggctttgcggcggctgcggagacggcgatggcaggcgcggaggggagaggtccgaggcggatctgcgtggcgttcgtgctggtggacgggatcggtgacgtcagcgttccgtcgctgggcgggctcacgccactggaggcggcgtgcacgcccgggctggacgctgtggcggcggtcggggtgacctggctcatggaccccgtggagccggggctcgcctgcggcagcgagtacggcgcacctatcgctcctcgggtacgacccacgggtgtactaccgcagccgcggcgcgttcgag

SEQ ID NO: 15257 - DNA, 351 bp, Zea mays
  unsure (1)..(351): unsure at all n locations
  Clone ID: MRT4577_113918C.1
tcctctagagtttccgcccttggggtttttctttgcatacaatgaactctggaatgctctggatcgtatgtgggactgctgacgatacatctcagctcgattatcgaatggagagaaaccattcttttaaggatgtcgtataagaacattctatatctttactggtattctttttctggagaacttgangccaggcttgcctatgctgaaattgaggactctgcacctgatgttgtactacaccacccccccatatcagactttgcgcacgaagtgactaatgactgacccagtcaaccggagagcatactcccacagctcagccccctctaattgattcgactaggccct

SEQ ID NO: 15258 - DNA, 207 bp, Zea mays
  Clone ID: MRT4577_113919C.1
gttagtatttcgtaattcactatcaagtatccatatctcttctctttgactaatccgagatcaaggagcttattttgaccgactggtgccaggcctcccgatcagggaagcccagtacttgcaaggtctttaggccaatcaagggattgccgactcacgaatctgtacactcctgacgtctttgatgcttgaaaatcaaacacgttg

SEQ ID NO: 15259 - DNA, 1059 bp, Zea mays
  Clone ID: MRT4577_11391C.1
cagtagtatcttgaacgtcgagcgaaccctacccatctccgcagtccacaaatccgcacccaaagcaagcccaacgaaacccagacggcaacgagacagttgtcatctcactccaccgcaccgtccgcgcacggctcgccggccgtcagtcacacaaccagcacgacaccatccgttcctggccttcctcccgtgcaactaccactcgcgtcaccgcggaaattaaccccgaaatccagcgccttcggcacgagcacgaccaggcctgcgcaggagatggggcggagaggggagccctactacgtcgaggcggtgccgccggtggacgtgaacaagaacacagagtggttcatgtacccgggcgtctggaccacctacatcctcatgctcttcttcgcctggcttctcgtcctctccgtctctggttgctccccgggggcagcctggaccgtcgtcaacctcgcgcacttcgccatcacttaccacttcttccattggaagaaaggaaccccttttgctgctgatgaccaaggcatctacagcagattgacatggtgggagcaaattgacaatggtcagcagcttactcggaacaggaagtttttaactgtggtacctgtggtgctgtatctgattgcgtcgcacttgaccgactacaagcagccgatgttttttctcaacacgattgcagttttcgtgctggtcgtggcaaaattgccgaacatgcacaaggtccgcatatttggaatcaatgcagacatctgaggacggctgcaagaagtacatggatgcgatgccatgatgttatgaacaagcagtgtgtttctcaaactcgacacaactgcctgtaatatatgtacaggtttagaaagaactgtaaatgaatgatactctaggatacaaggtttgcctgcagactgctctgtgttgccgttgccgctgctttcttttgagtttcactgaaagtggaaaccataacttgggtaaatgtaacgttcggttttcagcttcagcaagacaataatttaccaaaaaaaaaaaaaaaaaacccgcggccgg

SEQ ID NO: 15260 - DNA, 204 bp, Zea mays
  Clone ID: MRT4577_113920C.1
gagctcactagtctgcggccgccctccctttttcttggggggtttttttaaaaaccaaggcggctaccaaacacaaagcacgtcaaactacacttccagtgcgaagtacgatccttacatcaatagaaagggcaaaaatacaaaacccctttccatgttccatgaactatacaagaccatcacagaacctctccaccattctac

SEQ ID NO: 15261 - DNA, 1658 bp, Zea mays
  Clone ID: MRT4577_113921C.1
tcataaattagatgggaagctgcagccaacatctcatccagcaagcaactatcgcatatatcttccaggttcactttcgcaggttgttcttcatgcagcacctggttatgcaccacttccaaagcctcaaagtatggaattaaaccgtaatgtcacggcagcaatcagaggcaaggccaaactttctggaagtgactccgatgctgaatctggatcttcaacatatgagagcagctctgtttatgattcggagagtgaaggtgctggcctatcggacagggatactgttgaatcccatcagcgtcaagaagatagagctgatgctccactggtacagatatatgatgctagtatacagcaaggccaggcaggtcaaaatactgaggaaaatttggcagatcttatcagtaccgatttgactgagttgatgtctaagtcagccttggaatcatggcttgatgaggctcctgctgagccagttgttcagaatttgacacagacatcgtctgccagagtttcttttacaaaccgcaactttgagcgaaaacctaaactgcacacattgttagacccatctggcagtaatggattaagcgttctatatgccttctcgcctgaggtttcacccagatcacgtttgctagtatgtgtagacctatattttgagaatgtcactacacagcagctaacagatataaccattgaatctgaagaggcttctagcagtgtggattttatagaccaaacatcagaaggatattcgggtgtccctactatcgttcctgtgggagggatacattcgttggccccacaacaaatggcaaagttggttcttcaggtccattttcatcaccatatcttgcctctaaagctgtctgtgttttgcaatgggaaaagacatccagcaaaacttcatcctgacattgcttatttcgttcgtccactacccatggacctaaatactttcctatgcaaggaaaaccaattgaggggaatgtttgagtatgcgaggaggtgcgctttcaaagatcatcttcagaagctaggtcacgaggacagtgcagagcacatcgataagaaccttcaggtggcccagagtgttgcttcaaaaatactgagcaatgctaatattcaccttgtctcaatggatatgccagtaaccttcagtgtcgatgacgcctctggcttgtgttggagattcagcggtgaaatcctgagcacttcaaaaccttgcctgattaccatcctggcggaagggcgtgcctctggtccgctggaccttgctgtgaaggtgaattctgaagatacggtgttcgccctgaatctcctgaacagagttgtggcgatcatagattgaggtgagcatgaaattgtacattatcaacaaatagaagaggtatttggcaagcgcgtgactatttgtaagaaagtcttgttgaataatagcatctccaatagctctaaaaaaagaattgtgaaatgattgagttttacagcttgatgtgaaaaaattgagtttatggattaaaaactaagaaaaacaaaaaaaaggccagagatgggtgtagtctttggagctgtggatcgtcgcgattggtggcatacataaggaagtttgggttgaatggatttaataacatacgtcttgtatgtggttg

SEQ ID NO: 15262 - DNA, 1180 bp, Zea mays
  Clone ID: MRT4577_113922C.1
attcggctcgtgctagactgcagtctgcagtggccactggatgagaaaactaagatgagttccttgcagacccaacatgcagcgagtgaagacgcatccgtttgatcaaagcagagttcaattctctgctgtctttatattaagtcttgctgccatgatgctgagacttgttacttccgagagcagtctttgtgtttgatatccttcctgttgggtctgcaaaagtccagcctttgggtgatgctagtttcagagagtacagcaattccttcatcgttgtcatgctcacttgagttggatccactactgagggatcttgttgagaagaaactaagcctgaagaggaatgtgactgcaatggctaccgagctcagggatgccaggaacaggcttgcttcacaggaactgttgctggctcaggagatagaagccagaaaggttgctgagctaaagacgagaaatttggaggatgaggtgagcaagctgcagaaatgcttaggggacaaagatgagcagttgcgtgcatcgctatgtagcgcagatcagttccgcaatgagttggatggtttcagatcacaacttccagtgatgacaacgctgctgcactgctcatatttgttaggaaagctgaatgataggaacaattcgatgagtgagggtgaatttccggtgaacaatttagcagaacagctcaatcatcttgaaaagtgcctcgagagcagggatcccacactaagacaattcaaagattgttactctttgagaaccgagtctgacatcacggatgcctttgccagagttgcatttgataacgatgatggtgtggccaagccgggagaggatataagggcgctatctgctcactgggtaaacagaagcaaggaactggaatcacagttggatcagcatcggaggacagcccaggagctgaagaggagggtaatgagacttgaactctgcatcctagaaccatatggaaactccataggctaagaaatcagatggccgtgcagcagcccacttgtagtggctcaggcgagaagcgcaatctctgggagagctcagccttcaagctcatagcatccgtgtcaatgttggtcctatttacacttgcaaaccgatgagctctcacggtctcgcttttgcgtacagaaaatataaacgttcatgtttgaatgtt

SEQ ID NO: 15263 - DNA, 372 bp, Zea mays
  Clone ID: MRT4577_113923C.1
cttttagcttttttttttacttggacgaaggcggcaaattggtgattgccattgcggccaaaaccaacctggcagggacgtcttgaacagatattttggggaacctcttgctcaaaaagttcaagccgcgagaatattaaggaataaacggctccccccctagcattggcccaattcacacggagtgcaaaccctccaaccactgggcgggatttaatggcccaacgaccattgggaaaaaatcacttctggagggcgttgatttgttactcacaaaaaacaaaacccgcttaaaataactgaatgtggacttcctaccaatggcccttggaccttccaaagaattgtttcccgacccccctatgaaccgta

SEQ ID NO: 15264 - DNA, 204 bp, Zea mays
  Clone ID: MRT4577_113924C.1
tagccggaacgcagaccgcgaggacctcaaaggcaaatttctacacgctgacgatggagaacacgggcatctgcacacaggcgaacgtcaagctgacgcgtgacgagatcagctccaccaagaccgacaacccggcctgactcagcgcggactgaaagctctgcaccctcaacggacgggtgccccataggcatgggaccggag

SEQ ID NO: 15265 - DNA, 332 bp, Zea mays
  Clone ID: MRT4577_113925C.1
cgggaacgggccccaaggaacaaaactggatcttttttttaagggaaccccaccccaaaaagaaaacctggggctttggtttttttttcgggaacaccctggaagctgggtataattgtctaaaaaaaaaaaaggagtaaaaccttaccaacacaccccatgcgctattaaacctttgacaaaacaagaaaaggccccccagcgctaaaaaagaaacgaggctccccctttttaacaaggaaagccactggttaataaacccctaaacaggataaggcaaaggtcagttacatatctaaacccccgaaaaagctccaaattcaaccaaactc

SEQ ID NO: 15266 - DNA, 1245 bp, Zea mays
  unsure (1)..(1245): unsure at all n locations
  Clone ID: MRT4577_113926C.1
atcgtcaacccggtctacggctccgtcggcctgctctggtcgggccagtggcaggcgtgccaggccgccgtcgaggccgtgccggccccgtcgtgcaggtgcaggtcgacgccgcgtccgacgcctcgccgccgctcggaccccgccgccacgacatccgccacgtcgccagggaccccgccgccgcgcccgacgtcctcctcctccgcagcagcagcagccgccgcaagcgcgccgcgtcgtcttccacctcctccaagcccaaccagcccggcagcagtaagcgcgcgtcgctcggcaagaacaggcaaagggcagaacaagagccggtgcccatggtcgttgagcacggcgaggagtccgccggcagccacgaccacgaccggagcaccaccgcctgcaggggtcggaggaggacaccgacgtcgacgcggcttcccatgcccactcccacgtgagccaagccgagccagagcccgagcccgagaccgagccgcagagccacgcgccgccagcctgcagccagcagcaggctaaccaggagcatcaggacgacgaagacgaggagctcgcgctggagctcacgctcgggctggagccgctcgtcaggcagaggcagcggcccaagtcttcgcgcagcgactgcgatcacagcggactgagcgcggcgtcgagcctcatgtgcttgcgcctgcagctgccggcctgatctctcacctgctagttcctcacaacagttctcgacttctctggccctgctgcctgtgtcaagatcaagactcactcagagacagacaacgaagatagtcatcctaggtttctggctagtatctttgtaaaaacgttgctggactgaactgcactgcacagcgtggtcctaggatcctttttgtgtcttgcgccatgtaccgtagatgtgatgtgatttgttcaaagtttttttttgtttggaaaaaaaaaaaaaaaaaaaaaaaaaagggcgcctagaaaaaaaaaaaaaaaaaaaaaaaaaaaaaaaaaaaaaaaaaaaaaaaaaaaaaaaaaaaaaaaaaaaaaaaaaaaaaaaaaaaaaaaaaaaaaaaaaaaaaaaaaaaaaaaaaaaaaaaaaaaaaaaaaaaaaaaaaaaaaaaaaaaaaaaaanagnnnncntnttttaaaaaaaacaaatttttatattccccccccctcacataaaaactttttttttttgaacaccccattttttacccctcttcccctttttta

SEQ ID NO: 15267 - DNA, 327 bp, Zea mays
  Clone ID: MRT4577_113927C.1
cagactccttggaaaaaaaaaaaactttcataacaaaacaaaaaaaaaatacccgacccgtttataaaaaaaccacaatacaccccaataattaaaaccatacaaactaaaaacccataaatccttataaatcatcctccccccttttaaatatcccaatctaaattcccctccattacacacacatatcttttttatagtgcccccaaaattaaattcactcccctcttttttacaacttttaacttgaaaaaaccttgccttaccccaatttaattcctttacacaaaatccccttttccccagttgctttataccaaaaacccc

SEQ ID NO: 15268 - DNA, 579 bp, Zea mays
  Clone ID: MRT4577_113928C.1
ggttaattggtgttgtatggattaaaatttgtgacagccggagcctaacaaaaaaaaactttgaacaaatcacatcacatgtactactacggtacatggcgcaagacacaaaaaagatcctaggaccacgctgtgcagttcagtccagcagcgtttttacaaagatactagccagaaacctaggatgtctatcttcgttgtctgtctctgagtgagtcttgatcttgacacaggcagcagggcccgagaagtcgagaactgttgtgaggaactagcaggtgtgagatcaggccggcagctgcaggcgcaagcacatgaggctcgacgccgcgctcagtccgctgtgatcgcagtcgcagcgcgaagacttgggctgcttgatcttgacacaggcagcaggctgcctctgcctgacgagcggctccagcccgagcgtgagctccagcgcgagctcctcttcttcgtcgtcctgatgatcctggttagcctgctgctggctgctggctggcggcgcgtggctctgcggctcgggctcgggctctggctcggcttggctcactgggaggggcatgggaagcc

SEQ ID NO: 15269 - DNA, 246 bp, Zea mays
  Clone ID: MRT4577_113929C.1
atttcacataaatatactcaccatcctttcttatattcgtatcttacaccacaccccatataaactatcaaatttacataccctatcccttccactaaccaaaacaaccattctagatttccttcattcaaaatatcatttatccattcaccatctcctcccttacttacaattaaccacaccaatgtctttttaacgtaacttatatcccctcccaaagatacttttataatctcaaatacacta

SEQ ID NO: 15270 - DNA, 1132 bp, Zea mays
  unsure (1)..(1132): unsure at all n locations
  Clone ID: MRT4577_11392C.1
nnncgaggccggccggggaaaaaaaaaaaaaaaaaaaaaaaaaagaaggacccaacgcatctccgcagttagcagcacgcacccagagcaagcccaagtgcccaatcaacaaacccagaccgccagacggcaaccgttgtcatctctcactccacggcgccggccatcgtcactcacacgcccagcaccgcagcacgacaccatcgcgccctggccatcctcccgttcacgtgcacctaccgcacgcaccaccgcggaaagtaaccccgagatccagcgccatcggcacgaccaggcctgtccagggatggggcggagaggggagccctactacgtcgaagcggcgccgccggtggacgtgaacaagaacacagagtggttcatgtacccgggcgtctggaccacctacatcctcctgctcttcttcgcttggctcctcgtcctctccgtctctggttgctcccccggagcagcctggaccgtcgtaaacctcgcgcacttcgccatcacttaccacttcttccattggaagaaaggaaccccttttgctgctgatgaccaaggcatctacagcagattgacatggtgggagcaaattgacaatggtcagcagcttactcggaacagaaagtttttgactgtggtacctgtggtgctgtatctgatcgcatcgcacttgactgactacaagcagccgatgtttttcctcaatacaatggcagtttttgtgctagttgtggcaaaattgccaaacatgcacaaggtccgcatatttggaatcaatggagacatctgaggaccactgcaggaagtacatggatgcaatgccatgatgtgatgaagagctaaacagaacaagcagtgtgtttctcaaacttgacacaactgtctgtaatatatgtacaggtttaggaagaactgtaaatgttactctaccatagaagctttgccagcggactggcctgtgttgttgccgttgctgctttcttttgagtttcactggaaggggaaacggtaactccggtaaacaaccaccagcatgtggataagaaaaaaggaagtgtgtagcagatgctatttggtatctggttcgattgaaccaagaaatcagttaagttcatatttttgtctt

SEQ ID NO: 15271 - DNA, 376 bp, Zea mays
  Clone ID: MRT4577_113930C.1
ctttgttctccattacaaagatatattatctgaagtgttaaaaaagattttctaaatcaatctaaaaaaatatataaaaaaaacttggaatgacaaaaaaacaatggttggccatttaagaacctatatttttactccgctatttgcaaattcatagctttcttatattttttccaaatataaaactacgggccgggatttctcaccatctggcctgaaaaatcctttgattcccccagattaacgctcttcggctacatacctttttcccataaacgcgccaatacggaagggccccgcacagaaggcccttcccaactttatcccactccataacaggctattgataccccccctgaagctacacttaaacccc

SEQ ID NO: 15272 - DNA, 159 bp, Zea mays
  Clone ID: MRT4577_113931C.1
gggccgtgcatgatccgcctgggatctcgctggtcttcgcccacctttgactcgggggggcgcgcatgcaccgaccccactcaacctcttctccctcgagtcagcaggtgcctttctcaccccgtaaaccctatgcgtctgctcatgctaaacacaacc

SEQ ID NO: 15273 - DNA, 366 bp, Zea mays
  Clone ID: MRT4577_113932C.1
attaagcctcagaatcctctagctttgtaacaaaactacacttcatcccaaaacataaggatttttttatttgtaataaatcaaactatcttaagttcgaccgagcttatagagaagagtattaacatctacaagatcaaagtaagctgtgaaatatataacataatggttaatggatctagtaatgctgatttgatatcataaatattactgttttttatagacttgtatagtttgacttgggacaaaccaaaagtcctcaatattttggaaccgagggaatagcaattccttacaagaccttcccaaaaactaacaagtcctaaaaaaaatgaaagcaacttccattaaaaagcgacagcaacg

SEQ ID NO: 15274 - DNA, 676 bp, Zea mays
  Clone ID: MRT4577_113933C.1
ccaacttgagatgtttgttaatgatgcaagggcggatgcaagttttacatgttgcaatgaccttggagatcttgctataaagatggtgcagactgatagacatacaacatttcctttggtctatcgtcttgttgagttggctttgattttgccggttgctactgccacagttgaaagagctttctcagcgatgaaaattgtaaagactgatttgaggaataagatggggagtgactggctcaatcataggatgtttcaagaaatgaagtctcgcatgaaaatgttgcctaaacaacatcaggctgctagtgtaatgtcctgtcgtgagcaaagttctgccactggccccaagggcaccctcttccccatgtgcggcatgaacctcgccttcgaccgcgacctcatcggccccgccatgtacttcggcctcatgggcgacggccagcccattggacgctacgacgacatgtgggctggatggtgtgtcaaggtcatctgcgatcacctgggtttgggcgttaagacagggttgccctacatctggcacagcaaggccagcaacccgttcgtaaacctcaagaaggagtacaagggcatcttctcgcaggaggacaccatccccttcttccaggttgttgtgctgcccaaggactgcgacatcgcgctctcgcaatag

SEQ ID NO: 15275 - DNA, 663 bp, Zea mays
  Clone ID: MRT4577_113934C.1
ggccgggccgggattaacaaaataaagcccgcgtacatgaacgatccttcctccgcctccaacaagcgctatgcgcatagcgcggacgcaagcccaatgtgtagccggcttcacccgaccactcatgcccctctgcagtggtcgcccccgctcacgatccgtgtgcgcgccgtgtacaccaagcccgacggcatgatgatcccggcgaagcggacgccgagtgagctcctgaccccgtacatggtacggcgcttaatactctagcacatgcaggtgatgcggcgctccaggcacgacccatcaacttgaacgacctggtgacgagggtgccgtagaatggacgcacgatgtacacgtgttttgcgtgcacacgcaggccaattttctcctactaccggaaggaaatcgacgataccgcctctaaagaagtcgaggttatcattcagcgggcgacgatggcatcacctatggccactcagcgcagcactatacacacgataaacttaagaagtgcgggtctgacacccaggatcttgacaccctactggtcatcggtacagagtgcgagattgccgtctcaactgccgatgacgatcaactctgcaaatgaatgtctgctgccgagttctaaatattaatcatccttcctaacgaagtgactgt

SEQ ID NO: 15276 - DNA, 1814 bp, Zea mays
  Clone ID: MRT4577_113935C.1
gagccggaagcactctccacgccttcctccttcctctgctcgcatctcggatcggggagaaggaggatctgaggctttcggcagggccggggacgatggcgccgctgctcaaggacgagctggacatcgtcatcccgacgatccggaacctggacttcctcgagatgtggaggcccttcttccagccgtaccacctcatcatcgtgcaggacggcgaccccacgaggaccgtcatggtgcccgagggcttcgactacgagctctacaaccgcaacgacatcaaccgcatcctcggccccaaggcctcctgcatctccttcaaggactccgcctgccgctgcttcggctacatggtctccaagaagaagtacgtctacaccatcgacgacgactgcttcgtggccaaggacccgacggggaaggacattgacgcgctggccaagcacatccagaacctgctctgcccctccacgccgctcttcttcaacaccctgtacgacccctaccaggagggcgccgacttcgtgcgcggctacccgttcagcctccgggagggcgtgcccaccgccgtgtcgcacggcctctggctcaacatccccgactatgacgcgcccacgcagctggtcaagccgcgggagcgcaacggcaggtacgtcgacgccgtcatgaccatccccaagggctccctcttccccatgtgcggcatgaacctcgccttcgaccgcgagctcatcggcccggccatgtacttcggcctcatgggcgacggccagcccatcggacgctacgacgacatgtgggccggctggtgcgtcaaggtgatctgcgaccaccttgggctgggagtcaagacggggctgccctacatctggcacagcaaggccagcaacccgttcgtgaacctgaagaaggagtacaagggcatcttctggcaggaggacatcatccccttctttcaggccgcgaagctgaccaaggaatgcgacatcgcgctctcgcaacaggtcaaggagaagctcggcaagcagaggcggatctctgttatgggcagctggggccatggctctactcacccacagaattcttttgcaaactttgatgaagataaatcaatagaacttgctcaaatttatgttgttgatttcacccaatatgattgcattgtccttcgcaaccaacttgagatgtttgttaatgatgcaacatgttgcaatgaccttggagatcttgctataaagatggtgcagactgatagacatacaacatttcctttggtctatcgtcttgttgagttggctttgattttgccggttgctactgccacagttgaaagagctttctcagcgatgaaaattgtaaagactgatttgaggaataagatggggagtgactggctcaatcataggatgatatgctatattgaacgagacattttttcaagtattccaaatgataagattttataccagtttcaagaaatgaagtctcgtatgaaaatgttgcctaaacaacatcaggctactagtgttaatgtctgtgctaaattttttttgaatggccctggtcctgtcgtgagcaaagttccgccactgtcggcaaggtcggcccctacttcaccaagctccactaccggaatttggctctttgccgagtgccatattctttgccgagtgttttattttgggcactcgcaacaggtcaaggagaagctcggcaaggtcgacccctacttcaccaagctcgccgacgccatggtcacctggatcaaggcctgggactcgcttaacgccgccaacggcaagcccaagaagtga

SEQ ID NO: 15277 - DNA, 468 bp, Zea mays
  Clone ID: MRT4577_113936C.1
cgggcctcatttgccgacacgtggtcggctttggccagccggatgaatcttaagaatagctggatgatactggcgatccgaaacatataaaaaacgaagcacggacgacttacgctggatctctctgcacggacgccatccggacatgatgctagctgcaccagccaacgcccacgggcgacggctggaccaagaacctcaccggctaagcccgcatggtcggagatgggggcaacaaccacctcggcacgcaccggagcccaaccgtgtacgactgggaggtgttctgttcggtggacctatggaggccaaggcacgacgagaactgcacatggaaacctaccaggaccattaacacagctggcggaactgcaggagggagggggcagaagagccatggccatgtaatgtaacgaccaatctatatcagagctactggtgacatgaccaggcactatatacatacat

SEQ ID NO: 15278 - DNA, 549 bp, Zea mays
  Clone ID: MRT4577_113937C.1
ggggacacaaaaaaaccaaggtcttggcaggcataagcccgggctaataaaaattcaaccccaaggtttcctttgtataggaccctgaaacaaaaaaaaacagaagggggccattggggaggggggggggacggtttttttttttaatcgcccgccaacaaaaaaacaaagctcccgcccccaccccaaaaaaagcgggcaaaccggcgtcccccaacgggaagttgacgggccaccggttccttgggaaaaaattccaacgggcccccacctcaaatttccaaaggaaagctgttttaaagcaggcgtaaaaaaaaacggttcggttggaatggacttcccactgaaaacgtgggagcccaaaaactcccacgtaattatgtcgttcccacacccaaaggggccatttccggttacgggcaaaacgttgaaaaaaggaaccccatttctaaaggaagggttgttttgggaaacctcggccaaggcctaaaaaaaggctccgaacactgaatttgccgcccggggaaaatctaccgaggaggaaagcct

SEQ ID NO: 15279 - DNA, 1353 bp, Zea mays
  Clone ID: MRT4577_113938C.1
gttctgttgaagatgcttctaaagcactggagtattgtagcactgatggaaggccttcgatgaaatgtttccctaaaagttgcatactacatcgctgaagcactacaatattgtaacactgagggaaggcctttgtatcatgacctaaattcatatagggccctctttgatgaggaggagcactaccttttgccagttgcttgcaagaatgtaattggaatccgatgtgcttcatggcgcatcgtatcctccattgagtatagggaagaaggttgtgtcaacatggactgtgccactctcatcgaggactaccataacaagattgaagttgaactcaacaagatctgtgttggaatcctcaagctcttttcccaccttcccccctcattaatagtttcaaagtccaaggtcttctacctcaagatgaagggtgattactatagttccttgcggagtttgaaacttgatctaggagaaaagatgcagccaagaataccatggtggcacgcaaagttgctcagatattgctttggagttggctcccctatcctattaggctttggctgatgcttaacctctcaactctcctgatcttgctcgtggtctccccaaacaggcaaagccaacgaatgaaagggactcactcgcagcaacaaccaaaaaattgacatggtggtaggaaaaagacaatggtcagcaacttactcggagcagaaaatttttaattgtggtacccgtggtgctgtggttggcaatgcagtgatgcttagtgaaatcataaactacgtgcagtccctacaatgacaagttgagtttgtgttcatgaaactggccaccgtgaatccccaggtggacttaaatagcctgcctaacgtcctccctaaagatgtacatcagtcttgtggcccgccacatttctcgctggagaccttaggcgctccgttgtcgtacctcagccagcctcaccatggaagccctcttggctgcatggacaaccagagttgtatgcacccacttgacacgacgttttgcttggcgataaatccgcagtatcatttcctcaacggtgttagcgatgcatcgtctcagctaatttgatgcttgtgtttgtggaaaccaagaggtggtgttgattcattggaaacatggttgtgtatgaatgagtttccagctacttctattgttggagatagaaaccaacatgtttggtttttgtttttattcgctttagaacaactcatttttgtacagaaagaggcatttagctataattgtttgttgtagtatgtttaccgcaggatagccggttccatgaaatacataaaaaattgatattgttgctgtatttggttt

SEQ ID NO: 15280 - DNA, 1117 bp, Zea mays
  Clone ID: MRT4577_113939C.1
gggctctttcctcagctactgctcaccgccggcaccacgagcgtcaaccgcttcgccgacgcgatctcctccagcccccgctgccgcgatgcaattcctcagcgcctccgcctcagcctcctctctggtgccgccgtccgcgcacctcctccgcctctcgcggccccagcccttcccgcagctcctccgccgccgctccccgcccagacccctcgcgctcacgccccgactgccgctccccctcgtctcgcgaccctcccttctctccaccccacgcgcgcacggcggccacggtcacgggcaccaccacggccatgaccaccatcaccaccacggccacggccacggtcacggtcaccacgaggtggacgtgcacgggggaggcgggggcgcggcggtcatgcgggtggcgcgggcgatcggctgggccaacgtcgccgacgcgctgcgggagcacctccacctctgctgcatctccctcggcctcctcctcatcgccgctgcttgcccgcacgtcgcgctgctcaactcagtcagccgcctgcaggccgctctcatcgccgtcgcctttcctctcgtcggggtttctgcagcgcttgatgctcttgtaaatattgcagacggtagaataaatattcatgtcctcatggctcttgcagcatttgcttctatatttatgggaaatgcattggagggtggcctgcttcttgcaatgtttaatttggctcatattgctgaagagtattttacaagtaagtcaatgtttgacgtgagggaactgaaggaaaatcacccagaatttgctttgttgttagaaacaagtggagaagaatctgtacagttttcaaatctaagttacaccaaggttcctgtgcacgatcttgatgtgggttctcatatcttggttagagctggcgaggctgtgcctgttgatggtgaagtctaccaaggttcatcaactgtcacaattgagcacctaactggtgaaacaaaacctttagaaaggacagttggagatgccataccaggtggcgccaggaacttggaaggaatgatgattgtaaaggtgaccaagtcatgggaggattcaacgctcaacagaattgtccaattgact

SEQ ID NO: 15281 - DNA, 686 bp, Zea mays
  unsure (1)..(686): unsure at all n locations
  Clone ID: MRT4577_11393C.1
gagctcgagggccgcttctccccctcctttttttccctttttttttttttttttttttttttttttttttttttttttttttttttttttttttttttttttttttttttacccaaaaaaaaactaatggaaaaaaaaggggggaaaaaaaaaaccaggggggggttaaaattttgtttaaaaataaaaaacaaccacgggaggaaggaaaaaattagggggggggttaaggcaatcttttaaaatggccggggtatttaggcagggggataagggctattggaactaaagggattttttttttttttttggccgaaattaatatttattgggaaaaaaggattaagttaggaccttttcgggggcccggttttttaaaaatcccttccctttttttttaaaggacttcgttaaaggggttatttaaggggggcaacgggattttttgaaaaattgggagggccccggagggttttttttgggggaaaaaaaggcccccttttttttttttttatttttttaagttttccaaaaggggtggcccagtttttttggccattttttgggggattttttttggccactaaaaaaaaactccccgttttaaagtaaaaaacaaattttgtaaggttgttgaggggggaaaaagggggnaaacggttttttttcttaagttgggggttttt

SEQ ID NO: 15282 - DNA, 309 bp, Zea mays
  Clone ID: MRT4577_113940C.1
tcgcccactcgttcggttacatgatcagctcgatcacctatcaagccaaagactttctataaacgcaagaagggatgctccccagacgtaaaagaacgacacacaatacagcataacgtaacctttccatctgtttgtcgagtacaaatatcaccccaaatttgcaagaccaatataacgccatacgatatattgtcaaccacaacaggtacaacataatacaactctaattcaacaacaatagcccacctgttgctatatccgacgtgctcctctagataacttagcgcgctctatatcattcttgtt

SEQ ID NO: 15283 - DNA, 436 bp, Zea mays
  Clone ID: MRT4577_113941C.1
aaaggggaaatgggaaaacgggttaaactattgaaaaaaaacaaattgggcaagtttataaaaaactacatgtaaaaatttaagaaattcaaaaggcatttaaccccttattttttaaaaaacaaaaaactaaattaaaaagtttaaagctaaaaaaaaaaaccccacccccaggaaaaaaaaaaaaatcgggcagggaattaaaagggggagggggcccctaaaatttaaaaggggaccctattgaaaagttcctccttttcaaagcgcggtttaaaaaaaatttgaaaggggggccccaaaaaagaaacaagcccgggggaccccaaaatgtggaccccctctggttaaaggccccccgggggggaccactctaaaggatccaaaaggggccccatcatgggggccaaaaggttaatgccaaactgcccccccg

SEQ ID NO: 15284 - DNA, 167 bp, Zea mays
  unsure (1)..(167): unsure at all n locations
  Clone ID: MRT4577_113943C.1
ggcgtcntggctcttctttggtggcnccgtggttcanttcgctggccgtcgttttccgtcgtcgggcctgggaaacccctggcgttgcccgncttgttcgccttgcggcccttccccctttcgcccgctggcgtnttngcgngggggcccgggccgttcgcccttcc

SEQ ID NO: 15285 - DNA, 778 bp, Zea mays
  Clone ID: MRT4577_113944C.1
agaagacgacggtggaggtgtgggcgagcctcaagactcgtttcgtcggggcggattgggtcatgacggcgcgcctccccacgctcaagggggagttcgacaagctatgcatggaagatagagagcagttggacgactacgctgacaaaataagcggcatgtcgcgcgttacgtcgggcttggcacgatgctcgacgacgacgccatggtgaagaagctcctcaacaccatcctggatcggctcttcccagccgttgcgggcatcgagcagttctgcaacgtcgagatgatggcgctcgaggaggctcttaacgggctgaaggtgttcgacgaacgtttccggcggcgcactcgtgttggtggcaaacgacgtgaggaccaactcctcacggaaatcgagtggaaagctcggcaaaaacccaagtcatcgattaggaggtgcttcaattgcggcattcgcagccactttgcacgggactgccacaagccgaagaaggaggaggctttactcgccgatgatggtgaagaagcgacgctcctgtgagtgtgggaagcggctctttgtttaggggagattgttagaaaataaacccgacaccatgtagatgtgtggttgctaagtagacgtgtgtgtgtgtgcatgtgttgtgtccagggtgtgtggacagtcgtggagctacatgcaggtggtcgttgctcctacgtgtgccacgtggagtctattgaggagccgacgttgatatgttagaagggtggccacgtcgtgtgtgtttgaccc

SEQ ID NO: 15286 - DNA, 468 bp, Zea mays
  Clone ID: MRT4577_113945C.1
ctttgagccactgacagttgaggatgtatcaaatgtccttgatttagagcgcccagatggtataatcgtgcaatttggagggcaaactcctctaaagcttgcgctacctattcaacagtacatagaggagaacgaaatggtgtctgcttcaggcactgggaatgttaagatatggggaacatcaccagattccattgatgcttctgaggacagaaaaagatttaatgcaattctcgaggagcttcaaattgaacagccaaagggagggattgcaagaagtgagtctgatgccttggcaatcgcctcagaagtaggttaccctgttgtggtccgtccatcatatgttcttggtggacgggcaatggagattgtgtacaacgacgaaaaactgatcaagtacctcgcaaccgctgtgcaagtagatccagaaaggcctgttttagtggacaaatatctaattgatgcagt

SEQ ID NO: 15287 - DNA, 555 bp, Zea mays
  Clone ID: MRT4577_113946C.1
ccaaactagttctaaaaaggagggcatcggtttgaccctctcatgtctcacattttctcatctattacaagtactcccactccacacttcacattctaatcaaatgattctggtggctgaaaatggtcagaatgctttagtagtttcctatcaaactggtgccgcgatgtttttcacttgggcccctttcttgcgtctggcgcggcagtgctttcacttggccccgtttcttgagtctgtggcagctcgacgtttcctccccactcccgtatcctctcttctgctagcatagcctctttctgccacttggttctgctgagtattacgaacagaaccatagtctgtaataccgttccgattaacacgcctacccaaatccccgttgcatcgagcttcagcttgaagccaaacacggccgcgaggggcaggccaacgaggtagtagctcccgacgttgacgaacgcgaccaaggactgccacccggcaccgatcgccacgcctgacagcaccggctggacgctgttgaggaatatggtggcggctaggagataccct

SEQ ID NO: 15288 - DNA, 691 bp, Zea mays
  unsure (1)..(691): unsure at all n locations
  Clone ID: MRT4577_113947C.1
cagagccccgactccggccccgtcgtgaacagcaccggcgctccgccggcgtcggcgtttccttggggcgacgacggcgcgacccgacgccggcggcacctaccccgcgcttctccgccgccgctcaaccaattcctctctagattagggtttcttcctgactaaatctggcaattacaccgccgctctacattttccaatccattcctcgtaccgccgaccaagcctgatcgcgacccgcagctcctctgcctcctacgccgcagtggtattccgtcggctggctctgcatcgtctccccgaggatctccatttctcgtgctcaacctgatcactccctacgtagatccgcccggcctaaagatttcgtttcttcgtcgtgttgtactgctcgcagttgtaatttgcaagctagccatggaagacaacaatgatgagcataatgtatctcttcctcaggatatccagcacaccattcttgcgtcactacctggctagggttgttctcaagtttcgcacagtgtgtagattctggcgagactgcattcaagaacccaattttgttgatcgtcacctcaacaatgctctccgctcccaccagtccattgcttgcttcacctcggntgatgagggtcttgtctgcatgtacacatttgatcccaccacactgaactgcaaaagcatggatctc

SEQ ID NO: 15289 - DNA, 281 bp, Zea mays
  Clone ID: MRT4577_113948C.1
ctaatcccatagtgaggtgtgcccggcctcatttctgatagatcccgcttgggggaggtggtgtatggttacggagctgtgcatcttgggacatgtagtagcccaggtcagcttgtcactcgctgtgagatggggagattttgtcttttgatttatccctgtagggctggtagggttgtagatgaagggggaatgatctgagcctttgttcccctgacacgtcttgctagccccagggttacagtgggcagggcagagccgcgcagcatctggtgagcggt

SEQ ID NO: 15290 - DNA, 506 bp, Zea mays
  Clone ID: MRT4577_113949C.1
attgggacctcgaggccggcgggccggatccctttcgccaaaacaccgagataccgggtgtccggaatacagacaaaacatattgctccacacagtattctcggacgacaacatgtcaatatgagtttcgctggctgcatggctaagaccaaggggttcaagggtgtgttaagggcataccaagggcggctgaaggacctcgacaaacacatccccacattatcgtcaaggccggtaatgatgccgaggacatgtttcatggtgaacccagaatacattgctcaccacctgacaagtattatgctggagaggtaactgtatcctctatttatttctggccacaatatctcttcccacctccctatatttcattcgagagaaaggtcgtccattctaatgatcaacagctcatgaaagtatatgctgctgacattctcaaatagcagtgaacgcctgctttgacaactacaagaaccctgtctctgccatctgctcatctgatgtac

SEQ ID NO: 15291 - DNA, 258 bp, Zea mays
  Clone ID: MRT4577_11394C.1
gcaagtggctcacccgacgcagagcaagaatttagtatccgcgacatgcaagagctccacaggacgtaccggccagcatagatcgggggcagtctaggccacccagagtgcctgatttgaacaaagaaaattaggcaaaagtacatgcatactcgagggccagagcaccaaggtagcacctcaaccagaagaagacgacgacggtgacgtacgattcgaggaccaagcaagcaagcatgcatgtggcagacatgcatt

SEQ ID NO: 15292 - DNA, 437 bp, Zea mays
  Clone ID: MRT4577_113950C.1
aaaaaaaaaccaaaaatgggttggcacccccccaccggacccaattttggaaaaaaatggggggggggggcttgaaaggggaaaaaaaaaacccccatttaaaatttgggggaaatggggggcgcaaaaccaaaaaacgtaaataaactgggttcaggggtgggggaaaagccccttaaaaaacggaaccacttggggcaaatagaccgcccttggaaccaaaatgggggagaaccccgcccaggggttcttggggtccccctttttcaaaaaaatgtccagggaagaatccccaaaaaaaaggccctgggtttcacccctcacaaccccttttttgaacgggaacagctccggacaaaaaaggggggaaaaactgcccggagggggggggaaacccccgggacccccatagaaccggggggcccaccccaagaaaa

SEQ ID NO: 15293 - DNA, 573 bp, Zea mays
  Clone ID: MRT4577_113951C.1
ccggccgggctagcccgacaggtgaagccgcctccgctgcactgttcatagccaccgcacgagactgtgattggcggttttgctaagacccacactaccaatgcgtatcttaagtcgttccagcctaacgaacacagaatagcgccgctggcaagacaaactacaggggcagcataaagatgattaaccaagacaaaaacacgtacaatacacccaaatccaggtctcgctgcgcgatttaccaacccggacataacaccacaaatcatttctgctagaatgacgcgcgatatggaatcttgcttctgcttactcgcatgagtagccacgatacgcgctcgaagctggtatgaccaactatgcacctgtctactgtactgggcttatgttgactggccgtgtgctcaagacccgggtattaaatagcgaataagaggtcaatgccgaaggacctgaaagaggcacttctttggtgatcattgtgatgagaagacgcctttccgtgctctcttggatgtaggacataataagacttctactgtgaacccggcctttggaggcctcactggatct

SEQ ID NO: 15294 - DNA, 600 bp, Zea mays
  unsure (1)..(600): unsure at all n locations
  Clone ID: MRT4577_113952C.1
gtttcgtttaaaggacttctttttgtacctgggaccctcccaagcgattctttcaacaaatacggaacatcaaatgaccacatcaaactttttgtccgacgagttttcatcacagatgaattcaacgacctccttcctaaatatttaagtttccttcaaggaattgtcgattcggacgacctccctcttaacgtcagtcgggaaactttgcagcaacataaacttctcaaagtcatcaagaagaaattagtaagaaaagcgctggatatgattaagaaattgggtaaagaagaaatggaaaaattctggaaggaatattccacgaatattaagcttggtgtgattgaagatccagcgaataggacgagattggcgaaacttctgatgtttttatcttctaaagagaataaaatgacatctctggctgattatgtttcaagaatgaaaccgaaacaagaacacatctattatgtggccggatcttcaaaagaagaagttcanaaatcaccttttgtggaaaggttaatcaaaaagggatatgaagttatctatttggttgaagcagtcgatgaatatgcgatatcatctttgccccgatac

SEQ ID NO: 15295 - DNA, 335 bp, Zea mays
  Clone ID: MRT4577_113953C.1
tgagtcgtattagtctgtcgcgactatccttgctccctacagtggcggaagcagatattacgcgcgctcaaaaagatacctgcttaggttatcttatgaggaatgcctcttcgggaggatacattgcgcgaaacggcactttgcagtcgtcgatggaatgggtggtcaatgagaagctcctggccgtcaggaccctgtggctcatcggcatcatcggctttatcacctacggtctggtctacgcctgggatcataacgatcgtgaatctcatcaatgcgcatgctgtatgctcacgctcgtcacctcgctgttgtggctcagtacgcgctggtgg

SEQ ID NO: 15296 - DNA, 875 bp, Zea mays
  Clone ID: MRT4577_113954C.1
ggtacccctcgaggccggccgggatattaactcatctgtgtatatggaggtcacgttggatgtatgtatctaaggcgctcctaggaagacaaaagttttgcatccttaatttcagatgcgctttctgcaagctaactagagactggagatgattgagctgcgctgcgccgcgccatcctcttctctgaattgccctgaagacttaggaggctcacaaatctgaagcttatatagatctgcacaggcttaaggagtgtttgcttcgtagcattagtgattggcatggatgaaaccctgcaagcactcgatgatctgatctcccagttcctgagcctggaccggtccctctggtccagttctgacgatgccgaggccttcttagaagccgtggacgaactgacttccaccatccatggcctcgagagcacctcagcggaccatgcgctccttgagagctttgacctccttctagagcgatgttccgcgaggctcaaggatgagttccagcgtctggtgggcacatccggcttcagcgacgacgaccatggtgaccgcagttccaagagaagccagaatgaagacgccaacgaccacacctttgtagcccagccagtcagaaactttgacatcatcgtcgatgccttgccggagggcgtagtcgccgaggcaaaccgaatcgcgacaaggatgattgctgccggttttggcgatacgtgtgcggagacctacgcctctgcacgccgcagcttcattgacgagagcattgctcgacttggggttgacgctcattgggaagaagaagattgtgcaataagtcaacaacagcatgggaggagctcgagactcggatcatgcgctggatacctgaacacgcg

SEQ ID NO: 15297 - DNA, 193 bp, Zea mays
  Clone ID: MRT4577_113955C.1
attcggctcgaggacaaaaacggctctgttttctcacgcatggtcctgccccactggatggtttttattaagctggggtcggcaccacaaccgaccagactaatcctggtgggcctatactcaacacaccttctcaactttacgatacttaaaaataaaaaggcaaggacgaccaggaataccgacatacacc

SEQ ID NO: 15298 - DNA, 561 bp, Zea mays
  Clone ID: MRT4577_113956C.1
aaaaaatagcttattctattagtaagatttcaattcctcaaaatgaaaggaacaaacgggacctaattgaataccacatacacctattaattcaacagatataggaaactcggtacaaattctaacaattcaacttggatccttgcaaccgaaaaaaataaaaccctacaacacaaaatcaaacccttcacccctattcttcatttctcctaaccaaaatcaccgagacaaacacttgaacacaagcgtgtactctgtgctccctccgtttctgctacaccccttgtcttctttgttggattacttcggtcagataatttgaggaagaggaggaacagtggtgccaactgtcgacagctgatttggtaaatgggagaccacgtcgaaatcatgccttccatgtgatgcaccatccagcagatctgttcacctcgtatgcacatccctgtcgcctccaggcatgccatgtttgacagggcatgggctaagcaatgggattgtggcttctatgatgttatggaacagagttgatattgaggaatggtcatgtcccaattttac

SEQ ID NO: 15299 - DNA, 261 bp, Zea mays
  Clone ID: MRT4577_113957C.1
gcggcctccactctggggtacttattacatacgtatacagtttttcgcaactaaaaatccagcaaaatttgggcaaaatacagcttttccaccgggaactttcgacctccatatacttcgctgggggaaaactttataaggaacctcccatcttggccttttatggctcaggggcataagcattcaacagcatgttctactctaaaagaacttgggcagaacgaagggaagacacaacacttcctgtacatccacgccatt

SEQ ID NO: 15300 - DNA, 1053 bp, Zea mays
  Clone ID: MRT4577_113958C.1
gggggacacacccgtccggggacccaaggccgaatccaccaagggctcccaagtctattttttttggtgcctcctttggtacatctggcaatgaaagttcaggcacaccatttactttgacaaccagtccaggacagcttttccggccagcgtcgctaagcattccttcagctcagccagcccaaccatctcaatcaactagttctagttctttttctaattcgttctcaagtgggcttactggatttggacagcctgcacaaattggatctggccagcagtcagcttttgggaagcctgcacagattggagctggtcagcatgcaggatttgggcagactgcccaaattcgacctggttttggccagcctgcccaaattcaatctggttttggccagtcagcacaaatcggaactgggcaacagtcaggatttgggaagcctgcacaaattggggctgtccagtcaggatttgggcagcctgcacagtttgctgctcaacagacacttggatcagtgctgggttcttttggacaacctccccagttaggaggcataggttctggacgatttggtggattttcaagtgcttctacatctgctggttttagttctttatcttcaggtggtggttttgctgctgctgctactggtggaggttttgctgctcttgcttccaaaagtggaggttttgttggtgcagcttcatctggtggtggttttggaggtgcctcccagggaggtggctttggcagtggtggtggtggattcggatcctttggtggtaatcaaggagctgggttctcggcatttggagcaagtggggctggaagaccggcagctgatttcttgacgcagatgagaaggtgtcaacagcagcatcgacggttggtcttggattccctacgggtttctctccagggcgaccaacttgctaaggctttcatggctctctcttcaggttccatggctgcatgaaatgtagaaaaaaaaaaagaggtcgtgtaaaggtcattgcttggacgtgattcccctcctccagctttgtcaatac

SEQ ID NO: 15301 - DNA, 4277 bp, Zea mays
  Clone ID: MRT4577_113959C.1
ctggtgagggcaaagtagctgtatattacctcgccaggatttcggacccttctgatttacctcatgctactgtgtctaccaatgaggactatggtgaaaaacatatttcacctgcaactatatctaaaaggagttgactccaagtgttgcaggctcagtatataagagtactctcacagaacatggtgctgagccatctagtgcgcaaacaggtagcaaccagcaggaatcaataaatgtgaaaaacagtagctcagcttcaaaagaacaggaaacaactgacaattcattgtttatctcttccaataagaagcccttagacaccaagcaagtgaatgtgactggtccacctgcagccttgcgtagcttagcgttaacaggaaacacaaaacctacaatattttccagcttttctactgaaggcatgaatccaacaggaggcaatgcacctaatgaattagcttcttccttgcaaccaagcagcagaagttttggaaacaaccaaactggtaaagaaggcctggattcagttcaatcagtgggaatatttggtggatctcaaaactccaataaagatggtgatgtctatggtttcaacttttcattctgaaacgctaatatcaaaggtaactagtaccatagtttctgcaagttcgacttctgtcatatcagtcactgaaagcaaaccttcagtgcctccaacaactggcgccagcttgccttctactcatgtctctgctcctcaaacagcaccaacaacatcggaatcagttttcacttccacaggaaaaaatgtaggaccaaacactgacaccatctcaaccgatgaagatgacatggaagaggaggcaccttctgcaagtgccgaactgaacttgggagcccttggtggattcggccttgggtcccagccttcttcaagtcctcaaaagtctaatccttttggtgcctcctttggtacatctggcaataaaagttcaggcacaccatttactttgacaaccagtccaggacagcttttccggccagcgtcgctaagcattccttcagctcagccagcccaaccatctcaatcaactagttctagttctttttctaattcgttctcaagtgggcttactggatttggacagcctgcacaaattggatctggccagcagtcagcttacatgtttcaagtttctgctaggcaaacttacatgaaaggaattgttagccagtcttcagataatcagtactgggatatatggaaccgtcagaaattgagtccagaatttgaagtaaagagacaaaatattctcagagctaaccaggatttgacaaatcagctggttgagctggagaggcacttcaataatctggagatgaacagatccagtgaaacaggaagagtggcttctaatcgaagagctgtttattctaataagacaagttcgagtcagacacaattatccagtgtatatagtgcactgaactcgcagttggcagctgctgagcagctatctgaatgcctttcaaagcagatatctgtgttaaatattggttctcctagtaggaagcaggggatggtgaccaaaatgttgtttgagtcacttgatttagcccatacaactgttgcgcccaaattttcaggtagcattgctagggcagttatcatcttgccggcagtgtttggaggttccctccgagggtggtggttttccaagtggtggtggtggattcggatcctttggtggtaatcaaggagctgggttctcggcatttggagcaagtggggctggaagaccggcagctgatttcttgacgcagatgagaaagtaggctccaggcaaatccccagacaggtttacgcattagctatagcatacacatgaggcgagttacttttatgttccactcttaagcgttgtttcggcacaggagctgtagcataaacatgaccgcagtataccctggactggatgagccctctcttcgctccatctattgatggagccggggggtcaaaatttgggagccttattgtgggtcctccctttactcagagcaaaagcatttcgagttaccagggcaaatgaaaagtactgcacagtcttcaaaactgacaccatcttcaccaccatcattcagttacacacgtatgggtgcacaagatagtatcaacccatccagcgttccatccttcggaacaaaacatactgtgtctaagccaaatactctaaccttcaaaaccactataagccctaaaagtaatgccaacacagagccaaatatattaccttctataacagctccaaaaacttctctaagtccactgtctgtaaaaactgctggggagtctggagatttgcctacattaaccatgaagaacagacaggatggtcagtcaatgccatctttggggaacataaaaggaccgggtgcttctctgcagaacaagggtggcatatttagagatctcgacaaatcgtcttttaattctgaacattccaagcctgctgcattacatgagaagactgaccagctaagtggggttggcgatgctgtgcagaacactgtgaaagatatctccaaaatggcacctcaaccttctgcattcttgccagctcctgttactcagaccaattcatactccttaaggccgactgtttcttcttcagccacatcaggtgcgaaaacttcggatgttttatctagttcaatgcagaaagtttctccaatagtacctgggggtactgtgtctagctcagtccctactcctgctaaggattcatcaactggattgagtcaaaatgcttccaaacctgaaacgctaatatcaaaggtaactagtaccatagtttctgcaagttcgacttctgtcatatcagtcactgaaagcaaaccttcagtgcctccaacaactggcgccagcttgccttctactcatgtctctgctcctcaaacagcaccaacaacatcggaatcagttttcacttccacaggaaaaaatgtaggaccaaacactgacaccatctcaaccgatgaagatgacatggaagaggaggcaccttctgcaagtgccgaactaaacttgggagcccttggtggattcggccttgggtcccagccttcttcaagtcctcaaaagtctaatccttttggtgcctcctttggtacatctggcaataaaagttcaggcacaccatttactttgacaaccagtccaggacagcttttccggccagcgtcgctaagcattccttcagctcagccagcccaaccatctcaatcaactagttctagttctttttctaattcgttctcaagtgggcttactggatttggacagcctgcacaaattggatctggccagcagtcagcttttgggaagcctgcacagattggagctggccagcatgcaggatttgggcagactgcccaaattcaatctggttttggccagcctgcccaaattcaatctggttttggccagtcagcacaaatcggaactgggcaacagtcaggatttgggaagcctgcacaaattggggctgtccagtcaggatttgggcagcctgcacagtttgctgctcaacagacacttggatcagtgctgggttcttttggacaacctccccagttaggaggcataggttctggaggatttggtggattttcaagtgcttctacatctgctggttttagttctttatcttcaggtaatgctggatttgctggtgctgcatcaggtgggggcttttcagcaccaactgcttctgcaggtggtggttttgctgctgctgctactggtggaggttttgctgctcttgcttccaaaagtggtggttttgttggtgcagcttcatctggtggtggttttggaggtgcctcccagggaggtggctttggcagtggtggtggtggattcggatcctttggtggtaatcaaggagctgggttctcggcatttggagcaagtggggctggaagaccggcagctgatttcttgacgcagatgagaaagtaggctccaggcaaatccccagacaggtttacgcattagctatagcatacacatgaggcgagttacttttatgttccactcttaagcgttgtttcggcacaggagctgtagcataaacatgaccgcagtataccctggactggatgagccctcgcttcgctccatctattgatgatggaggggggctaccatttgggagccttattgttttctcttcttttacaagacacagcaggtgtcaacagcagcatcgacggttggtcttggattc

SEQ ID NO: 15302 - DNA, 352 bp, Zea mays
  Clone ID: MRT4577_11395C.1
gtcaggtaggttgacatggaccgttgggagttcgtgcacgagtcgttcctgcggtgtcaggcgtgccttctgtcgttggtcgtgcgcatgaggttaattgcgttcgccggcgtggcgctttggcctggagctgtgcgaggtcggggaggattgcgcggtgaccatccgggccgtgcagcgcctgtttgagcatcagcgcgtggtggagtacgatcttcggtccatggatcgcctccttcgcgccgccgagatccggccgtcccagatgattgcgttcctctccaagctctccgacgacccgggcctcgtgctgcgcgccaaactctttaaggaggaggagctggccctgatc

SEQ ID NO: 15303 - DNA, 302 bp, Zea mays
  Clone ID: MRT4577_113960C.1
atacgacccttttttcggttaagcccaattaaaacatgtcgtttcaccaaacacaactcctggagaaaaaaaatgtgagacaatgaaggttactttgttacatgccgtggcccgacaaaagtgtttctcccgacctatgccaaactgtaaaaaaatcaagtgttgtctccttgcttgatcacaccctcacacactgaacataaagcattcatcgccaattttattaattggcccccatgccccaacaaaacatcatctttttttctccaacttctccttccccgaccactgggctttttttt

SEQ ID NO: 15304 - DNA, 2688 bp, Zea mays
  unsure (1)..(2688): unsure at all n locations
  Clone ID: MRT4577_113961C.1
attcattggctcgcgctcggcagtcggcacgacggtacttggacttggctattcccaacgccaccccgcaaccgcaacgtctctctagcgtctagcctctgcctgcgctcccacaccagaacaccacaccgctccgcgtgcgtcgcccgcactcctcgcctctgcccgtctgcctaccgtgccgtgccgtgccgtgctccccacccgatgcagccgccgacgcgggccgtgccgagccacagccggagatgagctccaggaaccgttccgccgccgcctcgtccgctgccccggctctccggacaccgcgccgcctgaagcggcggccagttaaggcgtcggcgccggggccgggcagcgggcggcggagcgggcccgcgacgccgctgctgaaatgggacgtcggtggcggcggcgggcgcggtgaggggaggaaggctggcgccgacgaagcgggggacgccgcgcgggcgcgggagaccaaggcgaaggcgacggaggtgtcggtgcggaggctcgcggccggggtttggcggctgcgcccgccggaggccgtggccggcggcgggagcggggtccgcgtgggcgtcgagcatatcccaaggcatctacaagtccagcttctgaagcagaacacttcaggtcatcaccagagttcgaagaatgaggtttcaagccccatatctgttttggagcggaagagtggagagctccacaagggacaacttcatgctacttctgctatgctgcctgtcgctaccatggagaaggcaacgaaatgggagcctggggacataaagggacaagaatctgagacagagaggaaggcgcgtgagctcaccgaggaggtatgcaacgagctagcaagagaggtgggggaagacaaagctgagattgaggccttgaaacgggactgcctgaggttgcgagaggagatagacgatgaacggaagatgctcctgaccacttgttcaagaaccttgcggacgagaacgcggcttgctggaacatgcaaaatgaaatcttgcgtgctaatctccacagctggaaggcctgcaacacgatgaggagaaaaaccggaggcggctggagatgattaacatgaaactcgtcaacgagctgaaggaggccaagatgtcagcaaaacagctgttacaagagtatgagacagagaggaaagcacgtgagctcactgaggaggtgtgcaacgagctagcaagagaggtggatgaagacaaagctgagatcgaggccctgaaacgggactcccagaggttgcgagaggaggtagacgaggaacggaagatgctgcagatggcggaggtgtggcgtgaagaacgggtgcagatgaagcttgttgatgcaaaacttactctcgacgcaaaatacacacagctgagcaaactgcaacaggatgttgaggcgtttattgctgcatgcagtactgctaatggagacgtcacggtagtagagcaagcagagagcataatacaggcaatcaagtcagtcagagcccaagatgctgagttcaggtacgagccaccggccgcatcagaagacatattttccatttttgaagagctgcgtccaagtgaggagcctgtcatcaaggagatcgagccatgttacaagaatagctctgccaaatgtgaaccagaaattcaagaggttagcccaatgaccgatatattcctcgaaaagaaagccaaggcaaactcgaacaaaagccctaaagatgaaagcgacactgaagatggcagcagctgggagacaataagccacgaagatgtccagggttcaagcggttcacctgatggaagcgagccttcggtcagcaacaaggtctgcgacggaagcattccttggaagagcagaaatggattcgagcgtatggagagtgagaagctgaaggatgagtcagctgatgcctgcctgacaaacatgaaccagcccaagaagaaagaatcggccatttcaaagctctggaagtcgtcccgcccaaagaacagcgagatatgcaagaaagacgcagttgaaacggtaaatgcaagatcgtcaaacgtgcggctctcagtcgggacctattccactgttgaaagtggcatccaagaaatagggctcagtccaccgtgtgttgagcagtggagctcaccagactcgatgaacgtccaattcaaccggggattcaagggctgtatagagtacccgcggatgtcccagaagcacagcttgaaggcgaagctcatggaggcacggttggagagccataaggtccagctccgccaggtgctcaagcagaagatctagtgcaggccagaaccagaaggcgaaacattgtaaacctagcattcaatccaaggaataatgtaaaggagtacctagatgcttcgtttttcatgttttagagtaacctgtattgcatgtacaacaaggactagaaaaaaaaaggacagggctggtctttgaggtctatctggagcctttgctgcttctgtatcttactttagttttggtgttattgtttgatctgataggctatggtgagatccatcatgatgtgacataaacaagtagcaacgttgagacaaattgcatacctttgtatgcagtttccctatgtttacctgtataaccattttgtgtgtgtgtnnnnnnntcgagagtctctagaacgaccgcgggccctcg

SEQ ID NO: 15305 - DNA, 479 bp, Zea mays
  unsure (1)..(479): unsure at all n locations
  Clone ID: MRT4577_113962C.1
tcggtgngttttgctttttgttctcaagtataaaaggaaagcatctgcaatattgtaaagtggcttttggcattagacacaactgaacttggaaagcaagaaagaataaatcgcatactttgttcgtcaaaaaaaaaaaaaaaaaaaaaaaatataataaaaaaaaaaaaaaaccaaaaaaaaaaaaaaaaaaaaaaaaaaaaaaaaaaaaaaaaaaaaaaaaaaaaaaaaaaaaaaaaaaaaaaaaaaaaaaaaaaaaaaaaaaaaaaaaaaaaaaaaaaaaaaaaaaaaaaaaaaaggggggggcccttttaaaaaacccaatttttactcccggggtttgcaaattaaaatttttttttttggggccccaaaattaaatttatgggccctgtttttaaaaccttggggtgggaaaaacccgtggtttccccaaattaattcccttgaaaaaaaacccctttttccccattggggtt

SEQ ID NO: 15306 - DNA, 448 bp, Zea mays
  Clone ID: MRT4577_113963C.1
gctggaattcggttcggggtttttcctcaccggcaccttttgtaaaacagcacatctttctttctatctggggcttttttgaagtggatcaggggacttacccggtgaaactatgaaaccgctggacctttgacgatgtccaggtgaacgatttctgactaaacgactacctggctgtgactgcggcaaagcacgcaacattattgcaccactcataggggcgctactccaagaagcggttacagaaggcgcaatgcgccatcgtggagcgcctaaccaactagcttatgatgcacgggcccatcaacagcactaaggtcctggccgtccgcatcatgaatcgctccctggagatcatccacctgctgactgacgccaatgccatgcagatggacgtggacgccattattaacagtggaccacgtcaggatgccacccgtattggttc

SEQ ID NO: 15307 - DNA, 272 bp, Zea mays
  Clone ID: MRT4577_113964C.1
acgctcggcacgcaggcagaggcagcatagctgcagccaactccatccatcctcggtcccctcctcgctgcgcttgctcggcggattcctcctccctctaccgtccccgttcccgtgcacttgcggcgcgcgtgctcgcccgagatggcatacgccagatctggtgtcgctgtgaatgacgagagcatgctcaagttcgtcgagctgcactcgaagaggctgcaccggttcctaactttcaagattgacgacaagttcatggtgatcgttgt

SEQ ID NO: 15308 - DNA, 383 bp, Zea mays
  Clone ID: MRT4577_113965C.1
ttctttttttttttttttttttttttttttttttggtttttttttttttttttttttttttttctttttgaaaggggaaaagtttttaaatcctcacccccatccttattccggcctccagagtaaaaaaaaatgcccggagaatggggtttgggtaaaccaggcactttttgtcccaaataaactgctttcctaagaatttttaatggggccgggaaacccaaacccgggtgtgggcttaaaaaacctttaaacttgggaaaaacaggacccgttccgcttggcaccaacataaaagttccccgcgccaggggccccaggatccaagccccgttcaagggggggcctgggcaaccccctaaaatcgggccttttttttgagg

SEQ ID NO: 15309 - DNA, 285 bp, Zea mays
  Clone ID: MRT4577_113966C.1
ggggggggggtttttttttttttttttttttttttgggcgaacgacttgcttttccactgcctgatttcagggcattggaaaagaatttattcccccccaaaaaaaaaaccgctggtttgttaccgcccgggccccaaattaaaaaccaaattgtccctatggggaagggggcccctcccaatttaaaacatccttccctatgggggaaaaaaaagggaccacccttgcgggccttaggggggaccacccccttcctccttttaagggtttggcacccgccccgg

SEQ ID NO: 15310 - DNA, 442 bp, Zea mays
  Clone ID: MRT4577_113967C.1
cccgggtcgacgcaagactctacagtcactcgtgttatgatttgtgacactacaaaggacatcctcttttctaggttcctcttcacaaactaatttaagggtgtcatctgaatttctcttcctttgccttttgatgtcatttttgtagtgttctgcctgaacactttccatgttttaaacatctgatacattcatacatccaagtgttactttttgtggactgctaagtttgtacgcttgcctgttaaagtaaaatgttaatatgccatagtctgacacttggttagagacatttaacgatcttaaatggttcatttcgtttcgcctgttatttataggttgtctgcacttctagtttttatttgatagaatcatatgatttttttcaggaggttttgtttttcgaggaaggagagcctaagattgatggtgaacctggcga

SEQ ID NO: 15311 - DNA, 228 bp, Zea mays
  Clone ID: MRT4577_113968C.1
cttgccccatgcgatgaggctgttgcctgcgatcgtgatgtaatgtgctggtattctcgaatgccatggcccatagtcggccatggcttgggatagcgtagtggctgactgatatgccagtgggcgcctgtctagtgcttgcggagctgcggggggtttgtgctatacatgtatgggcggccttatgagtggctatgtgtgtacctgtcctaacgcttaagaggggga

SEQ ID NO: 15312 - DNA, 446 bp, Zea mays
  Clone ID: MRT4577_113969C.1
gcggcgctcgagccggccgtctcgcgaacctccctaatcaataatccacacgacgagtcgcaccgaacaaagaagctcgcctcagatacatgaagcgcgcagcaccagtgcgttaccaccactgggtggactactgctcggagaacgcgaggtggccgaacgcgagggccttcggccgacacgtcctaggcaggcagcagcaccgccgcaaggagaagatcgagctagtcgacaaggactcagacgcccggggcggccaccaccaccaccacggcctccaccatgcccacggcttccaagtccccaacatgagagccgaagaggacatccacacctgcaccggagagccccacagatcccacttaaagcttcctcgccagcgctaactgaccccaccatcgcccggaatccatgcctgttcgagaatgcctgcatgccttatgtat

SEQ ID NO: 15313 - DNA, 192 bp, Zea mays
  Clone ID: MRT4577_11396C.1
ccctctcatttctacaccctctcacctcaaaattcatcctcctttctacagggatgcgtttaaatatatgaccattccccaaaccacatccttctctatggcctcatcttccaccatcattcacttcctatacctctatatctatccttctcacctcctctttcttaatttaacatatattactccatctct

SEQ ID NO: 15314 - DNA, 601 bp, Zea mays
  Clone ID: MRT4577_113970C.1
ccaacgcccaggcagccgcgccccgctgcccagcgaccgcaccagcacacagagtccccagccgcgcgctgatgctccgaccccgtgcagcccggcagcgtgcccagccgcccgatgtcctgcacgacccgagccccagccacgctaggccgccctgcatcgacgccaacctgcaccgcgcctgaccgagccccacggctgactccgagcccgcgccgtccgttcgccgtcccggcgtcaatggcgttttattggagccgttactcctctcccattattctctctgttgatgaatgcaattaatggtgtttgatgacgcaggctgactctccctctcctctccctctataaattggagacggatctcctctccctcccacaacagaactctcctcctctccgagctccctctctctctcgctctccccattcctgagctcgtcattgaacctctgctgctcgcacagcgacgctggtccctgctgttgtttccccgccgtccaaacgcatcaccgtcgcagttcgccgtcgtgaagttcgtcaccggaccgtccgcgcgcccgtttgttgttcaacggagctccgcctgtgcccacgccgt

SEQ ID NO: 15315 - DNA, 262 bp, Zea mays
  Clone ID: MRT4577_113971C.1
tttaaaaccacaaggagacggtaaaggcggttcaacaccggtcgtactcatatgctgcagtgaatttcataacaacacccacagcgcccgtcatccggacaccacttttgaacggggagacatcatagtgagaacccatgaaaacacgggattccagctcgggccctgtattgcccaccttgcactgccgattaaaggtcatggtggttatctatccttgagccttttgtacaacacgcgcatttactgctgaaaaggggcc

SEQ ID NO: 15316 - DNA, 286 bp, Zea mays
  Clone ID: MRT4577_113972C.1
gccagacgacaagtatctggatgtactgcgcaagactactaccctatgtgctgtttgaacacgcgagtaggaagcttcagcaaaaaacgcattgtgcatgacagatactaaagggggtcatatgggctaacatcacatttttggcctagagggatatctccgaagtgtacctgaagacacttaccacgatcggccgatcttgctccggcgaggatatcgatcgatacataacaggttgactgatctcaacctaatggatactaaaatgcgttggattatcatgctg

SEQ ID NO: 15317 - DNA, 763 bp, Zea mays
  Clone ID: MRT4577_113973C.1
aattaaacgaggggcatgggattaatgggcatggaataaattgcattgaatcagtgcatggcgacgattttgtcatccaagtgatggcagtgcaccatggtagccaacgagaggtagtgtgacacgacagcagttgtatagttcttttaggtgagggggtaacagtggtatagatcaagcttattcacgactcatctaccaaaactcgacggcaagcctatcccaagtccataagctttgcagtgttacaccatggtccgaaacaaaaggacacgcaagctggcagaactcgtcaaggacacctggtagcgtcttgccatccaagagctccaggctcgcgccaccaccggtccaaatgtggcctcatcttgtcagccagcccagcctctcaacagcagcaacagagttagttaccgccgccgacgatggttgtgacatccgttagcgttgtaagctcagccagcttcttggcaatcgcaccgcagcatttacgaagcagatgttgtccgaagtgatcaccctcctcataacaccttccatttcgactggcctacagggattgttgaaagcaaacaccccaggcctccttcgcaaaatcaggaccacagcttcattaaaagcgaatctatgcaattaccaatcagaaagtcatggaagaaacttctgctgcaatcaaactctgaccaggtggcttcctgacaattgcttcagtccttatcttccttctaatggtatccactttcccggccggcctcgagggtcc

SEQ ID NO: 15318 - DNA, 253 bp, Zea mays
  Clone ID: MRT4577_113974C.1
gaccctgaaaggaatcacacatttttatgctttctgtgaagaaaggcacaaaggggattgggtgaatacactctggtcaaagctttaaattaatcaattcattttattctgcaactctgtttatagagttgatctgctggctaaaaaaataactgtactaggttattcatgcttctacatgcatgctaagatgttgcaagaccacagaaattgagtttttcatgattttcataatggagcttgcagaaacctt

SEQ ID NO: 15319 - DNA, 817 bp, Zea mays
  Clone ID: MRT4577_113975C.1
gcgcggaccgtccgggccagcggcggctgatcctatttttagaagcgaattaccgagacctgcacccaagccaccacatgccatacaaaccctagataacccattcgaaccgtctgcgtatggcgccagacagtccgaatacaatgtcggacggtccggccacatggccggacagtccgcgcacggagtcggacggtccgcgtatttaaccagacggtccggcacagagtttttaaggaggatgtatatccaactccgtatccgtcccagctagactccccatctcaccatacgacacaccagcaccataatataatctatcaaacccatgagagtgagtactttccggcccctagaaggccagaaaggaatggccagtcctatgagcctcatagggcatgcattaacgcgccgcaaaacccaaaccaatggggaggaaaacaacataccaacatccaaacaaactcacccatattggatcaaagagccggtggtctcccaccggctgccatcgatatagtaagggaggaaataactggggcgttccgagataagctcggagttagtatagtccccggggggcagtcatatcgaagaccttatgatagccagtttgaccggctcccatacccacaagggactagaatacctgaattcgcaaagttttcaggtgaccaagaaaagagcacgcgtgaacacatagaacagttcttagcacagttagaagaattggccgacaccgaagcattctgtatacgtttattttcattatctttaataggaactgcattcacatggtatgccacgctccctccta

SEQ ID NO: 15320 - DNA, 1541 bp, Zea mays
  Clone ID: MRT4577_113976C.1
ctcgaggccggccgggaaaatgtctcgaaaaattagaaccgcacagtccgtctccttcgacatccccgccgctgagcaaccatatctacacaacagatggcacccagaggttccaagcattgcaaccgttgaaccaggagagacagtcaagattgaatgtctcgattggacaggcggccaaatcggaaacaacgacagtgccgatgatgtccgcgatgtcgatctcacaaagatccactatctcactggaccctttgaaataaaaggcagtgaacctggcgatttgctcgtcgtcaacatcactgatattcagccctttgaccattcaccctggggtttcacaggagtcttttcaaaggacaacggcggcggtttcctctccgagcattaccccgatgcagctaaagcaatctgggattttgacggtgtttattgttccagccgtcatatccccggtgtccgattcccgggattgatccaccccggtattcttggctgtgcgccatctgctgaaatcctggccgagtggaaccgtcgtgagggagagctagctacttcgatggccgggcctcatcccgataaagtgtttgcgcaacctccctgcgagattaatgctcatggtggactagccaaaggtgatgttatggctaggatcgcaaaggagggagcgagaactattcccggcagacctgagcatggaggaaactgtgacattaacaatatttcccggggatcaaagacgtatctccccgttcatgttcctggagccaagttttctgttggagaccttcattttagccagggtgatggtgagattagtttctgcggtgctatcgaaatggctggtatcatcactatcaaattcgacctcatcaagggtggagtcaagtcgagaggtctcaagagtccagtttatcgaccaggtgatatgggtcctacctttagtccgtcgcgatatctcacatttgagggattctctgtcgacgagcaaggaaagcaacattttatggatgccacaattgcttaccgacaatcttgtctccgtgcgatagaatatctcaaacaatttggctactccggcgaacaaatctatctcctcctgtcctgtgcaccaatcagaggagctattgctggcatagtcgacattcccaacgcttgtaccacgctgggcatacccatggatatctttgactttgacatttccatcgaaagtgagcctgttgttaggaatctgggagcttgtccaatttctcgctaagtttggaggccgacatctcgcttgaactcttgcagccattctgcattgtcgactggtgtttggttccatggatcatcactgggctgttagcggtgaaattgtaaggagcacggaacttactcgtcgtacaagatccatcttgcttggtatttgagttcatcgtcggatggaacatgacgatttggattattaggcgacattgtagtcatgacgaatcttgacaattctctctttaaccttcggtagctgttgttgtcgtttataaagaatggggttgctgttc

SEQ ID NO: 15321 - DNA, 329 bp, Zea mays
  Clone ID: MRT4577_113977C.1
cttcggggccaccttcattcctgggaaggcctgccttccccaagcctgtttttattgggtgaagatagcctgatgcatcaagggcacatgggacctgcacaatggaactcacatgcgttacctgaaggtgctgagcgacatcgtacaggcgcataccaagccgtcaactctgttgctgtcgcaaaaactcagcgttagctggatgccttaactgatgtacgtcacaacacacaactgacgctagatctcactgcagtactttaatctggaccctgaacttcaatgtgaccctcaacaccgtatactcgaaggaacctatgattctgtta

SEQ ID NO: 15322 - DNA, 313 bp, Zea mays
  Clone ID: MRT4577_113978C.1
cccacgcgtccgcggacgcgtggtgccggagatccatgcctttgtgagctcgagtggagagaaggaattaaggagcagtgaatagcgatacgaccgacatgctggagaagctgtgggacgacgtggtggcctggcctcgctccggagacggtcctcgtgaagctacgcaaggccaccaccgtccgaccgatcgtagtcgtcgacaaagaaatgactacatgcatcttctgatctgctggattgagtacattgaacacttgggggacacatttggcgaagaacacggtcatctttatcttctactttctttaag

SEQ ID NO: 15323 - DNA, 444 bp, Zea mays
  Clone ID: MRT4577_113979C.1
caagcacccgcacgtaagctcggaattcggctcgagattccttccatctcccatttacttcctcagacccgagaagcgcagctgcggccatggacgccaccggcactggagctggagggaaggcgaagaagggagcggccggtcgcaaggccagcgggccgaggaagaagaccgtgacgaggtccgagaaggccgggctccagttccccgccggccgcatcgggcgctacctcaagaagggccgctacgcgcagcgcgtcggcagtagtgcccccgtctacctcgcggacgacctggagcacatcgccgctgaggacctggagctcgccggagactctaacaatgacaccaagaagacgcgcatcgtaccgagccccgggccgctggcgatccccaaccacaaaggagcccgagaagctgctgaccggcgtgaaccatcgccca

SEQ ID NO: 15324 - DNA, 481 bp, Zea mays
  Clone ID: MRT4577_11397C.1
ggccgcttttttttttttttttttctttttttttttttttttttttttttttttttttttttttttttttttctccacggctctatcagagcttgctttccacgggagcccttttttttagcgcgcccccaactgacagttttggggaacatataacggagtccgggggaggaactctaacactaccgacgtgcttggaaaacacataatgctgaacaggggaaaaaaacggagtccctgcacgctctaaagaaacccactttcatggcagaactcaacgcttgccggaattgattccttcaggggcctgaccttccatccaagctttttgagcttgtagaacgtaattgtaacggggcgctccatgtagtaaatgctgtccttcccacggaatggggaatcgtcaagctcaattgtgtttaacagatgctggaggtcacgcacgctcaagaaatgaagaacccccatgtgcccgcccgag

SEQ ID NO: 15325 - DNA, 544 bp, Zea mays
  unsure (1)..(544): unsure at all n locations
  Clone ID: MRT4577_113980C.1
aattcggcacgaggctcctgagtcctgacctcctctctctctctctctcttctctgtcaaaaggattctcgcgaaggagcaggagtggtcggtggcctgcggcgcagaccgcagagcatgtgagagctgcggcggctggggggtggagcctgggatgggcgtgggaggaggcggagggcaggccgcggtgtcggcgccggcgccggtgccggcggaggaggcggggaaggatgcggaggagggcggcgggtggaccgtgaaggcgaagctgatcgccgcggcggtgctggtgtgggtgctgggctccgcggcgctctgggtgttcctgcactcctacttccgccacgcggcgctgcgcaaggcggaggaggcgctcgtcagcatgtgcgaggagcgcgcgcgcatgctgcaggaccagttcgccgtctccgtcaaccacgtccacgccctcgccatcctcgtcgccaccttccactacgagaagcacccgcccgcgctcgaccagagcacggtcgcggattacaccgncaggacgtcgttcgag

SEQ ID NO: 15326 - DNA, 342 bp, Zea mays
  Clone ID: MRT4577_113981C.1
caagaaatctgatatatattcgggggggggaaaacaaaagggaaactgaagcaccttcacaaacagcccaaccaaaaccatgtttcacaagtggaggggaacaaagcgaacccctcgatttacatttaacccacctaaacccactttcccgggagaaccccgttccaacaaataatataaccacgcccgcacattacccctttggatgctcaatctccaccccctcagggggggcagggccacacataacctcgacccaccggtgcagcaaaacccccagggcagcagaaaatcgcccatccctgggcaaataagggccgcccacctgcaaaaaaacacacc

SEQ ID NO: 15327 - DNA, 391 bp, Zea mays
  unsure (1)..(391): unsure at all n locations
  Clone ID: MRT4577_113982C.1
catcttggcacatcgctngcatcagcgaatatgtgacactaccattactctgtggcgagattgactcaaatgtattatctggaacgacagacctcggtggtacatgatcttgaagggcataccaaagcctgccataggcagccctcaatcccgtaaggaatcactaaatcgtctataggcctggaacatctcaaagcgtccctgggctgcggaatgatggggaccaagtgcaacctggattcaaacttgcatcctcgtcatctactatgaagacccctgcagctccacctcaatctttgcctccaccttcactgtaatctccatctccatctacactagcagctcagcagaaaccaaagcgaaagccaaaatctccaagccttcttttggg

SEQ ID NO: 15328 - DNA, 325 bp, Zea mays
  Clone ID: MRT4577_113983C.1
cctacgtgtgcgcaccatcctgcttgtgccagttacttgtgagagaagagatgggaggagcgtacctgcagccaccggatccacacagtcacagccacaaagcgtcgagcagaaaacctaggtgtttcctgttcaaaactacctgcgcttggatcgcctgtggttttctctacttggctctgctccacctgctctgctgctcccccgccggcagtcaacgagcgaaggtctctcctctgctccagtacattaacaacacgtgcttcttcgtttcaacagttccaggttctggtcctgcggtggatgtggaagaggaagagaggga

SEQ ID NO: 15329 - DNA, 166 bp, Zea mays
  Clone ID: MRT4577_113984C.1
cagacgcagacagcggtgaccgagtgagaggaaggcggcggcggcggcggcggcggcggcgtgaagtcactgctgcctgggttcgggttggcgactgaaggcggtaccggcctcccggaacagcccgggggagggcttaggtgcagaagggcaggctggccgcggc

SEQ ID NO: 15330 - DNA, 248 bp, Zea mays
  Clone ID: MRT4577_113985C.1
acgctctactgcgccgcggctgacgaccccaacctcgcccactacgttagacaaggacgaatgtactgcggcaccgcgtcgcgccgggttcgtgaccaacgtgaccgagtacatcgcgggcgccaaggagaggctggagtgcaagcacttcagcaccggcaagctttagcgcgccatcgacgggtgtaccgacgcgaccgggacctacacgatcgagctcaatgacagttcacgaggaggacatttgt

SEQ ID NO: 15331 - DNA, 317 bp, Zea mays
  Clone ID: MRT4577_113986C.1
tcgcgcacgcgtacgcccacgcgtacgctctgctcccggctcccccacggtactccagccgctaacctgcgattacggcagtgcgccaccaccaccgagcctggactaccgccgccggccttcgacgatattttcaggggtgaacagcgcccaccatatcccgcccctgcgatggagttcgcggtgaaacccaaagcatacccgctggctgatgcccatctgacgatagggatcctccatatcatccacgaggccgcccactaccaacagcctaagaagggggcgaatgaagccgcgaacaccctgaataggggcat

SEQ ID NO: 15332 - DNA, 2185 bp, Zea mays
  Clone ID: MRT4577_113987C.1
cttctcggggcctggcgatttgaattcgagtggtgcgtgtatagagcgtgagagagagaaaagagagtggctcttgcgctctgcagtccagttcttgaatccagagctgcgattcgtgctcgcctgacgccgatgggccggagcctgagcccgctgctacggcaggagctggacaacctggacaaggacgctgacagccgccgcgccgccatgaaggcgctcaagtcgtacgccagacacctggactccaagtccatcccgcacttcctcgccgaggtctccgacaccaccgcggccggcgccggcgccggcagcggcatgcccaccggcggcgagttcaccatctcgctctacgaggtgctggcgcgggtgcacggccgcaacatcgtgccgcagatcggcaacatcatggccaccatcatgtgcacgctctcctccagcgggggctccttcccgctccaccaggcctgctccaaggtggtgcccgccatcgcgcggcacggcatcgacccctccgcgcccgacggggagaaggccggcatcatcgcctccctctgcaggccgctctgcagcgcgctcatgggggggagccaggacggcggcgccgcctccggcgcggcgctgtgcctgaaggcgctcgtcgagtccagcaactggaggttcgcgtccggggagctggtgaacgaggtctgcctcaaggtggccggggcgatgcacgacagcgcgacgcggtcgaacgcgcacatgggcctcgccatggccctggtgaagcacaacggcctgatcgcggaggcgtacgcgaggtccatcgtgcgctccgggctgcagatccttgatggggacacggcggatagcagctcccagaagcgcctctcggcgatccagatgatcaatttcttcatgaagttcgttgaccccaggtgcctgtcttcagagcttggcagggtgattgatgtgatggagcggtgccagaatgaccgcatgcctttcgtccgaggtgctgcgtttgaggcatcacagagtgcgaggaacatcgccgcgcagaagggatcaagacatgaggttggcacgagcccgatggttggctccaatttccacaagagaagggagaagagcccatgccggagcctctggggtgccaagcgcagccctgcagcctccaccatggctgctgcttctccagtccagttcagatccccggaatcgcaggttgtggattcatccatcatgaacggcagcacgctccacgactcaccggtctcagtcgggcagtcctcttgcaactttgatcagagtcggcgcacgaaccggaggttgtggagcaatgatgccgttgatgtttctctgaaggatggcttgttcattcagctttgctcaaacagcaattcctatgaagatgacttgggcgaggtctgtgacagtgaagtgactgatgctaactttgagtgtaccaacacatttgcagggtttgtgtcaccaagccacaatggttccatatcaagggacaagactcccagtcccagggcttcagacaggccgataaatattgatgacgtgaagatatactcaacaccaaggaagcttctccgattgcttcaaagctcatacgactctgactctgctagcaacatcggacagtccactgcaaagctcagaggcttgtcgtcaccagatcaggaacacaagggactagtgatctcatctgaacagatgcaatctctgcattcagacaacaagggtgatgagatgaaagatgagaacgaaaccatttatatgcagaacagcaaaggtcggactcagactctatccaatgctgatgcatcagtactttccactaccgaggctgagaacacatccatcaagacttcccctgaaattgagctcaatggggatgatgtctgtattacaagcagcatagggaagaccaggaagtatagagcaaaattcactttgtttctgagcgtgatcgtgatctttttagcaatcatcaccatgctcatcaggatagagaatgatgatgattcagcgtaccttgtccccacttaatattttgtatgcttcattgctgtctgtttaaattcctatttttattttatcactatagagtggtttgtgttttgaacaattttgcagtcatctatccatgaatgacagcaaataattaaattagaattttcatgctcac

SEQ ID NO: 15333 - DNA, 311 bp, Zea mays
  Clone ID: MRT4577_113988C.1
acaatcttattgcgtcttatcccagcccttagccattctatggtgacatggcgggcggcctcatgtgcgcaaaagcgaaaatgctactgcacaatgtgccacctgctctactagtgcgattcatgaaggagcatcgttctgaatgggctgaccctggtgaatgatgcttattcccgtagccctttgacaggccaacccatattctgcttcctgtataaaggcttgcgggcttatgggccaccagactatactacccctagacgcaccgtggagcatgaacagtgctacgaggttatccgacttcaaagaca

SEQ ID NO: 15334 - DNA, 268 bp, Zea mays
  unsure (1)..(268): unsure at all n locations
  Clone ID: MRT4577_113989C.1
tcatncgtccgnacggctaacacnancnagcaagcaagtcactgagtagctagcantatataccaccataaaaacaacacacacacacacgtncgcnantaagctaagcttaatggcggtagcgtagctcctctcgatctccggctcggacggangacgttgccatggctgctcaactgcatcacgcactanacgagctgctgcacgnagcagcngnngcgnaacgagtctgctgctcgcgancccttctccctgctgctcctgccgt

SEQ ID NO: 15335 - DNA, 203 bp, Zea mays
  Clone ID: MRT4577_11398C.1
ccgccgaccggccggaaacccggggggacccacgcgaccgggcaggagcccaaggagaacatttctaacccgaaccgacgcgcgcggaccaggggcatggacaaggacgcggggggccgcggacacagcgccgcggacgcgccggaaagcaagagctaggacgacgccaccaaaggcgacggcggcgggacgcccgagcagag

SEQ ID NO: 15336 - DNA, 307 bp, Zea mays
  unsure (1)..(307): unsure at all n locations
  Clone ID: MRT4577_113990C.1
tcttattttcttctaactgcactctgtatcttcagttgtgtcttaattatagagatacaaatcatcttccggatgttcatacangacctcatctttggtaaagcagaaaatggacaaaaaatctctcagatatggttgtgttgatcattcgtttatgaatcccaaatagtgtcctcttcccacatccatttcttatttggtgatgcggatcatttgtgttcttaattctatagttgttggttgttcagttgatatcgatcttgttctgtgtatgcttaattggttatttgtttgacatccaaagact

SEQ ID NO: 15337 - DNA, 693 bp, Zea mays
  Clone ID: MRT4577_113991C.1
aagacacattggagatctgcaaggcatgacgcttcaagatgctgctacagagaggccagaggcatacaaagcttttatgtcccacaagagaaatcaacaagttcctggtggtggagagagtcttgatcaactgtcggagcgatgtgtgtcttttctgtacgacattgtgggtaaacacaaaggggagcgagttatcctggtttcacatggcggcaccatcagagagctctacagacacgcgagtcccacgaagccgctccacggcaaaatacacaacacgtcggtgagcgtcatcctcgtgtccgacgccaccggccggtgcatcgtcaaaatgtgcggggacgtcagccacctccaggagacgggcgtcctggagaacgccttcggtggcgacaagacctccgcctgagattccagcattcatcacgcgccgagtgctcgtttcggccgtcttttttttccctgtaccaatcatcctgttgctaccagtagtggtctagcggagaatgatgtattccccccccccccccccccccggcgctgggaacgcggggatttttgctggaacagttgaaggccgagccggggcgaatccttttggcctggccgtgcactgcttgctgcactgcacgtacgcatgtggagccgaaaaaaaaaaaaaaaaaaagcaaaaaaaaaaaaaaaaaagcggcc

SEQ ID NO: 15338 - DNA, 1525 bp, Zea mays
  Clone ID: MRT4577_113992C.1
catgatggtaacgcgcttggcgtggatggcacagaggttagtgtcctcaaagagccccacgaggtaggcctcggcccccctcggccgcttttttttttttttttttgagcgaacgcagatcgtttcagctccacatgcgtacgtgcagttcagcaagcagtgcacggccaggccaaaaggattcgccccggctcggccttcaactgttccagcaaaaatcgccgcgttcccagcggggggaagtgtgcatcattctccgctagaccactactggtagcaacaggatgattggtacagtggaaaaaaagacggccgaaacgagcgctcactcggcgcgtgataattgccgagagctctcggcgcgtgatgaatgttggaatctcaggcggaggtcttgtcgccaccgaaggcgttctccaggacgcccgtctcctggaggtggctgacgtccccgcacatcttgacgatgcaccggccggtggcgtcggacacgaggatgacgctcaccgacgtgttgtgtattttgccgtggagcggcttcgtgggactcgcgtgtctgtagagctctctgatggtgccgccatgtgaaaccaggataactcgctcccctttgtgtttaccaacaatgtcgtacagaaaagacacacatcgctccgacagttgatcaagactctctccaccaccaggaacttgttgatttctcttgtgggacataaaagctttgtatgcctctggcctctctgtagcagcatcttgaagcgtcatgccttgcagatctccaatgtgtctttctctcagtgctggatcgaacacgacatttggcacattgcaaattcttgcaattgtttgcgcagtctctgctgctcgcttcagatcagaagagtatatggcaactggtttcacttctttagaaagacgatgagcaaccgcaacagcttgctgccttccaatatcattaagctctgcatccaagtgtccctgtatgatgcgcgaggcgttccatgacgtctcgccgtgacgcacgattacgacctccgtgaactctccggcggcgtcgccctcgacgctggaagcggaggacgacatccccggagcagctccgtggacgtcaacccagcggatctgcggagtggtggctgcgacggatccggtacagaaggacgccgcggcggtgatggcggagggtggagagggcaaagcagcgagggacgcgggcgcggacgtcggcggcgcggacgtcggcggcagaaccgcagaagcgcgattgtgggaaggcgctagaggatatccggggccgtcgaggcgtacggctcgcgtaccacaagctggcgatcagcgagtcgcgtaatcagaattgttatgggccgagccaaaattagcggatgggccgtaatatgttttttttccgaaggaaggtctaaaattaaggcctcgttctatggctttcagaggaggtgtgatctatctactgtgaatttaatcatggtcagggttatatggtgaaaaaaaaaaaaaaaaagcggcc

SEQ ID NO: 15339 - DNA, 1149 bp, Zea mays
  Clone ID: MRT4577_113993C.1
ccggccgggggattgcacccgtcacatttgatttgattctgtgcgtatgtcttggtttattaactaatgacttaatagaccaagacatgcacacagaatcaaaccaacaatcaaacccttttatttgttccatcatatctatgggaggaatctaattagtacgtaaccctcctatgatacaataataataataataataataataataataatgaatacaacacatgcaatggagcaagtggacgacgggcagcatacgcaggaaggcgtgtcgacggagcgcgcgttcgaggcagacccgatcccatccttgtcggagacgatcacggcacgggcgatagcggccagcttcatcctgggcgtcgccctctgcgccgtcgccatgaagatcagcctcaactcgggcttcctcccgtcgctcaccgtcccggctggcctcgtcggcttctacctcgtccgggcgtggatccgtgccctcgactgctgcttccaggtgccacaccagctgccattcacgcgccaggagaacaccgtcatccagacgtgcgttgtcgcctgctctgcaataacattcagcggagggtttggcacgtacatcctcgccatgggcaagaacgcggccggaggagacgtcagggacggcaagaacatcgtggagccgagcattggccgaacggttgctttcctcttcctcgtcagtttctccggcatgttcgtcctcatgccgttcaggaaggtcatgatcatccggcaccgcctcacgtaccctaacggaatggccacggcgcacctcatcaacagcttccacacccctcagggagccagtaagacagcaagtggagatgctgtttaggtcactgggaggaaccatgctgtggaacatgttccagtggtttttcgctgctgcaaagggctgtggcttcggagtgttccctatctttggcctcgaggcatataaacacggattctacttcgacttctccatgtccaacatcggcatcggcatgctgtgcccgtacaccatcaccgtgtccatgttcatcgggagcgtcatctcgtgggggctcgtcttgccgtacctcgcgaccaaggcgggcgtctggtactcttcgcacctcagccccagcaggcctcagcggcatcaggggc

SEQ ID NO: 15340 - DNA, 345 bp, Zea mays
  Clone ID: MRT4577_113994C.1
gggagattctcgccagcttaaattccatactcaaaaagcgtcagggggggttccaaccgtgtaggagtgtggaccccagcaagtacggggaccacactatcaccatcaaggaggcggacctctaaaacaagctcgagggccttacagtgcaacacgcgctgcacggcaacccgctctacattctggaccaccacgacaactttatgcccttcctggtcagggtgaacagcctggaaggcaactttatctacaccaccaggaccgtgctgttcctgcgcggggacggcaccctggttcccgtggccatagagctgagtctgcccgagctacgggacggacttacca

SEQ ID NO: 15341 - DNA, 438 bp, Zea mays
  Clone ID: MRT4577_113995C.1
agccttcggccacgccttcggccaagccttccgccaatccttccggaaggcaggacaaaatggtggcggccgtggcgtcgccttcgtcggcggaaccttccgccggccgtccccatccgacatacaaggaggaccttcggcaaggtaggtcacaacaacaacgatcaatgatagggctacgggagggcccgcccataggcgtgcctgtgaggccgagaagaagatcaccgtgctgatcaaggatgtttgaatcggggtcaccatgcttgatcaactgtgtggtgagcatgacaaactagtggatatcatcaccgtactcagcgcagagcatgacatagtcgtgcgccgaccaatgatatggaaaaggatctcgttggttcgtcatctctatcactttgcaaaaatctatgctcaaggcatattcaccatgcttctggc

SEQ ID NO: 15342 - DNA, 802 bp, Zea mays
  unsure (1)..(802): unsure at all n locations
  Clone ID: MRT4577_113996C.1
ccggccgggctattgcacccgtcactttgatttgattctgtgtgtatgtcttggtttattaactaatgacttaatagaccaagacatgcacacagaatcaaaccaacaatcaaatccttttatttgttccatcatatatctacaggaggaatttaattagcacgtaattaatccccctatgatacaataataataataataattacaacacatgcaatggagcaagtggacgacgggcagcatacgcaggaaggcgtgtcgacggagcgcgcgttcgaggcagacccgatcccatccttgtcggagacgatcacggcaagggcgatagcggccagcttcgtcctcggcgtcgccctctgcgccgtcgccatgaagatcagcctcaactcgggcttcctcccgtcgctcaccgtcccggctggcctcgtcggcttctacctcgtccgggcgtggatccgtgccctcgactgctgcttccaggtgccacaccagctgccattcacgcgccaggagaacaccgtcatccagacgtgcgtggtagcctgctctgcaatcacattcagcggagggtttggcacatacgtgctcgccatgagcaagaccgcggccggaggagacgtcagggaccggaagaacatcgtggagccgagcattggncgaacggttgctttcctcttcctcgtcagtttctccggcatgttcatcctaatgccgttcaggaaggtcatgatcatccggcaccgcctcacgtacccttacggaatggnncacggggcactcatcaacagcttccacacccctc

SEQ ID NO: 15343 - DNA, 361 bp, Zea mays
  Clone ID: MRT4577_113997C.1
gggtgcgtgggagggtccgaagctgtagagacagatgctggttctgttctgcggtgctttctactggcagcagcatcagaatcacaaacaacaatggccaacactaacttggaagatgtcccctctctggatctcatgactgagctccttcgtcgtctcacgtgctcttccaaacctgacaagcgtctaattctcattggcccacctggatctggaaaaggcacccagccaccaatcataaaagatgagtactgcttatgccacttagctactggtgatatgttaagagcagctgtcgcagctaagacccctctcggtgtcaaggctaacgaagctatggatcacggagaacttgattctg

SEQ ID NO: 15344 - DNA, 200 bp, Zea mays
  Clone ID: MRT4577_113998C.1
cttgatatcaaaaaatctataccaacaacacaattcaactggtggaacaaactttaaccaaccgtatttaatcatcctaaattaatttcatagccctaaacatctaattatactgaacaaaaaagattttgaatatatctcatatgtttccaacttcaaaactccattaattacttataaattcactacacaaccaaatt

SEQ ID NO: 15345 - DNA, 301 bp, Zea mays
  Clone ID: MRT4577_113999C.1
cgaaatacttgctcctgggatgccttccctatttgcacctccgatcgtgaataaaaaggctggagcataactctgcacagcctaatgcaacataagcgtaaaatgggcctataggagctcctatggttcatggagctaccatgggtcataggtactcctgagccacactgagagagcacgagtcaagctagctccatcccacgtcaggcatgacgaggcctggccatcagatgctacagaggctgatgcagctgacgaggtttgatagagaacatcgacaccgccctctgccgaaggtaca

SEQ ID NO: 15346 - DNA, 577 bp, Zea mays
  Clone ID: MRT4577_11399C.1
ccggccgggaatccgacgtctgcatcacatcaatccacttgctcgatatatgaacaagacgatttcagaacgtgagaggctctcaagctgtaacgttctttcgacaacatgaccatgaacacctacctgacatgaccatacgacgtgatcacctccagttgcatccctcttacttctgtggcctctggcgtgttccttgtcgcgccatcagcccactgcatgtctcatgcgaattgaaaaacactaatgatctaccacctgaatagacgtaacgtgttactacattgacatgaagacaaccatccacactatgaacgatgtcgtttgcctagctatccactactgccagaacaacaaagacactacatatctatgcatgatagtcctgaatgaatatgtccagatccaaagccataaacttgacagatcctgattctgactatgctactgactaaaggaaatcatttgccgccctcaatatcgagctttacgtatgtttatagatggtgacttgatcacttgtggctatgatggtcgtagctgattgctgactaatattatgatcggttctatacta

SEQ ID NO: 15347 - DNA, 824 bp, Zea mays
  Clone ID: MRT4577_1139C.1
aatcgtgttcgccgcctgcctctcccaaaccctagcaacccacgatcgaacccaaatccgctcctcccacccgaggaattatgcgaaattccccgagatcctagcccagcactagcagatcgatccatcgcttgcccacctgccggccaccaacccttgtagtctcagtcaatctgtagattgagactacgatgagcctgtcaccgctcgactcctcctccccgccggccgcggctgcggctgctgctacggaggtgcccctcgccccgggcttccgcttccaccccaccgacgaggagctcgtctcctactacctccgccgccgcgtcctcggccgccgcctccgcgtcgggatgaagaagacgctcgtcttccacgccgggagggcgcctaagggcgagaggaccaactgggtcatgcacgagtaccgcctcctcgatgcagacggacctcaggatctgcatgtggtttgtagaatcttccagaagcatgggtctggaccacagaacggtgcgcagtatggtgcaccatacatggaagaggaatgggaagaggatgatgatgctattgagaatggttctacccacgatgcatctggtcaaattgctgcaaccacctgtgctgtagatgaggagtcaaatgaggacgatgagaatgcatattgtgaaacaaacagacctgctcgagtagaaccatctcatctgccttcggtccatgaaatgctcaatccaccagagatggctcctctccaaggtcaagattctaaagagacaagcgatggaagttggtctgatgttgctatttctctggaagagattttgcag

SEQ ID NO: 15348 - DNA, 563 bp, Zea mays
  Clone ID: MRT4577_113C.1
tcgagcggccgcccgggcaggtaaaaaaaaaaaaaaaaaaaaaaaaaaaaaaaaaaaaaaaaaaaaaaaaaaaaaaaaaaaataaaaaaaaaataataaaaaataaaaataaccctgggccgggccccccttttgggctaatttttgcccttttccccctctttgggggcggtttgggcttccttttacggggccctattccccttttgggggggaattttacatttctttggccttgtttttacaccgggggacctgggatacccctggtgttccccaattaaatagccttgcgccccttccccttttcaccagttggggtaattccaagggggccggccccgccctctttttccaccattttgccaccctgattggcgtttgcaccccccttgaccggggcctttaaccgcgcgggggggcgcgttcccccccaggtggccctttcctttttccacccccttaaggccctttcctttcgtttttttcctttctttttcccgcccgtgctccggttttcccctttaggctttaattcgcgcgtcccctttaggtttccgatt

SEQ ID NO: 15349 - DNA, 482 bp, Zea mays
  Clone ID: MRT4577_114000C.1
gtcacactagtttgaattaacaactttggacattattatggtgttctttgtaatgtcttgctgcgaacctttgcgtattttttatgttgcttaacttgcagtttatgtatgtgatagaacagtctgcagcagtgctcacatcttccatgtgtatttgtttttgcagatgggttaatgcagcaccttgtgacagctgtggccgtgagacatccaatgttggaatgggcaccccacttacctcagaaatcaaatttggcgcttcacgtgttgagatgtataggtagctataagttgaatgttattttcttacatctcatatgcttaatttagatgtgtcatatcctttcaaaacttgcaactcaatatcaggtgaatcatattgctactgtttgaagttctctaacacgtagaagagctgcatatcattatattaaaaagaaaaaaagggttaagaatccttgcaacatgcacccgcacccact

SEQ ID NO: 15350 - DNA, 304 bp, Zea mays
  Clone ID: MRT4577_114001C.1
cgatcaaaattttccccaatggccaacaaaggccccaacggaacacaggggccgcccattcacagagcaggccacacccccccccaaacccagggggaggggggagccttattgggggggggcccacacggggggccccaacccccggaacagttcaagcacgggacccagccaggaaccccccatgaaaagcccagaaccggggaaaccccggggggattttatccccccggacctggattaggccaaatcccgggaacagggcacgcaaaatgcacaaccccgccacagacccgagggcccc

SEQ ID NO: 15351 - DNA, 421 bp, Zea mays
  unsure (1)..(421): unsure at all n locations
  Clone ID: MRT4577_114002C.1
ggcacgagccgcagggctgaaggggatgaagagcttggtcgcgctgaacgcgtcctacaatgccttcacgaagggcatcccttctgggcttgggctcctcgtgaacctgcagtccttggatctgagctggaaccagttggatggtggtgttgattggaagttcttgatcgagtccgctgtcgctcatgttgacttcagcgggaacctgctcaccagtaccacgcccaaagagctcaagtttctggccgacatttcagagacggttctgtatctcaacctgagcaacaacaagctcactgggtcattgatagacggtgtcgagctctctactttcgggaggctcaaggtgcttgatctcagcaataatcagctatctggtgacctcccagggttcaattatgtttacgntcttgaagtttgc

SEQ ID NO: 15352 - DNA, 1061 bp, Zea mays
  unsure (1)..(1061): unsure at all n locations
  Clone ID: MRT4577_114003C.1
aatttaggtgacactatagangagctatgacgtcgcatgcncgcgtacgtaagcntgnntcctctagagnggccgcccttcacttcgttcatggctttcatttaaaaataaatcagcagcatatcccctcttttatgtataatccacaagttcacaagtccacaaatatataatagatagtagatatttcacacaagttcaccgcaacattaaaagagatacacaacatgctacatagtttattacaaaagcgcaaacaacatagcgaagagtctaatttcaatgtatcaagtcgccgcaatagcatcttcgtccaagtccattgcattcatatcttcacttatggttctaatttcagtttctaaatctttctctgaagcaatcttccaatccttggtacaaaccaaggcctcaataatttcaggtttaagttttgaacgaaaggcatcaacaatacgtccactagagctaaatgctgactccgaagcaacagtagaaacttgcatagataacacatcacgagcaagggtcgaaaggataggaagatttgtcacttgccccctccaccaagataggatatcaaatggagcatcaccttcattgaccttcaccaaaccctcactcatatacacatccaattctgaaaccttcttcacattgtttgctgctgcatacaactcatcaagatcaacctcatcctcatcctcatcatccatgaaagaaccatttttgtgtggaacaagttcactctccttggaggtagaagccatattggttgtttttgcattgatgtttgatgaatacaaagcaaataactcattgatgacattaatgaaagacaacttctctagctcagccctctcactatcatacatcttagacatgtacaactccaccatcttgtgtttgtacctaggatcaagaaatgcccccactgctaaagccatattgttcatgtcccaatatttattgaacttctctttcatagagaatgccattgtacaaattatgacatcactgctctcacacctcttgcaatagccatcttatnctcagaaaac

SEQ ID NO: 15353 - DNA, 285 bp, Zea mays
  Clone ID: MRT4577_114004C.1
tacgattgttacactaggcttaactatacaaaaaagatatatcccgcccgtccgcccgcgcgtcccccctctcgtccgcccacgcgtccgctctttgtgatttacgaagtggctggattggaacttttaatatgcgaatgtggaaaattaattacctgtatgaaggtggtttattacaaatgagcacactaacccctcggaagttgttttacctactttgaaaggtgtaatgggttgccacctctgtaaactattcctaaaatgtgtatgatatatttgaaaagg

SEQ ID NO: 15354 - DNA, 653 bp, Zea mays
  Clone ID: MRT4577_114005C.1
tatcaactgccatctccgcatgtcattgcctatcatgagcactttctcctcgctccggacacgcaatctaacccaaaagaccgccatggactccatcggtaccagatgatggggcaagggctagaaagcacagcccatgagcaacgccagatctaccaagatagaaactctgtgtcaaggaccatgaacgccgcaatccagatctccggcacttgcttagaaagctacttaaagagaggacgatacatgcacagaggcttgacctcaaccacatcttacatcgccgctgtactaccaatacctaactatgtgatgttgtgtagcttactagaaatgctgtgagtacacacacacaagtactcggattattccgagaccagcgtttatggcgcatccggaacaaatgaaaacttggaaagctgctcggccagcgctgagcagtccctcatggatacagagcttcccaatatcaaccctgctctgctggctgagaagacaggggacaaaacgcaatccagtgcgcaaatccaagatgcaaattccgcttggaaagccgccaagtcccccaagataggcataaactgactgactggagtgatctgtatgcttagcaagaccttgatagcagatgatatgatgcccatgctgtagat

SEQ ID NO: 15355 - DNA, 378 bp, Zea mays
  Clone ID: MRT4577_114006C.1
aaggcgacaaaaaaaaaaaaacttttggcaacacaaaacaacaaggtgtttaaaaaacatacatgccaaaaaacatcctgggttagaaggagggccctggaacaaaaatggggggggcaggaaataaaacaccagggggggaaaaaaggggcgaggtttttttggaagcaacagccaaaaaaacatgggggaaaaaagactcgcggaaaaatagcagaggtgtagaccgaaaaaacgcccccgggggggttttaaagctccgagggtccatgaacttgcaaaaaaattgggggggggccaaaaaatttccgggctaaaaaccaccattgttgtccaccggattggggaaaacttggctatgttgcgcactgggggcca

SEQ ID NO: 15356 - DNA, 3064 bp, Zea mays
  Clone ID: MRT4577_114007C.1
ggtacccattgggctcctcggggccgtttctgcattcgacgccgccgcaggcccgcagccagctcgagcccaaaggagagaacccaggttggcggcggcgctccgcggcgatggactccccctacgctctccacctcgccatcgccgcgctcgtcggcgcctccttcgccgccgcctccgcctactacatgcatcgcaagaccctcgaccagcttctccgtttcgcccgcgaccagcagcgccgccgcaaccgcctcctccccgaaggcgacgaactggaggacggcgaagaggaccctccgccgcactgggatcatgatcgccgcaccctgcccatcccgccgggcctcccgccgctccacaccggccgagagggtaggccagttgtttctccaggttcgactaaaagagttggacctattgttagaccgactacacccaaatcctctgtccccactatcagtgcatttgatagaattgaagattcagatgacgaggaggatcttgtcccagatgccaagaatgatactgcttacttgaccccaaatggtgctattggatcagatctcacagataaagcgagccagaacggggaattaacatcagcaccatcaacgcagatgattagatcccatagtgcaactggcagcctgcatgtaccccagcttaacccaatagcagctgatatacttcgaaaggagcctgaacatgaaaccttcagtaaaatcaacatcacagctgttgagactccttctcctgatgaaattgaggcatacaaagttcttcagaaatgccttgagctgcgtcagaggtacatattcagagaagaagttgctccttgggaaaaagagatcataactgatcctagtactccaaagcctaatccaaatccgttcagttatgaacatcaggctaaaaccgatcaccatttcgaaatggttgatggcgtcattcatgtgtaccccaataaagattctaaagaaagactctatccagttgccgatgcaactaccttctttactgatatgcactacgtccttcgtgtgttggctgctggggatatccgaaccgtgtgtcatcaccgtttaaatcttctagagcaaaaatttaatcttcacttgatggtcaatacggatagagaactgcttgctcagaaagctgcacctcaccgggacttctacaatgttaggaaggttgatactcatgttcatcactcagcatgcatgaaccagaagcacctgttgagatttatcaagtctaagttgaggaaggaacctgatgaggttgtaatctttagagatgggacctatttgactcttaaggaggtttttgagagtttggatttgacagggtatgacctcaatgttgatctcttagatgttcatgctgataagagtacatttcatcgttttgacaagttcaatctgaaatataatccatgtggtcaatctcgcctgagggagatatttttaaagcaggataatcttattcaaggtcgcttccttgctgagctgacaaaagaagtattttctgaccttgaagcaagtaaatatcagatggctgagtatcggatatctatttatgggaggaagaaaagcgaatgggaccaaatggcaagttggatagtgaacaatgaattatatagcgagaatgttgtttggttaattcagattcctcggatatacaatgtatacagggagatgggcacaatcaattctttccaaaacctccttgacaatatttttctccctctttatgaagtaactgttgacccagcttcacatcctcagctccatgttttcttaaaacaggttgttgggttggatttggtggatgatgaaagcaaacctgaaagacgcccaacaaaacacatgccaacacctgagcaatggactaatattttcaatccagcctatgcgtattatgtgtactattgctatgccaatctgtatacactgaacaagcttcgtgagtccaagggcatgacaacaatcaaacttcgtccacactgtggggaggctggtgatatcgatcaccttgctgcagcatttcttacttcacataacattgctcatggggtgaacctaaagaaatcccctgtacttcagtacctgtattatcttgctcagattggtctagcaatgtctcccttaagtaacaactcactgtttatcgactatcatcggaaccctttcccaacatttttcttaaggggtcttaacgtgtctctttcgactgacgaccctctacaaattcacctgacgaaggaacctttggttgaagaatacagtgttgctgcttcactttggaagctgagctcatgtgacttgtgtgaaatcgctagaaattctgtctaccagtccggattctctcacaggctcaagtctcactggatcgggagaaactactacagaaggggtccggagggcaatgacatccaccagacaaatgttcctcacatcagggttgaatttcgacacactatctggaaagaagaaatggagctgatacattttggaaatgttaacctacccgaagaagttgacaggtgaagagcaggggaattgcagtgaagtctggcggtggcggcaaggggacgagagaatgtgtcaacacgagagactcgtttgcttgcagaggaggtatcatgacaatggatgtcgccaagtcctccgtgtcgaccatatatatatgaagaataataagaaaacacaaatacccaagtatttagaagcgttgaatccagatgtggcatgaggtcggagccaacgtgtacttgcatacgttacgtttatatacatgtactgctctgctgtaatggtgtttcgacgaatgtgtcttgtcattaatgttttgttaggctcgttccaggcttctgctgatatatacgttacgttcaggcccgaactaggtttgggttttcgctttcgctactcgtaggaaatgtttaagtaccggacttcatgctatagggatactagctcagatggctcagattttatgtccagccctattatttatagatcagattctagtttttctttttttaaaaaaaccacacaac

SEQ ID NO: 15357 - DNA, 314 bp, Zea mays
  unsure (1)..(314): unsure at all n locations
  Clone ID: MRT4577_114008C.1
agcagggagaaacacaccaagcgagggggacnagcaacaaccnaacaacaanggcgaccaagaaaggaacccgccaagcgccacaggcgccgacagcgagcgcaacaaaagcgaccaaaaggccacaaggcgcaccngcgccgagggccaagaagccacagagccccccaccaggaacagcaagggccaacgaacacccagcngagcaagccaagaggcaacaacaagcgacngcggcgagcggacaacaacaaccaaaagcccaaaagaacaacaaacccgggcacaacnaacaaaacaaaccaacggaacgc

SEQ ID NO: 15358 - DNA, 333 bp, Zea mays
  Clone ID: MRT4577_114009C.1
tcgtcaagccgagaacggtgtcaaggctgcatcagctggcgcagacggagccagccgacttgagctccaggaaagtagcacgggcaacaactgccacgacctatccttcaaaacgatcctcgagacgacgactacgaccatcgcagcggacgcgtgcgatgaagggaacgaccaagacgagtgcgtgcatacgcagctggttgttgacgcgcaccgtcgctacttctactcgcagcacaagggcgagccgcgaccgacagcgacgatgacggtgcatgccgccgctgcatgaaatgatgagcggcagacgagtgattaaatgatggaccatcc

SEQ ID NO: 15359 - DNA, 254 bp, Zea mays
  Clone ID: MRT4577_11400C.1
tcgagctcgatctgctgcagtcgggcccgtctcgggctatttgactatgactttcgctctatctatggatatatacagtcagcatatgatgcttttgttttgtgtattcctacggctcaaaaggagggggctttcgttaatggggctcaggtcccgggcattatttccagcactgactctctgcagcgggtagttttccttaagagctccagattaggatttgcggaaacccggcttcatcggggtccccgtcc

SEQ ID NO: 15360 - DNA, 288 bp, Zea mays
  Clone ID: MRT4577_114010C.1
cgaagatggcggaggggcaggttctagtattggatggccggggccatcttctgggccgcctggcggcattgtggccaagcaggtactgctgggccgaaaggtggtggttgtacgctgtgagggcatcaacatttctggaaatttctacagaaacaagttaaagtatctggcctttctccgaaagcggatgaacaccaacccgtctcgaggcccctaccacttccgagccccaagccgcattttttggcgcactgtgcgaggcatgctgccgcacaagaccaaaagagg

SEQ ID NO: 15361 - DNA, 320 bp, Zea mays
  Clone ID: MRT4577_114011C.1
ctttttttttttttttttttctcatttttaattttcagggtttttataaaaatttaactttttctttctaacagacaaacaatctcttattattcgccaaggatacaccacacagggccttccttcacatcaggacccgccatcaccaattcataagctgactaaaaattaaccccgatccctcaaacgatttttctctaacccagtctctaaacgaaagagtacacacaactaaatccctacatctcagtcaccgaggaacacattaaaactgcacctaccacaacaatttattttttgctacagacgctctccccctt

SEQ ID NO: 15362 - DNA, 319 bp, Zea mays
  Clone ID: MRT4577_114012C.1
aaaaaagaaatgaccttcctttctatttaaaggggcaatatttgggggaaacttggccccaacaaacctgaggatttattttcgggttactacccccggaacccgggggggacccaatatggggggcaatcaggccccaatttgcccgtcctcaataacccccacggccagtcggcctgggccctggcctcacacgggcgggggggaccccccagggcccagaggatgcattcacttcatctgatacatttgcccccccaccaggggggggccccaccaggcccccttaaaggggcccggccctattccagggcccccc

SEQ ID NO: 15363 - DNA, 408 bp, Zea mays
  Clone ID: MRT4577_114013C.1
acgcgtgggcgtacgcgtgggcgcgacgggcagagccagagccacagtcacagccaccccgtcggagagtggggccaggggaagaggtcgctcacgtgccccgacctgaacctggacctatgcatcatcccgacgtgccaggaggaggaggaggagatggaggaggctgcgatgagagtgagacggggagtgaagcgggaggccgtgctttgattaggctgcagactgagactctgcatgaccgtggactgcaagtgcagcagcagcagcttgctcgggctcaggaccgccatgctcgacttcagaagcctggagatgaaatgagcgcgcttctaccgtctctgtgcagtcttttccaccctgtcgtcctcgtttttgttttggcactcctgacatggatgatgaatt

SEQ ID NO: 15364 - DNA, 577 bp, Zea mays
  Clone ID: MRT4577_114014C.1
tccggaaaaagagcaacaccgacgcactcagcctgccgccttgcccttcacgaacgcttgggcctcctccttgcatctcctctccccccttcaacatccggtcctccagctagagccaacgtccctctgccattatgcacaccaattggactcctgcttctaaaaatgatacacgaactactataatgtgtgtaccctgctcggatgattacaccaaagcgatcatcaccctactaccactacactctcactccaaatacttccagcacttccacctctctctcagatcccactccacggagctcatggagaacaacaagatcatcctgagctgcttcaagcgagttctcacgagaatacacgacaacacacacactttttacccattcctggacctcctgctggtgaactcatatctcatcttcaccctatgatacctctccgaagtgcgcagagagaatccaccaagtacataggcgttctactcctggtcgtgttggactgcacgctccagttgatgtgtgccgcgccccctgactacactgttctgatatcctccccagacctcctttcttcc

SEQ ID NO: 15365 - DNA, 289 bp, Zea mays
  Clone ID: MRT4577_114015C.1
aacagacaatctactcaaaataaggggcacctcgagatggacacccagttcaggctacccaaagatccttttgtttaccgagcatgtgtgtcagtatatacgcaatcacacagcatgcctcttggacagagtatgagatccagactgtgctacttcacacatatgagtcacatccggctgcggaaatccagatcaggagccatctcgcagatataagacacccatacacaattgcaaggcatatctatgcatcaccacttgagctaagcaacacgcatacatgctaaaa

SEQ ID NO: 15366 - DNA, 413 bp, Zea mays
  Clone ID: MRT4577_114016C.1
ggggaaaaaaaaccactttttttatacaaaagccccccgcagagagctaaaggggacacaggggcattataaagggccggaaccattggcccataacgcatttaggaaaaagccggttccaaaccaaaccaccatttttaacgggcccccggattcacgcttccttattttcaggtcaattggggaggggatccaaatccaaaggcaccaccgggaaaaacaaatttgggggggggggaaaaaaaaaaaaaaatattgggcctttgccagggggttggcctttggggcccaaaaaaacaccttgggaaagccttcgggggggaagggggggagggacttggcccccccgaaaccctgctccccggggggtggaaccgccctgttgtacttgggggcccaaggcgcgggggggg

SEQ ID NO: 15367 - DNA, 623 bp, Zea mays
  Clone ID: MRT4577_114017C.1
cctcgccgccgcccgcgccgtgctaaggagccgcctgccttctcgccgcccccgacgccgccgcaggtggcggagacgggcaaggtgggatcggccgggggcggtgctgctaggggatcagatcggaattcccggtcggcggcacgggcacagctgtcgccctcggcggaagtgcaagactccggtggctcatctcctcacaaccagtcaagttccaagcttggtactccaggtccagatttctggtcatggttacctccagtacaagatagcagtaaacaaaaggaaagcaatactggtttgaagccatccaaaaaattagataccttttccagtcagcctgatctgttgatggaaaaggaacgcttggcggattctttaccactccctttcgagacagctttcttcaagaaggaagatcgatctcttcctcccttccaatcatttgctgagcctgagaatgtggattcctcggccgatctggccgctgacaaagaggacacgttcgaagaacagttctcgaaaaatgcagccgaggtggctcgcgcgctcagtgagagcgtcgggaaaccatcacacggaatacatctagatggctcaatgtggtggaaggaagtaggtgt

SEQ ID NO: 15368 - DNA, 116 bp, Zea mays
  Clone ID: MRT4577_114018C.1
gtgtgcttgtggtggccatgggcaactgctttggctccaacgtggcggaggtgggggccgtcaaggcgatggcgcaacccatcacgcgcacccgcgaggtacgtacgtcgtaccta

SEQ ID NO: 15369 - DNA, 490 bp, Zea mays
  Clone ID: MRT4577_114019C.1
gactcgcctatctccgcgactcaaagcttcttccatttcctaccggcgccgttgcagatccaccccattcgcgtccacaccatgagggagtagcatcctcgatccacatcggccaagccggtgtccaggccagagacgcgtgctgggagctttactgcctcgagcatggctgtcaggctgatggtcagatgcccggtgacaagaccattggtggtggtgatgacgcttctcacaccttgttcagtgagactggggctgctaaacacgcttcctcatgctgtgattggtgaccttgagcccactgtcatcgatgaggtgaggactggcacctatcggcagctcttccattctgagcagctcatcagtggcacggaggatgcagccagcaacttcgctcgcggtcactacaccatagccaaggagattgctgacctgtgccttgaccgcatcaggaagcttgcagataatagcactgatctacagggcttcc

SEQ ID NO: 15370 - DNA, 636 bp, Zea mays
  Clone ID: MRT4577_11401C.1
gggtacctcgaggccggccgggaggatgtcgtcgacgaggagagacactcccatccatgcgccaccgggagcatagactttcgacttgctcttctccggcgaaaaacccccagtctcccaccacatctcttgatatgctttgatgaggggcgacggagtgttcttgctgaaacctcatgctgcgaggtacgttgtaagatgattggtgagtaccttcgctctcgcagatacctcctctggtgaccaagcttgcaggatgacttggctgcctactcttctattacctctgctccctcagacacgaatatctgcctactctggtgtctcattcgaccttgatgcagctccagaggttcacctgaattgctgatgacggccaaggggagatacgtttcatcgacgatggatccttcatgcccatgtcctgatggtggtgaagcacaggtccccgatgctgaggacgactgctaccatgatgctgacctttttggagtatgcagaccgaggatggctagaaaggtgctgaagagcgtgctgaagcgtgacagggctctctgcgtataatgaagattctggctaggcttatgatgtacttggtgagacctcatgcgacgatgatactgacatgtgcctcct

SEQ ID NO: 15371 - DNA, 976 bp, Zea mays
  unsure (1)..(976): unsure at all n locations
  Clone ID: MRT4577_114020C.1
ttttttttttttttttttaggaatcaatccagagctcaaatccataacaaccgaacagagcctgacacggatttgactggcacctgatttcgattcggaatttcatgagatagagctagctaactgaacagggcaaaagcatgtaccaagaactagaacagaccaggaaggagaacaccggcattattttctactctatcagactaattaaaggaagactagcaggtctgtaacggtctcaaactgttaaaagacgaaaaccaaccctgagactggaaacaccagttcatgtaaacttccccttagctacattgttctttcttttctctctctctctgtctctttttcagcggtcttgttgtcctagctcacggcatcacgccgccatggaacccagcggactgcaggagcacggacttgatctcctccggcagaagcccagggccttccttgcacagctcggccttgaagatgtccaaggaaaacccattgaagcaactgatgacagcttgctggacatcgaggccgaggccttcgatcgctctcatggcagagagcaggagaccgggcctgcgagcgcacagcatgtggatgttcactgcccggccttccctcatcctcacctcaaccctcggttgctgaaaagtagggctaggcaatgcgcttgggcacagctcttccttcacgcgagacggtaaagtgggcagcgtcggggtcagagggtggaagcttgtgggcgtcggaggcagcgaggccgtggaaggggacgactccagatcattctgaagatcgttgatcttctgcagcagctccttcaggtactcgattgcgtcgccgagaatggaggccctgtccatcttgctgatcttgggcacgacggaccggagcatgtagagccggtcattaagcttcttcccggcgacgggcgatactgccatgaggttattggccggcaaccccttcctcttaccctncc

SEQ ID NO: 15372 - DNA, 377 bp, Zea mays
  Clone ID: MRT4577_114021C.1
aatcactataaaaccagggcccccagcaggcacaaataagtagctaaaggaggccggcccaaaaaataaaacaaaacatctttttttttctttgggggccaaaaaaagctaaaaagcaaaccatgggggggaaggaaaaaaaaaggcgggaggacgagcaccggggggaaacatgggtttatttccccaacggccccgaactttggggcccgggaaaaactaaaggaacccacctcaacgatcttggacccgaccaccactgggagcttgggccacaggctgaacgggacttgttcggacagggaaaaccccctggggaacgaggtcatggaccttaaggcaaagggcaggggaaccgggttttgggtttttacgga

SEQ ID NO: 15373 - DNA, 344 bp, Zea mays
  Clone ID: MRT4577_114022C.1
cttcacttcacagttacagtagattacctccatctctcagacggaacggaggaggagagccatgtccagccccacgcacgccaggctcgcgcagcaaggcaaggccggcgtggcgctgcgcctgctcctctccgccgcgctcgccggcttcctcctcgtcttcgccgcgcgcaccctggtcacgtcgcctgtcccggcatcgccctcgtactcgtcgcagccgcatccgctgccgctgcccgtggcggaggcgctggtgcactacgccacgtccaacgcgacgccgcagcagacggcggaggagatcggggtggcgctgcgcgtgctacagcggtgcgcgccct

SEQ ID NO: 15374 - DNA, 1322 bp, Zea mays
  Clone ID: MRT4577_114023C.1
cactcttatttttcctctcccctcctctctcgcctcgccccccccagccgcgatcgaggaggcgaaactaatatccgcaccaggaatcaagaggggatcgacctcccccccaatccgcgcctccgccctgattcccctgccgccggttcgccgccgccgccgccgccgcacccgatggatttggatctgtggatctccaaggtcaaggaggggcagcacctcgccgagcacgagctccagaccctctgcgaatacgttaaggagattctcatcgaggagtccaacgtgcagccagtcaacagcccggtcacagtgtgcggcgacatccatgggcagttccatgaccttatgaagctctttgccaccggaggacatgtgcctgagaccaactatattttcatgggtgattttgtcgaccgcggcttcaacagtctcgaggttttcaccatccttttgctactaaaagcaaggtatcctgcccacataacccttctgcgcgggaaccacgaaagtaggcagctgacacaggtatatggtttctatgatgagtgccagaggaagtatgggaatgccaatgcatggcggtactgcactgatgtttttgattaccttactctttcagcaatcattaatggcacggtcctttgtgttcacggtggtctgtctcctgatgtgcgtactgttgaccagatacggacaattgatcggaattgtgaaattccccatgaaggtcctttctgcgatcttatgtggagtgaccctgaggagatagagacatgggctgttagtccccgtggagcaggttggctgtttggatcgcgcgtcacagcagagttcaactttgttaacggtatcgagctagtttgccgggctcaccagctggtccaggaaggcttaaagtacatgttccaggagaagggccttgtcactgtgtggtctgcacctaattattgctacagatgtggcaatgtcgcttctatcttaagcttcgatgagaagatgtaaagggatgtcaagttcttcccagagacagaggagaacaaccagatgcgaggcccaaggaccgcagtcccatatttcctatgacttcaattgtacaattttagaagtctattcgaatctgtaagggctaaagatcaatcagatgtgtttattgttttaggtccagattatagtgcaatctgatgcgtttgatttctgttttcctttaaccacatgtacaatagaccatcgggacagtcatgttcctgtatctcttcggtgaccctaaaaaaaaaaaaaaaaaaaaaaaaaaaaaaaactcgaaagggggccgcggtacc

SEQ ID NO: 15375 - DNA, 523 bp, Zea mays
  unsure (1)..(523): unsure at all n locations
  Clone ID: MRT4577_114024C.1
ggattgaagctccgggagtactgttcattatgcagtagagagatacacaaacgcacatacactaactaagaaaacacctgtaaatcaggatcactaaagcaattacttgcctgtaactaaccagaaatcggaaaaagaataagaacgttagtaacaactggacaaaacaatcaaagaatcggaactttagttctgcttcccccgctatttccaaccactgatccgaggtgatccggcattggcattggcgttgctgagacacgatcagtgagcctgacatcagctcagcccctcccgccagggcactggtcgattagccgtgtgttcttcaacccggccttgatcaggcacggcgcgtacaccggcggcaccatgcagttgtgcatcaggcagagcagggccgtggaggggagcgacgaaaacggtgatatctgttcgaagtagcgcctcaaaatggaagaagcgagaggagaaatgctggagcaagtggtnttcgactttntcgaacgctgggtcgaccggg

SEQ ID NO: 15376 - DNA, 596 bp, Zea mays
  Clone ID: MRT4577_114025C.1
tcttactctgcatatacgggggggtgggggggggataccacttttgcaatctgtggggattacaaacgctttgatgtgttcgaagaagcagaagctaacaaagctgctgtgaaagtattacaacgcatccatcgtttttttaactagctttacagaaatgagggcctatcgggggggggggctgccaagcttcccatcacaagtggtcagtgaacggggggggggatggtaataacgtggatggagattcttgctggaaatcctaatgctgagcggccccttttgcttggcatgcagatgtccctgaaggctgtgtgatcatcagagaacacatccccatcacgaacctcttcacgtgcttatggttcaatgaagttgatcgcttcacctccagggaccaaataagtttcagcaccgtccgggacaaaatcagggctagagttggctggatgcccgagatgttcatggactgcgagaggcgcaactttgtcgttcaggtattgccgctgacccacaacccattatgccattcggtcctcccccaccttttttggttgcacggttgcctgacagcgggcacaaataaactagcaacc

SEQ ID NO: 15377 - DNA, 190 bp, Zea mays
  unsure (1)..(190): unsure at all n locations
  Clone ID: MRT4577_114026C.1
ccaggtttaggggtcgcaaaggcggccttcaacaagcttggtggccttttaagggacaaagctcttgtgagcgggattactggggggtcttttcctgcaggggtcaaaggttcacggcttaagtttacccaactttttattggggggctttgctggggggagnaaaacccaaaaccaaaaatattttttt

SEQ ID NO: 15378 - DNA, 641 bp, Zea mays
  Clone ID: MRT4577_114027C.1
gggcacttttttttttttttttttttttttggttattcgagccgaaaaagtatgaaaattttaaaactactcaaaaccgaccaatcttttcatgggcatagctaattggttaatatagtaaatggttttggttccaaaaaaatagattaattcattaaataaattccacttttttggaggtggatagttaattggtgggaaaagaggggatccttctcatttcaggataaatcatctggaggcctctgtggaaaagggaaattcattattaataataaataggtcttaagaaaactatttaattcctctttttcgaactatgtttcattcataggataaaataggggttaaaataaatggaatctttgcaaagggttccccgataaatactaatttctttaatccaattttctccataaatagcaggttggaattagtatccaaaagcaaggactattcatgattccatccatatgggatcaattctcgatcccattttgcaatgaaattaaaggaaggttatggaaaaacttcgtttaaaacgatggggaaaaaagcaccgggcgactggaaggacatgatcgatgggggattggcctatccatcattttccatagaaaggaaaaggctcttggctcgac

SEQ ID NO: 15379 - DNA, 572 bp, Zea mays
  unsure (1)..(572): unsure at all n locations
  Clone ID: MRT4577_114028C.1
ttgctcattcgcgacctaccttggggngttcatttttggttgnttgggttgngattggggagaagtgtncgagcacatttggtgcttgcagtttggtttggttcgtgtntgacaattntctctgtggggncgttgcagggaaagatgggggtnncgaggagaggcaggcgccagaagagctcctaggaggagcatcccaagaacctcatcgtcgatgccatgatgctggactcccgcgctgtcaatctcgacaaggggccacctgtcgctctggacaagggggctgccctaagaatgaaagcattaaggtatgcagttggatattgcattcagagaggctcaagcgatagctgcaagtagttctaccttgtgcccagttttcttgttcttttagaaaattcttctgctacctatacctgaatgttactgatagcttacactaatggaagtcaaaatatcgtgggacatccagctgagcgagaagatagtgttgcatcaagttcagttttttttgtcatcaagttgtaggctgtgtggtacatccagctgagtgagaagacaatactgcacca

SEQ ID NO: 15380 - DNA, 1350 bp, Zea mays
  Clone ID: MRT4577_114029C.1
cccttcttgctgtcaaaaaaaaaagctgtcaaaaaaaaaacctcccggtcgccgcgcgcagctagcttccggcgctcccccagctccaccggtccgtccggcgatcgcgcggcgcggggtttcgcgggtggatcgccggcagattcgggcctccgggcatggagcgccgcgggttgctcaaggcggctctactggcgtcgtgcttgctcgtggtttgctccgggagagtacctacggttatacagcagccatccactaccatatacaactcaacccttgccaagacactagtggaatatgctgctgccatatatactgctgatttgacacaattgttcacctggacatgtgatagatgcggtgacctgatcgaggggtttgagatgatggacatcatcgtagatgtggagaactgcttagaggcatatgttggttttgccagtgatattaatgctgtcgtcgttgtgtttagaggaactcaagagaacagcatccagaactggatagaggacttgttatggaaacaacttgatcttgattaccctagaatgcctgaagcaatcgtaacccgcggatcttactctgcttatctcaatgggtgcagagattcactatggcttcattctgggcgctcgatcttgttgttaactacggactggatggcgtaaacctgatgacgtttgggcagcctcgtattggcaatgctgcatttgcttcttatttcaagacatacttgcctcaagcgatccgagttactcatgcccacgatatcgtgcctcacctgccaccatacttctcattcttcccacagaagacctaccatcacttcccaagagaggtatggatccataatattggactaggaaccctagtgtaccccgtggaaaagatctgtgacgattctggtgaagaccctacatgctgcagatcagtaagtggaagcagcgtgcgagaccatatatactatcttggcgtcagtatgcatgcagaagactggagcagctgcagaatcgtcatggactacagcaaattgcagtatcagatggacctcaacggtaatctcgtattgtcgaaacagcccggtttgtcaaacgccagaggattcagtgcccagtgaaccagtgtatgatttgtataagtacgtatataatagcatcatgaatcagtaatgttccctcacctccattgtgatgctggctgttgtattgttaatgcatcaaaaaggagagggttggaacgattcggagatgcttgttgttgtacatatgattacgcaatgtattatattttcagtttgcaaatgcatataaagacgccgatacttgaaaaaaaaaaaaaaaaaaagcggcc

SEQ ID NO: 15381 - DNA, 212 bp, Zea mays
  Clone ID: MRT4577_11402C.1
aatgcggtactgtaaagtccgaaacaattatttcaacaaatggctgcacaaatgcggtactgtaaagtccgaaacaattatttcaacaaatggctgcacaatcaaaaggtgcccaattttccaaaaatttacaggggtctcgtttctttcaaaacgggtatttaatggggtcgcgctgcagggccttttgcaccacctccgtctgctcctgc

SEQ ID NO: 15382 - DNA, 658 bp, Zea mays
  Clone ID: MRT4577_114030C.1
ttgcccagcatcatgatgcagtctcagaatacaagcattaatggtatatagttggatatttcattcagagaggctcaagtgatagctgcaagtagttctaccttgtgcccagttttcttgttcttttagaaaattcttctgctacctatacatgaatattactgattgcttgcactaatgaaagtcaaaatatcgtgggacatccagctgagcaagaagatagtgctgcgccaagttcagtttttttgtcatcaagttttaggctgcttggtacatccacttgagtgagaaatcagtgctgcaccaagcgagaagatagtcctgcaacaatactcttgccatcggcttcctcgatggccctcgacggcgaacgctggtgatcatagaaaccatattgtagaaacgtaagcgtggttgaacaattgatttcaaagtgttttatgaaaattatagagagctattggagcattgtttttttatacaaaattttaaagagcgcccgatacccttgttttgggagctataactttaggagttgttggagatgcttttactaattctgaaccgatgctgtaacaacatatctgataaaaaatgttttggttagagctaaaaaaaaaaaaaaaaaaaaagggcgaacgtcgtaccgctattcaag

SEQ ID NO: 15383 - DNA, 238 bp, Zea mays
  Clone ID: MRT4577_114031C.1
ccacgcgtccggtcaccacatgcactgggatgcccatgcagtctaccccactgcttctttaatgcgtcctactactcatggtgccggcgggggccatgaagatgccatgaccggcaaggactactaccgcggctaatgcgctcacttacatctccactaagagatgctcatactagaagcgcctgcccgcctttaacgtttcccccttcgacggcgccctgacctgtgaaagacaagg

SEQ ID NO: 15384 - DNA, 1757 bp, Zea mays
  Clone ID: MRT4577_114032C.1
agttggttaatttacatgttgtcccaacaaaaccttccattcaagcatatagctaggcaaggcaagtcttattacaacaacacaacaatgaataatagagatcctagttctaaccaaaacaattctcttcagatatgttgttacagcatcggaattcagaattagtaaaagcatctccatcaactcacaaagttatagctcccaaaacaagggtattgggatctctttaaaaataataaatccaaaaaagacaatgctccaatagctctctataattttcataaaacactttgaaatctattgttcaaccacgcaaatgtttctacaatatggtttctacgatcacgagcgttcgccgtcgaggaagccgatggcacgagctgcaagagaaggtagcaggtcaccagcaggaagccgatcgcaagagctgcgagagaaaatactgaacttgttgcaggactatcttctcgcttggtgcagcattgtcttctcactcagctggatgtaccaaacagcctaaaacttgatgacaaaaaaactgaacttgatgcaacactatcttctcgctcagctggatgtcccacgatattttgacttccattagtgtaagctatcagtaacattcatgtataggtagcagaagaattttctaaaagaacaagaaaactgggcacaaggtagaactacttgcagctatcgcttgagcctctctgaatgcaatatccaactgcataccttaatgctttcattctttttaatcgcactttcaataaaatctagtgcaaaaacgttcctaactgttttagcgagttctccagtgaaacaacctattccagcaccaagctccaggatagatgttccttcatctgaaggaagcaaaaacaggaccttagggcagcccccttgtccagagcgacagggtggccccttgtcgagattgacagcgcgggagtccagcatcatggcatcgacgatgaggttcttgggatgctcctcctaggagctcttctgcgcctgcctctcctcgacccccatcttccctgcaacgccccacagagaaatcgtcaacacaaacaaaccaaactgcaagcaccatgtgctcgacacttctccccatccaacccaacaacacaaaatgaatccccaaggtaggtcgcgatgagcaaatctgatcccctcttcatggagcggtcgcggttcctaggcgaaggtggcggcgtggtcgcactgcgtcgcgaggagggcgacccattttgacaaatttccatgccccattaaatgcggaatcaatatttagggtctatatagaaccaaaaaaaatgagtagaaagatgttctcctttaattaaagaagccaaccataaacagtgatacgacattcttccaactaaaggaaattcattgaaatgccaaaaagagcttctcttgcatatctctgttaggccagccggagaggcaaataaatctccatggggatgtttacagatcaaaggactccaaagacaaattgatatggtattttaatataataccaggagggcggtctttccctccccgaccgagtttaggtcaaatgaaacacttaatttgaaaaatttggcaacctactcatcatcttattttgatagaccgttgcaattacagtattcttccttctggtggttgcgttttatgccttctttgtgctgttttgggaaagcaagtagttgagtatattgcaattggcgtttatactcctgtggtaagtgtctctgaca

SEQ ID NO: 15385 - DNA, 326 bp, Zea mays
  Clone ID: MRT4577_114033C.1
taccaatagattgattccatcattggtcaccaatgtctcagatccgcgcatctcacctgacgtcttcacccaccaacggcactccggtatggcgactcaccaaccccccaccaatcccccgcccagatccgacggccgctaatcgccgcgtccgcaaaccaacggtctggcgccgtcgtctcttcccataaaaccctccccacccctgcctcccaaccgcgccgtcttctccctcactcccgttccatttccccatctcccagatccaattcgcgagttctccctcctctgccgccatgcctctctctgtgcataagacctagtct

SEQ ID NO: 15386 - DNA, 365 bp, Zea mays
  Clone ID: MRT4577_114034C.1
tgaatttgttatgtttgatcgttccaagctttcaagggttgattggaagtacattataattgatgaggcacagaggatgaaggacagagactccgtcttggcgcgtgatcttgatcgctatcgctgccagcggcgcctccttctcaccggtactcctctacagaatgatctcaaggagctttggtccctcttgaatttgttgcttccagaagtatttgacagtagcaaggcattttcagattggttctctaagccttttcagagggatggtcctacacataatgaagaagaagacgattggcttgagacagagaagaaagtaataataattcacaggctgcatcagattttggaacctttcatgc

SEQ ID NO: 15387 - DNA, 155 bp, Zea mays
  Clone ID: MRT4577_114035C.1
agaggtagtcttctttctgagagagagagccccacggggacaagggcagagacataccgggggggaagcggggaccgccagggctgcggagcgagaggagtcccccccaccacatgcactgcgcaccggccccagtcccaaacgcagaaccgggg

SEQ ID NO: 15388 - DNA, 886 bp, Zea mays
  Clone ID: MRT4577_114036C.1
ccgccggccgggaccgccctgtcttgtgctgagctccgtatctcttttctttaaacctcccatcagcctctccctccctctttcaaccatcaaccatctcccctcacaaatcaatcacaatggcctcttctcgtgtctttgcctctcgcctggcctcccagatggccgtcaaggccgctcgccctgctgtccgcgccaacgtcgctgctgccagcaagcgaaccatctctggcgtcagccccctccaggccatgaagcgtcagactcttctccaggccaccacccgcaacgccttccaggtccagcgccgtgcctactcctccgagatcgcccaggccatggttgaggtctccaagaacttgggtatgggtgccgccgccatcggtcttaccggtgccggtattggtatcggtcttgtcttcgccgctctcctcaacggtgttgcccgcaaccctgccctccgtggtcagctcttctcttacgccattctgggtttcgctttcgtcgaggccatcggtcttttcgatctgatggttgccctcatggccaagttcacttaagttattacccaacccattgggtagactcgtgccgaatgatcgagtcaacgacacggaggaggctgctgagcgttgtgcattaaactgtgtcttgaaaaattcgacacgggtgcacctgacgccagcttgcacgatagaggggaggttgtcttgtaatagacgggatagagaactgggatggacattgatcatagacacttgctatgattagagttggggaaattctgcataattcctcccagggatcgacttgtaaaataaaaagcctcattcatcacaaaaaaaaaaaaaaaaaacccgcggccttttttttcatcactcaatga

SEQ ID NO: 15389 - DNA, 439 bp, Zea mays
  Clone ID: MRT4577_114037C.1
ccgatgcagagagcgacgtgcgagcaggaggccaggatcagcagccgcacggtggtgagtccagccaccgggaggacgctggcagcagcgctgttgtcgttgagggctgtcggacccatcgtgggagggctgtacacgccgggcgaactattgcttgtcgtcgcagcagcactgcataaaaccacagaaggacactgaacagtcagctcagagttacgatggcaggctgctgcatacacacagatgaacacgaacaatcgcagcctcagtgttaatcgatgcagccagatgtgggaaactggggaaagaaacggatccccgctgccacgcgcaagttaccgcctttattccaggacttccatccccgagaacaacacacggccgcccaccggaatccggatgcatgggtgccgcatcggtgaagctacaaatctggcat

SEQ ID NO: 15390 - DNA, 356 bp, Zea mays
  Clone ID: MRT4577_114038C.1
cccactcgtccgcagaaataagaagttacatttccagattctggttggaggcagggataacacaaaggaaagaatactaaaaaatcaaacaaaaaaaaaaaacacaaacaaaatgccaacctgtacaaagtacccaagcctacataccttcacctccgagctcaaatacgccacataggagcacaaaaacccaacccacaccacttccatcaacaccaacgatacaataaaaaccaacccccaaccaaactcaatcaacttgcatcacaaacatctttcgcaacttcgcctcatacctaacaatacagtaccaactgcactcacgaacagcggctaaaccatatatacaatacaaa

SEQ ID NO: 15391 - DNA, 156 bp, Zea mays
  Clone ID: MRT4577_114039C.1
gctcaaccgctgcttgcattcgctgcatgtactctgccatgatgttcaggcacttgcaattcccatcttttgctcaccgagcggagacggcagttacagcgtgtcattgcagtaggcaagtgcagaaccaaagatttgggcggcaccagcatcacc

SEQ ID NO: 15392 - DNA, 1014 bp, Zea mays
  Clone ID: MRT4577_11403C.1
ttgggtacctcggttccggccgccgctggagagtacctaaccctagctcccgccgcgaggtctccgcggaccacgcctccgccgcgccctcccgcaagagcgaccgcaagcccaagccgcgctccttcccggactccgccacgctcgccacagccatggcctcggtcgccgccgccgcggccccgtcgtccggcgcggggcgtggcagcgcgggcgccgtccagaagctctggagcgaggccgacgagatcgcgctgctcacgggcgctgccgccttcaaggaccgcaccggcattgcgccgcgcctcccggacatgggcgagctgttcgactccatcagggactccctcgcaccgcatctcgaccaggccaaggtgtactacaagctcaagcgcctcaagagcaagttccagcactccgtgccgggtgactccagcaccgcgcacgagcaccggctgcgcgacctgggcgcagccctctggggcgccgagctcacgcgccctgaagagaacgctgccgaggaggccgccgatgcagacgacattgacgggaatagggagggggccgtgaagcttcctatggttaaggaggtgcttggagagtactggaggctgaacgggcagaccatgtcaggtgtgtcactggagaaggggttggcgctgcttgggtcgcaggaggctagtgacaccgaggtcaaatggaggcgacagcttgaggcagatatgcgcatgcagatgcgccgccatgatctggaaaaggaggtctatggcctgctcatcgatgccatcaaaggcctagggccttaacttggatgcagttgatggagtacatagctggatacataggtgggatgttattttgtaggctgatcaacgcgacctcttggttgctgactgacaaacctaacacggtgtgaggtgatgtaggggggtttgcacgaatcagtggtctcaatttatgtctagttcttgaactattcaatgattgtctaagtcgcttaggtctggagatgtt

SEQ ID NO: 15393 - DNA, 129 bp, Zea mays
  Clone ID: MRT4577_114040C.1
aaagacagaagatacaagcaaaacgaagaagctgacacgagacgcctctcctctctttctcctttatcagagatgatgaaaatggatgtacaaaaagatgagcatcgaacgcgcgcgcgcattactact

SEQ ID NO: 15394 - DNA, 482 bp, Zea mays
  Clone ID: MRT4577_114041C.1
aattcggcacgagggttttgatctgcgtgcattgtgcaatttggagagtacgtatgaggcggtgaggactttcaaaatactcgaaccattgcaaagttcttaccagagcgtacaacttctaacaaattggatacgatcatcaaaaagaaaaaggttaaagcaaggacccctgtgcattaaagaatagcacacaataaatcttcccaaacactgaacattgccgtatatgcttataatatcaccaaccttaccttttaagttctagaatgtttactttgtattgtacactccgtataattatatatgtacatatgtttatttcttttggaaaaaaaaaaaaaaaaaaaaaaatgaatgaaaaaaaaaaaataaaaaaaaaaagaatgaaaaaaaggaatataaaaaaaaatgaaaaaaattaataaaaaaagaaaaaaaaaattaaaaaaaaaattataatgaatataaagaaatataaaaat

SEQ ID NO: 15395 - DNA, 341 bp, Zea mays
  Clone ID: MRT4577_114042C.1
gttaaagggatattaacaaatttgggccccgttcaagttgtccaaaagaaaaaaattgtgttgaaaaacgtaatgaaaagttttttttaggaagcaaataaatgtaaagggtaactttttttacatgtattggccccagttacaaagcgataatatttatagtcttaaacctcatatttaattgggttatcatccaaaaaaaatattgcagggtatttagttgggtgccaaaatgatttaattgcacctccccatagccagattagagttttatagggctttggcccttcttgttcttaaaaaaaaagttttggagtcccttaatgggccccccttcaagg

SEQ ID NO: 15396 - DNA, 655 bp, Zea mays
  Clone ID: MRT4577_114043C.1
gacgtgcatacccagcgccccaatgcggcactattcacaatctcccccacagaacgccaccgccgtgccgccaccgccgacgcctctccccgcgcatcgccgccgccgccaccgccgtccccgctccgccgcctccctgccgtccccgccccgttgcgcaatcccggagattggattttcagtgccacttagttgggtgttctacaatggagcttgacagtctaagagaggcctttgaccgagttgttgaaaaacgtgtgttatcttctaccaaagttcaggaagctattgatcagatagtggatgaagttaagcaggtaatatccaagatgcagatgatggatacagattccatggacagttgtgaccattcacccatccttgcagaattgaaggccaagctgaacgaaatggtgccactgaaccaactcgaaggctgtcaaaaggaattgaatgttgcactgagcaaatatctcaaggttctcgagaagtcttttagtacagatatatcaaaggcatatagaaatgtggattttgaggccagcacagtaaacaacataatagcgaatcatttctatcgccagggcctctttgatcttggagactcctttgtccatgagtgcgcgggatcagaccagacttacctgaaattacc

SEQ ID NO: 15397 - DNA, 241 bp, Zea mays
  Clone ID: MRT4577_114044C.1
atggtgccacacctttggcctttggctctgctacgggcgcgggcgcggccgccccagctgacccgcgcggggacacaacacgagtacgcgccggaaacgcaccacttacgggcggacgccggcacgggccggcggtcagacacccaccaggtcgctgcaacggccggacacgggcgtcgggacggacgctgcggggctacaggcggcgggacgctacgtgcaaccaccgggcctgtgggac

SEQ ID NO: 15398 - DNA, 393 bp, Zea mays
  Clone ID: MRT4577_114045C.1
tggcctggacctttgggctagtttatgtgcttgtatagacgacgatgttcaatacgacgctattaccgacgacgttgagtacgacgctattaacggctccgttgagtacgacgctgtaaacgacgacgttataacgctatcgtgatgttgctctgtagaccacgtcgtaatagtagccattacctacgcctaatttaacggttacgatgaccttatttacgcctccatagtaatttcccgccggcgtcgtacctcagacagaaacacccgcgccgcattaaacaacgagccgatacgttactgtgcgcgatctaccaccaccaataacaaaataagcccttccccactaaaaaaaaaaaaaaccaaacaaaaaaaaacaaaaaaagaaacaaa

SEQ ID NO: 15399 - DNA, 192 bp, Zea mays
  Clone ID: MRT4577_114046C.1
ggatctacaaaagattgggcacattttgagcacacatgatactaggagttgactgtttcatctaaggtttagacataagctttggttatacttaggaggacacgtgttttatgcatggcacatttcttatggctgggcactcatatttagtggaagtggagggtttcttactgggcgcgttattactgttgt

SEQ ID NO: 15400 - DNA, 698 bp, Zea mays
  Clone ID: MRT4577_114047C.1
gccggccggtctccggatgttctcctgcgttgcgtccttctactgattattaaaaaggcagagacatctatcgtcggtactccactgcaatgcaagtgccaacagcagtagttagcacagttcatcgacctcgagctccgcaaggcggcaagcaattaatcacccaagctaaagccatggcgcctcgcagtcgcctcctcgacctggagaggcacgacgtgctttccttctacggcggtggtgcctaccaccagagcgcgagcgcgtcagcgtggccgcctacggctacgggatcgttttctggcccgatcgacttcctcgtcgccgccctgctcctccacctcgtcgtcccgttcccgcacgccgccgccgtctgcggggcgctctacgtcgcctactgcttcctcctcgaccgctcagcgcaggtgagctcgtggccttccgctgccgctgccatgccgtcggcagaaccctctcgcccgactaatccgggcaaggtggcagccatgcaagtagcagctggcttgcgacttccctgacgcacgggcaatgtccagaaatgcatgtactcacatggaaataggatcacatttacaaatctgatcagtctggacatatgtaatctcgcacgcaacgcagcatatggattgaatagtattgagtcaatttaaatctatagaagtcaaaaatttatctct

SEQ ID NO: 15401 - DNA, 593 bp, Zea mays
  Clone ID: MRT4577_114048C.1
ccgcctgcatgaaccgggcccctattacacggctctccaagaaaagtatatgtcatatttaaacgtctgaatcaaaaaatcattagcggactgagggtataaccttcccacggacctaggaaatgcagaagccgtgttcctgggctattctggcaaaatacaccgcaaagacaggattcaacatgggaacaggtcccctgtgctcacattaaggcttgaaaagacccatcaactccatgcatcgcataaaactgattccatccctgccctgcaacagggaggaccactcttattgaaatggaacacacatatgcaatcctcaccttatttaaaagatgaagctgctcaacggctcttagagggtgttcaaaaactcaaaggctagcatggctcctgtatcactgctcttgatgaattaacaggtgtaaatcaacatgaactagttgacaacatctgagagattcaaactcacagcatacatgtcacatcacatacaaacccttagacaactgtttcaacaggaatcgcttcaaaagcagataactcgctagatgagcttcagcgcagcctatctaaacaagactaaggctagc

SEQ ID NO: 15402 - DNA, 658 bp, Zea mays
  Clone ID: MRT4577_114049C.1
gctaagaatcataaaattcttttcataaaagggtatcaaggaagggtaatcaattttccaaggaagaaaatgcatcaacggtttagcacacaactcctatcacctaatgcatcaaacaatttgataaagattttaaaacagcaaggaggtggcaaatgcaccggtgcttgcctggataacactaggttagtgtttgttagatgacgtccacttgacgacaatcttttgttttgatacttgtttcgtctgtccatcttcagtttgcgaataagcccacgtttaacagcatcttggggtcgactcagctcgtcttccgtatcacgtgatgaattatcgtaccatcacgaaatcaggctcgatattcacgaaaacggcaacaatctctggtttgagccttttgtcgaacgcctagtgagcaacgcattggacttcgccttctccttcatctacagctccaccttcttccatacaaaaataatccgaactggacgacgacgtggactagggacataggaagttgcggccacgacatgggcaagctgacgatgaactccaggtcaaacaggtagcgggagttggcaacgagcaccaatgagagaacatccacgttgctgcggaagttggatacgacagccgacatgcaacgtatgagcagcga

SEQ ID NO: 15403 - DNA, 318 bp, Zea mays
  Clone ID: MRT4577_11404C.1
acgcgtccgctagtccaaggtctcagcctcgtcctcatccaagtcctatagctgaagttccggtgcatagccagctcatgctgtcgtccccatgtctcggtggtcgtggctagcgatgctgtgccgcctgtgatagcgacgacaacagagagttagtcggtggcatctacgtcaactagcacagtgacagctgcgacaaccgcgactacgccttccgcgcactctgcaatcgttgcaagcaggcacacctcctcgtcgacgctaacacccctcgcgactccaagtagctagcccgtgccgggggactggatctgcagc

SEQ ID NO: 15404 - DNA, 644 bp, Zea mays
  unsure (1)..(644): unsure at all n locations
  Clone ID: MRT4577_114050C.1
accggtnccggaaatccccggggnagggtgtggttangctagcagcctgaattctccgcccatcaactcagtcagcaggaagcaacccgcctagcgccctcgatccaaggacctcagagattcggccgtcgccactccggggccaagaaatgctcctcctgctcttcttctctgtcctcgccgccgttgccgccttcctcctcttcaagttcgccaccgtcgtcgatggggacttgacgctcgtatcccgcggtccgccgctgcgggagagggtcgacggcaaggtcgtgtggattactggagctagccgcgggattggtcagcgtgcctcttcaactctttaatttgtcaattttagtaccgactgttcggtttagtaataacttgctaggttgttggtttcatgctatgttgtaggtcttgcttctaaagtcgaataatggaatttgattgagctggtgtaattgtgttcattactaaagttaactaggcgttctgctaatgctttggctaaattattgaaaaaaagcttgtcgattgatagaaggataattaattaatcatacagctctagtttgcaattatattgaaatgccaactgcacattcaggagttaaacaaataatttgaataaaataggtttc

SEQ ID NO: 15405 - DNA, 138 bp, Zea mays
  Clone ID: MRT4577_114051C.1
atagcatgaccaaacatcaccatcttctatgttaaggatctaataagatacatcacagccagaggagatcagaggccatagatccgtatatcatgctgagtgatgcaagcagagctgccaggcactgatgaagatcac

SEQ ID NO: 15406 - DNA, 213 bp, Zea mays
  Clone ID: MRT4577_114052C.1
tgcccccggccccgacgaggcgacgccgttgctcctgatctcctgcgaggggatatggcgctcgttccagtggatctgatctgtgagattgcgaggaagacacctccttcctggggactcagtttggcaacggtcaatgccaacgcgcagctcaccaaggagcccaacaacctctacattgtgcattcctacggggcctcctggttagcaggc

SEQ ID NO: 15407 - DNA, 475 bp, Zea mays
  Clone ID: MRT4577_114053C.1
tccgcccatcaactctgtctttttggaagcaacccgcctagcgccctcgatccaaggacctcagagattcggccgtcgccactccggggccaagaaatgctcctcctgctcttcttcgctgtcctcgccgccgttgccgccttcctcctcttcaagttcgccaccgtcgtcgatggtgttaccccaatttcattcttcaatccaaccatgccttcgttcctctctctttccgttcttctcttcgcccctgttgggttgggaagattgggactgaccccttgttctttgatggctgtaggggacttgacgctcgtatcccgcggtccgccgctgcgggagagggtcgacagcaaggtcgtgtggattactggagctagccgcgggattggtcaacgtgcctcttcaactcttaatttgtcattttagaccgactgttcgttagaataacctgctaggtgttgtttcatgctatgtg

SEQ ID NO: 15408 - DNA, 229 bp, Zea mays
  Clone ID: MRT4577_114054C.1
tgaatatatgccagtcttggctgaaatggtttatataccatagttctatatctgtgtggtgttatgtaccggcacgttataaggtacgaaaactgctttgtaatgcagtatgtgacattaataatattgtaaagttacattttacaatagacaaaaaactgttctggactgcacatctgcacacactacgaacagttgcatttcagagagttctctcaatttgtaagtt

SEQ ID NO: 15409 - DNA, 186 bp, Zea mays
  Clone ID: MRT4577_114055C.1
tcgtatgcaccagtgcctaagctcggaattcggctcgagcgctgttggaagcgagcttttattttcatggtccagggtaactgcatgggtggggcaaacttagtgcgggggccacaaagagaacctttagactttttgtggcccaactggaacaacctccgcctctatgcatgattagcccaaacg

SEQ ID NO: 15410 - DNA, 330 bp, Zea mays
  Clone ID: MRT4577_114056C.1
ttgtcgcgtgggtgagatcacccgggcactgctggctgctgtccagatcgctggtcacgcatcatgatactactgagctgcgaacgacctctctcagacaaccacaggctacaggatgtatcatgagagggggcacattcaggctgatcatgctcaggacctcctggatgatgagaccaatgaagcactcatgcaccgaattaacgacgacctggaatactttgctgcaatctgtgaccggtctgctacaggctactagccatatgtcacttatgatgaacatctccagatagccatgatgagtgcttatgttctcaagactatgctgat

SEQ ID NO: 15411 - DNA, 303 bp, Zea mays
  Clone ID: MRT4577_114057C.1
ggtgcaagaaggaactatgaaaggtgtcactaagattccgaccatcaagaattgcggttccacacagttactgcaggcactaaccgtaactttaaaacatcatacagaagtggcgactgatattacaccttacatggctatcacatcccctgtcgatgcatcgatgaaattgaccaccccccatccggcactagattcggtgcctagattttgctatatgatcactcatttatgctttcaggatgtacatagcaaggctaaaagtatatattatcagtaagcctgaccaaacattaccacaat

SEQ ID NO: 15412 - DNA, 349 bp, Zea mays
  Clone ID: MRT4577_114058C.1
cggcggccggcccgacggacgtactgaaggacgcgtgattgggacggtaacgaaactgtgaatacacgctccttcagatgactccggaagacaccgactcattgctaatggatactctgatggagaactagcatagcccacattcatgggcaccaacgcgcttgtgatgcctgccgccttatcatcacccggctgatctctgaccccgcatgacaacgaccacggaccctgattgtggcacatacagtgattactctgtctctttctttgatgattcttcgcgattctctgcatggccgctttcactttggttcctttcttggctaactgcttagagccgttccggcgg

SEQ ID NO: 15413 - DNA, 596 bp, Zea mays
  Clone ID: MRT4577_114059C.1
gaaagccgacagagaggaaggagggatggggtcggacgcctgtgatcctttgttcatcgctgcatgctgcaagctcgtatcccgaccggcgtagattcgtccgcccaggaactacccatcgagtatggaagatcccccctccgcaccttcggctgcctcagcgcgatgatcccctacaaggcgtgctcgtggatccactgatattctgcggatcaccggtgtcgaagatgacctacctttgagaacaacgtgaagcctctccactagtgtgctacatgtttggtgttatgggtatggtgacgaactattttggtaccgttcggcctggcagtactaatcgctgatgtgagaaaaatcaccatgcacttccttcttcatactacatatagtcgatcttcttgctgctagccatagcttgggtgctgacctaatgtatgtcctatttgatcaaacgtgatatgtatggacatcaacttaatggaccggtacatgtatgatgctcgataatctatttgtgcagtactagtaaaagcatagactgattgaaccaacacttgacccactccggacatgttgatcaatgatcgctggaaaaa

SEQ ID NO: 15414 - DNA, 224 bp, Zea mays
  unsure (1)..(224): unsure at all n locations
  Clone ID: MRT4577_11405C.1
aganncagctacnnngaagacgganacgacacgaactgagtgtagacngnanagtgaaacggagaaattaattccggaaacncggttaacctgacaggcgtaacacagatnnnccctaatnagtaggagtacgnattaagagacttggacgttaaatncatggtncattagactgtttacctgtgtgaacattgttgataccgactacagnaattaccagcagc

SEQ ID NO: 15415 - DNA, 250 bp, Zea mays
  unsure (1)..(250): unsure at all n locations
  Clone ID: MRT4577_114060C.1
tctcaatgagccaaaaaccaaanacaancaangggcccttttaaangatatgggggattaaacacccaagaaacaagagaccccaagcaaaaaagacgaagcaggtaaaaagaaggccaccgaaacgaatcagaagacaacgacaccccacagtgcaaacgacaacacaaatgatcctagcaaacgccacgcccaactggagaagactgatgccaaacaagaccacctacatgccaagagcacagacaac

SEQ ID NO: 15416 - DNA, 550 bp, Zea mays
  Clone ID: MRT4577_114061C.1
ctgaattcgttgctgtcgtcctcgtatagtttaataatgttctgaatcaccatgagcagtagagccatatgattcttcagttgacaatagcataagaagctgtctccatattcgcttcctcttcatcgttaacatacatctcatgatccaaatattgctcggtttcggaataagaatcaattctatctgggatatcaatatcttgcatcatccttacaattttagaaaacgtgatgaaggtatgcgtcactgattctctaaagaagatcaatatctctttccattcctctttggaaagtttgttaccaaccccatctgctaaacgcatgattgcagatacaccaatggtagcacaatgtttgtaggggcttctgatgaaagatgtaacaattgatgctgttctaccaagttctgaccggatcacatcaaaaaaattaacaaacaaacccaccaagcatttcactgccaacgtttgtgtttcaagatcaggtagattatactctgcagaatttgatgttgaaatctggtcactgggtatcgacctttcatt

SEQ ID NO: 15417 - DNA, 897 bp, Zea mays
  Clone ID: MRT4577_114062C.1
atggaattggaaaaagaatctatgggtactgctactcaatttgagcaagcaactatggaaacaacaggtgatcagtcacaaactatacggggtaaatctagtggaactgaaggccaagtggatgctaattttgtagaccctgagaacgaaactgagaaaaaggaggcaaggaaggagattgtgccaaggtcaagtatgtgggatcatttcattaagatcaaagatgagaagggtaggctaaagtctgctaagtgcaaatattgtcagcgtatccttaaggctgattccaatcagcatggtacatcttcattaaataaacattttaatgtctgcaagcgcaaccccaataaatttgataaagacccaaagcaaggtactttgcaagcaaccggaggggaagctcctagcacttggaggtttgatcaaaattcattaagggatgcatttgctgaaatgctcatagaagatgagttgccctttgcttttggtgagaagtcaggtttcagaaaatttatgtcaaaagcttgcccacggttccaagtgccatctagaagaacttgtactagggacattgttcgtacatacttcctagagagggccaagctaaagaagttcttcaaagactcttgtcaaagagttagtgtaacaacagattgttggacttcccaacaacaagatgggtatatgactgtgacagcaagttttattgatgagaattggattttgcagaagaaagtcattagctttttcaagataaaggggcataagggggatgatattgggaaaagcttgatcaaaagtttggtggactggggtttggatagaattatgactgtaacagttgataatgcaagtgccaatgatagtgctattggttatttgagaagacaattatag

SEQ ID NO: 15418 - DNA, 384 bp, Zea mays
  unsure (1)..(384): unsure at all n locations
  Clone ID: MRT4577_114063C.1
gagattatggggtggagtgggnnnaagtgtgtgattgaagttngnaatgggttnanattnnttgannttattttgtttttttttgagtnnnntgaaaagaggtggggagggggtgtntttttatttntgatgaantntttnaanaggggggggggggganagaagattgttgagaagtattnnaantnnaagattgaaatttatattttgaatgagagngagtatggtgggattgttanngaggagttnttgnnanttnnnnaggnagggaaatgtgggaaggatggntggtatnngtttggtnatggtgatgtgtttnngtttttgaataataggggaaaatttgagattttattgggtgagggtggagagtatgtgtttgtt

SEQ ID NO: 15419 - DNA, 232 bp, Zea mays
  Clone ID: MRT4577_114064C.1
ccaaaaactttgtcttattaaattaaaacccccgtttccagcttggtaaataaataattaaaaccaccgtttccaggttggtcctgcaacaaatgggctaactgctcggttttaacttataactgctaatcaggggcattgcaataattaatacgggcggggccggcccttgggggtgttgttgttgttactaccatgggaatctcccttttgcgcgttttccggcggaagg

SEQ ID NO: 15420 - DNA, 502 bp, Zea mays
  Clone ID: MRT4577_114065C.1
gcgtgctcgtgctcgcctatccccgcgacccaaagacggtcgcccttctgccaggcttctctgatttctcaccaccggcggcgctaccccctttggacaacaccatgagggagtgcatgtcgctccacatgaggacaggcgcggtttccaggtcggaaacgcgtgctgggagctgtactgcctagagcatggcattcatgctgatggtcagatgcccggagacaggaccattgggggaggtgatgatgctttaacaccttattcagtgagactgtcgctgggaagcacgtccatcgtgctgattttgttgaccctgagcccagtgctatcgatgaggtgaggactgccacctatcgccagcctcttacatctctgagccagctccatcagtaggcaaggaatgatgcagccaacaacttcgctcgcggtcactacatctattggcaaggagattgttgacctgtgccttgccgcgatcaggaagctcgcagataatagcact

SEQ ID NO: 15421 - DNA, 824 bp, Zea mays
  Clone ID: MRT4577_114066C.1
attcggcaccagagcttttatatcaagcaaagctgaataactatgacaagttcctgaataatactattgggctagttttctatagttgtccgcattttggcagtaaacttgcagacatgccatggcgtatgggtttagtgtttcgtcctgctccttcgattggggagttaagaagtgggtctccaagactagttgaactgaacgattttgtgcgtcaacgacacaacaaaggatttcttgatgttcttagttttagtgagacccaggtcacaccgattgttgaaggatatggcggttgggcacttcgtatggagatagtgccaattgaatctgcatacccaggctttggggagcttgtcgttctaccgtccactgatcatataaattcatgtaagccagttaacaagaacgatccttcttatgcggaaaccttggcatttttggagaagaacttcaaattatgcctggaaagagcagagtcctaggtcttgtcaatggcgccgtggagttttcagcaatctgaaggcttcattttccatttaccgccagagacttttctcccgttaacgacgaatggtggttgatctgaccaaatgatctgggcgtgctgtggtttatgaagctcgcaccgaactttgtagtaacattgcacatagcggttaggctgtaaatagctgtcttttaccttttagttgacatgagttgcccccatgtaagatcaagctatataccccaatgcctgtatcatctcaacagttttcagcaacagattttttacaaaacaatctcataatatataagccattttcataaaacaccaaaaa

SEQ ID NO: 15422 - DNA, 268 bp, Zea mays
  Clone ID: MRT4577_114067C.1
cctaccttcctttctccttctaagcatttctagtgcaattgcgagccccctaccaataccataactctcccatttcatccacctcccttgcaattcaaaaactcgcttccttgaaaaaacacgtggaatccttccttgtactttccctgctataagatttctatttttcaaaacactacttgaatgcaatgaatctataattctaaagcatcccataaaacatccatcaaatgttactctcacattataagatcattttgtcaaaact

SEQ ID NO: 15423 - DNA, 1026 bp, Zea mays
  unsure (1)..(1026): unsure at all n locations
  Clone ID: MRT4577_114068C.1
gtactcgngnagtgcaagacagacgtggctcctaagtttcgtctactgatgctaccactgatccctcaagtgtacgggttcctcctgcagcacatatccgaaggcatgctgggaggctgcttaccattctctctcttctacctaattcaaagaaggaaattatttctgatgctgtatggtgcaaatggctcgaggattgtgctagtgggcgaattccctgcaatgatataaaactaaaaagttactgcaggttaacattattgaatatattatgttctgagagtccaaatacaagaaaagcctctgatgaatatcctgactcagaaagtgagtataaaagaaactgtccccagtttggagatgcactattcttgctaaatccagagttacctcttgaagttcatgtggacaacagtggttttgggattttaagagtttcaagagataattgtaaggaagatggaggtattggaggctctggctctgaaactgtgaactctgtagatgatgctgaagctgcatccaaaagtgtccctttgatggatgttgtgtttgttcatggccttcgtggcggcccattcaactcatggcgaattgctgatgacaaatcatcaactaccaaagctggtttagtggaaagcattgacgaggatgctgggaaagagggtacatgctggccgagagaatggcttgcggcagattttcctcaagcacgtttttttacggtcaaatacaagacaaatttgacccaatggactggagccagcttgcctctttaggaggtgagctctatgctgctgaggaagttggtggctgctgggattggtagtcggcctgtcattttcgtgacacataggttttctatagttgtccgcattttggcagtaaacttgcatacatgccatggcgtatgggtttagtgtttcgtcctgctccttcgattggggagttaagaagtgggtcttcaagactagttgaactgaacgattttgtgcgtcaacgacacaacaaaggatttcttgatgt

SEQ ID NO: 15424 - DNA, 2757 bp, Zea mays
  Clone ID: MRT4577_114069C.1
ggcacatcctcttgggtgatgattatgagaaacttgctgcaattgaagcatatgatgcatctcgtactcgagaagtgcaagacaagaacgtggctcctaatgtttcgtctactgatgctaccactgatccctcaagtgtacgggttcctcctgcagcacatatccgaaggcatgctgggaggctgcttaccattctctctcttctacctaattcaaagaaggaaattatttctgatgctgtatggtgcaaatggctcgaggattgtgctagtgggcgaattccctgcaatgatataaaactaaaaagttactgcaggttaacattattgaatatattatgttctgagagtccaaatacaagaaaagcctctgatgaatatcctgactcagaaagtgagtataaaagaaactgtccccagtttggagatgcacttttcttgctaaatccagagttacctcttgaagttcatgtggacaacagtggttttgggattttaagagtttcaagagataattgtaaggaagatggaggtattggaggctctggctctgaaactgtgaactctgtagatgatgctgaagctgcatccaaaagtgtccctttgatggatgttgtgtttgttcatggccttcgtggcggcccattcaactcatggcgaattgctgatgacaaatcatcaactaccaaagctggtttagtggaaagcattgacgaggatgctgggaaagagggtacatgctggccaagagaatggcttgcggcagattttcctcaagcacgtttttttacagtaaaatacaagacaaatttgacccaatggactggagccagcttgcctcttcaggaggtgagctctatgctgctgaggaagttggtggctgctgggattggtagtcggcctgtcattttcgtgacacataggtaagggttgttgtttggtctatgatgctactcggccatgcaattgttatgacatgttgctatatttgttgtgctaactcctcacctatgtaactgctagttactgaaataacttatgacttgctttctccccattttcatactcagcatgggaggactggtggttaaacagcttttatatcaagcaaagctgaataactatgacaagttcctgaataatactattgggctagtatgtatatttatgtgttgaattttgtgattatctgtgtgcgcgttaataagatctaactctttctgcatcacaggttttctatagttgtccgcattttggcagtaaacttgcagacatgccatggcgtatgggtttagtgtttcgtcctgctccttcggtatggtcttccattgttatggtcgctagatcggtgagggattggagagagatatcgatggacagaaacgccggtcgggggcctgtgcccacggccgagcaagaggagggtttctcccttctaattcttgcatgctttatttctcatccattgattacataaatatgccggttggccgtccctatctagctagagatccttatctcctaaaaactctcaacaaactactaactgataaccttcctagataatctcaactaatctcctaaataatctcaactaatcttctaatcttatctctaactatccttatctaatcccccttgagggcccatggctgctgctagcagcccccctccgtgggcctccttacgccctaacatccattccccatctgataagtttccttacaaattgatagttttcatcttctctatatgttctgacatttaatttttgatagattggggagttaagaagtgggtctccaagactagttgaactgaacgattttgtgcgtcaacgacacaacaaaggatttcttgatgttcttagttttagtgagacccaggtcacaccgattgttgaaggatatggcggttgggcacttcgtatggagatagtgccaattgaatctgcatacccaggctttggggagcttgtcgttctaccgtccactgatcatataaattcatgtaagccagttaacaagaacgatccttcttatgcggaaaccttggcatttttggagaagaacttcaaattatgcctggaaagagcagagtcctaggtcttgtcaatggcgccgtggagttttcagcaatctgaaggcttcattttccatttaccgccagagacttttctcccgttaacgacgaatggtggttgatctgaccaaatgatctgggcgtgctgtggtttatgaagctcgcaccgaactttgtagtaacattgcacatagcggttaggctgtaaatagctgtcttttaccttttagttgacatgagttgcccccaggtagttgaaagatccgtagaatcgagggtggttactttgttcagggaaagaccatcaactacgcaggatccacagtggaggacagctgtcacatcctcaaacaaggccctcaagtcaagcccaatttaacctgaagacaaaccatcgacagtgatacctcacgttctgcttaatgtgctgggactaataccaacacgtcagggtcacaactggcgtctgctggcattgcgctaactgatgcatttagaactgaaggttggggcaatatttgaagaattaacaaaatgtaaatagctttggcagttactttacccttttagatgtaacaaactcatcccgttggttacatgtaccttgttttatttagcgcttcatctaatttcccgtaaaaaaaaaaaaaaaaagggcggccccgactagtgagct

SEQ ID NO: 15425 - DNA, 435 bp, Zea mays
  Clone ID: MRT4577_11406C.1
gctcagtctgtagagtgtgactagagcgctggagccactgcacccacgcattgtgcctgatgaagacctgcgttccttatgcatgagccgactgactagcacgcgccttgcaggctgagtcgtactactgtcagagtggcggaccagcgtgctaggcgccggcgcgctatgatatccccattgtggggtttcaagactgagtaggccatgcccgtctctgaagagcgacgtgtatgccttcgggggcgtcctgctggggttgctgtccgggaagattgccggtgagatcatgtgcctgagcgatggcgcggtcttcctgtcgcgctgggtgaggatgctgcctctggaggagcgtgtctgggcatgcgtacccaggctcttcacgagggttgctggcccggttggcgcccctcaggcgctgtatggggtgctgcg

SEQ ID NO: 15426 - DNA, 308 bp, Zea mays
  Clone ID: MRT4577_114070C.1
acccactcgtccgacgcctcctgccacacatacgaccactcgttctcccactcgtacggctacttaattattagagagacccttgtcatatttattatgctatttgcgttgtaactttatgattttttttttatgtacctgtatgccttttatactcttgtacataaactactagttttagttcgtttatactgtccattctgtatttttgatgtatcatctctcaactctgccactgctacaccaacttatttcatgtataagtgtactaatacatggtcatcatcatgatacattccttatattct

SEQ ID NO: 15427 - DNA, 390 bp, Zea mays
  Clone ID: MRT4577_114071C.1
tgcagccctacggcgactccctactgctcgcctcagcgccagtcgttgaggtagcagggttgccagcagctgatgcaggtggagcctcagcaccggttccagacgatcttcggatcggaccttcagctcattctgcagcatcagccacatagaggacagctagtggcgctgctggctgcgcaaatagcgcagcaactgacggcgatgtgcggactgcagcatacgactacatgcccatacgctgctggcggacgtgaaccgactgaagaaactatgtgctgtactatagccgttggctagctagctagcagagtcatttagcggcgatgatcgaatcatgatgattgacgcatgatcatgggtggaacgaacagtgtgaacaatagcctg

SEQ ID NO: 15428 - DNA, 327 bp, Zea mays
  Clone ID: MRT4577_114072C.1
cggatttctgtcaactgtcatgctccttacaattccggaaacatgcctccgtcctacaaattgaggaatacgtccggtaatctagctatatccctgtccacttgtccattatgtctacagtctggtgctcttctgtcctctcggcgacggcgacctcagtgccaaagaatccctcgcgcagtaatccaagtaaccatcttcgcttcaccttctccaactcctccgcaaaatcaagctgccacagattctcttcctgtagaagtaaccgtcctcctcctctctactactgggcttgcatcgagtctcggaggaggatatcttgtggag

SEQ ID NO: 15429 - DNA, 399 bp, Zea mays
  unsure (1)..(399): unsure at all n locations
  Clone ID: MRT4577_114073C.1
tctcccccgctccgtctccctccccnctcctcccncgatccgctccctccgccgccagatcccgacgagcccccccgcgcccccgcgtcgaacatgagggagtgcatctcgatccacatcgggcaggccggcatccagggcggnaacgcgtcctgggaactttactgcctcgagcacggcatccagcctgatggccagaagaacggagacaagaccatcggaggcggtgatgacgncttcaacaccttcttcagcgataccggagccggaaagcacgtgccccgcgcggactccgtcgacctctatttttttttgaccgaccccgcccgcaccagcgcctaccgacagcatcttccaccccgagcagctcatccgagacaaggaggactcggccaacaa

SEQ ID NO: 15430 - DNA, 252 bp, Zea mays
  unsure (1)..(252): unsure at all n locations
  Clone ID: MRT4577_114074C.1
ggacaaaagatttctcccaacttnntgatcattaatgatggtatgatcggacagaaaaaaacgtactgtaagttttgacttcttggccgccactcataatagtaaaagcttattgcctttaactaatgtatttcttacacaaactcaaccaaagcaaaccctgcttttaacgaacgagaaacacctaattccctagaggtgttgaggcgcctattattatactaataccgggtggggtatctggcctgggcc

SEQ ID NO: 15431 - DNA, 642 bp, Zea mays
  Clone ID: MRT4577_114075C.1
ggccgcttttttttttttttttttggtattttttttttttttttttttttttttttttttttttcacactttttttttttggtttttttttttttgttcatttttatttgtaatttataagaaggaaccaaaaacgatggttttgtttgtctggcaagacaggaatcataaaaaaaaactggttgtatggcagcaattgtagaagaagaaagaaggggggcaccaacgggttaggcactaccaaggaaacaagtgacgggtggcaaaaaaagagggacgcaggagagctcaacagagtcagttgaaagaagggacacagctggggcaagtaggcaacagggaacgccacacctaggtgggtcaaaaaagggacaaggggctgcaacaattgttgttgcaggaatgaaagtgcattgcccacagcaagcaggctagaagaaagcaggtgccgctggtggacaaaagaaaaaaggttcaccatggctagaatgactaagcggtggcagaaactgttgtagctgttgaaaaaaaaaggattgcaactacgctcgccagagcaagggggaagaaagcatgctgctgctatagcaagcaggcggcagggttcaccaaggctaggtgggctcagtgccgctaggaact

SEQ ID NO: 15432 - DNA, 684 bp, Zea mays
  Clone ID: MRT4577_114076C.1
attgggacctcgagccggccgggatcccccccgtagcacagagacgaacaaccgcacccatcgatcgatcgcccgtaaactgagctctaccgatcgtgtggagccctctcccacgataaaaactccggggagggctgctcccacatcaacctccaaggtcaagacgacacgatgtcaacgaggtcgtctccgcgcataaagaaggccacccagctgaacaagctgatgaacgtcgtattgccaccgccagtctgaggacatgcaatgtcgatagcattcctgctggatgtacgcaccgttcgcgggaaccagacccctgatgacctggagatgaaggacggcgactacacccacgccatgatccaccagaccgcaggtggcgatactacccccacctaagagcagcagctgctcaccctcgctttgctctccctcctgcgcagcactaaacaagacgtaaaaagtcatttgtaagggacttgtgatgctctgcttccttgagtcattgctgagggacatccttagcctttatttagtgatatgcaatgacactttcgcctgtcatcactcggatatctatccctaatacatgccgccatggttgtacaagaacaaaaaacaaagtggacactcccattccacgcttttgttctctttagccgagcgtgtaccagcgcacttgca

SEQ ID NO: 15433 - DNA, 563 bp, Zea mays
  Clone ID: MRT4577_114077C.1
ggattcaacaatcctaggtgtcattgaggacttggctgaattgtcacctgcaagggagatgcctgatgagatcattcctgttactgaagataatgaagtggccatcaatgaggagaccatcaaggaagatgattttgctgacgctattcagactgatcctactccaaaggagattaatctaactgctgcgggggaagataagatcattgaaggcaaagaaggtgctgatgataagatgccacaggctgctgaaactagtgaacatgatgaggacactgaatttaaagaaggggcagctgatgaggtgctgcaggctgagctggcagacaatgaaacaagtgatggtgaagatgaccgtactgaagtgagagaaggggctgctgctaagacgttgcagggtgaactgacagacgatgagactagtgaagatgacctccatgaagatgaagaatgggcttcagatgatgaggaaactgcctctagtgacgagagcgatgaaggtactgagtccaatgaagggagttacattgctgatgcagtgcagatgttgcagggaactggga

SEQ ID NO: 15434 - DNA, 1133 bp, Zea mays
  Clone ID: MRT4577_114078C.1
gattgttcgcctcatagcccaggagcatatgaacaccaaacaatatgttggcaaggcagactttctagtttttcggactttaatcaccatgggtttcttgtacactacaagagaagaagctgtgtgctgtgatacagttaccatcgcaaactctgttgctgtcgatggctgacaaagcaggtcgtttgattggcatgctcttccctggggacatggtggtgttcaaaccgcaggcctcaactcagcagacaccaatgcagcaacagcagctacagcaatttcaacagcagcagcagcagctgcaacaacacatgcatatgcagccgcaaggcctcccacttcagcaatcacagatgcaactccagcaacagcagccgcagatgcaaccgatgcagcagcagcaaccttcacagatgcagcagcagatgcaatcgatgcagcagcagatgcagccaatgcagcagcagatgcagcatcaacagcaacagatgcagcatcaacagcaacagatgcagcaaatgcagcagcagcagcagcaacaacagatgcagcctcagcagcaacagatgcagcaaatgcagcagcagcagcagcaaatgcagcctcagcagcaacagatgcagcaaatgcagcagcagcagcagcaaatgcagcctcaacagcaacagatgcagcaaatgcagcagcagcagcaacagatgcagcctcaacagcagcagcaaccccagatggtgggtacaggaatggggcagcagttcatgcaggggcacaatcgggcagtgcagatgatgcaagggaagattacgccacaggggccgggcagcatgcctgggggaggcttcctaccttaagcaccttttatcagcaggcatcagatgaattgagggtttacactgaccaagtgtcgagatgtcaacttcatttgacagggttaggaatagtcactcggggagtgttgctaaaacttaatctgaaaacttaagcatccctgtcaccgataggtaaatgccagatgtccatgcataggtgcatactttatgatatggtggtgtactcgtaaccttgagtgactttatggcattgttgtactagccgtaaactattaggtataacagaattttatttaactacag

SEQ ID NO: 15435 - DNA, 334 bp, Zea mays
  Clone ID: MRT4577_114079C.1
atattgtttttttttttttttttttttttttgggggttttttttattttttttttttttgggggaaccacggaatttatttattgaaaaggtggtaagggtaaagggtttttaaaacccaccagtgaaattgttttattgcaaattatttgggcataacccggtgggttaaataaaactggtattattcgacagtggacaattggaagtattttttttggcaaaaactgtgcgagatccactagctggttatcccttgttgctgcggcttaaattgtaggtggagcccgactggagggggaaaacccaatttccgccgtttttgggggcgcaaa

SEQ ID NO: 15436 - DNA, 323 bp, Zea mays
  Clone ID: MRT4577_11407C.1
tttgtttctcaaaagatgctgataagatcagaacgaaaatggctgttgcctagggagtatgacgtgtctgggttggacaaaacagtcttatgtctactcctgctgtatctgctgtcatgcgcgagagaattggcgcgaatggatacaacgggtactggtgcctctatgttcacagcgagccatctcccatgtggtcctacggaggactataggctgcaatgctatatgactaataggggacctgaccgtgaatgcgggaccgacgagactatgtctaatacaacgactatctctgaatacctcatctctgaagacctttccag

SEQ ID NO: 15437 - DNA, 2615 bp, Zea mays
  Clone ID: MRT4577_114080C.1
ggggaacaaggaaaatgagagctgcaaacctccacgcattctcttatttaaagacacccacttatgggaaatgataatgtgcaataacacaagcgtataagcaaccgatccagccacaccagtcggactggtggtcaaggcagcctcctcaacaatctgtcagacgttcggttgaagaaatccacttctttaggaggaggagccacctcgatgggactgcctaacatgggagcaacaccaatacaagtccacatgtcaaacatgatatcaagcggcatgacatcaacaccctctgtcatctcctctatgtctggacctggacaacctattagtactcaacagatggtacagagcacagctcttggttcctttggctcaaacactcctactgttacagacaaagcgattacagctgtatcagcctctttgactaaaaaccaaagcagcatgggcatgggtcattcagtgcaatctgtggcacaaacagaatttgtgtctggtagaaaattaggacaaggtggaattgtggcaaaccaaaatgtgatgagcaccctttgacgaactgctatctcttcaacgcctgcgatgatgccgacgcctttgtatgactccacgtacactagtcaattcattagaagtgaataacaattctgctatgaatatgcctattacgcagcagcatgccaatgcccaacagccgccaccaaagtacgtcaaaatttgggagggaactttatctggccaaaggcaaggacagcctgtaataatttgtaaactcgaaggttataggagtggaacagcgtctgaaacacttgcagcggactggccagaaacaatgcagattgttcgcctcatagcccaggagcatatgaacaacaaacaatatgttggcaaggcagactttctagtttttcggactttaaatcaccatgggtttcttgtacaactacaagagaagaagctgtgtgctgtgatacagttaccatcgcaaactctgttgctgtcgatggctgacaaagcaggtcgtttgattggcatgctcttccctggggacatggtggtgttcaaaccgcaggcctcaactcagcagacaccaatgcagcaacagcagctacagcaatttcaacagcagcagcagcagctgcaacaacacatgcatatgcagccgcaaggcctcccacttcagcaatcacagatgcaactccagcaacagcagccgcagatgcaaccgatgcagcagcagcaaccttcgcagatgcagcagcagatgcaatcgatgcagcagcagatgcagccaatgcagcagcaaatgcagcatcaacagcaacagatgcagcatcaacagcaacagatgcagcaaatgcagcagcagcagcagcagcaacaacaacaacaacaacagatacagcctcagcagcaacagatgcagcaaatgcagcagcagcagcagcaacagatgcagcctcaacagcaacagatgcagcaaatgcagcagcagcagcaacagatgcagcctcaacagcaacagatgcagcaaatgcagcagcagcagcaacagatgcagcctcaacagcagcagcaaccccagatggtgggtacaggaatggggcagcagttcatgcaggggcacaatcgggcagtgcagatgatgcaagggaagattacgccacaggggccgggcagcatgcctgggggaggcttcctaccttaagcaccttttatcagcaggcatcagatgaattgagggtttacactgaccaagtgttgagatgtcaacttcatttgacagggttagggaatagtcactcggggagtgttgctaaaacttaatctgaaaacttaagcatccctgtcaccgataggtaaatgccagatgtccatgcataggtgcatactttatgatatggtggtgtactcgtaatcttgagtgactttatggcattgttgtactagccgtaaaaaaaaaaaaaaaaacagcctcagcagcaacagatgcagcaaatgcagcagcagcagcagcaacagatgcagcctcagcagcaacagatgcagcaaatgcagcagcagcagcagcagatgcagcctcaacagcaacagatgcagcaaatgcagcagcagcagcaacagatgcagcctcaacagcagcagcaaccccagatggtgggtacaggaatggggcagcagttcatgcaggggcacaatcgggcagtgcagatgatgcaagggaagattacgccacaggggccgggcagcatgcctgggggaggcttcctaccttaagcaccttttatcagcaggcatcagatgaattgagggtttacactgacccaagtgttgagatgtcaacttcatttgacagggttagggaatagtcactcggggagtgttgctaaaacttaatctgaaaacttaagcatccctgtcaccgataggtaaatgccagatgtccatgcataggtgcatactttatgatatggtggtgtactcgtaatcttgagtgactttatggcattgttgtactagccgtaaactattaggtataacagaattattatttaaacaaaaaaaaaaaaaaaaaaaaaaaaaaaaaaaaaaaaaactcgagggggggcccg

SEQ ID NO: 15438 - DNA, 387 bp, Zea mays
  Clone ID: MRT4577_114081C.1
gccacacgtaggggcgagaggccggaccatataatggaccactagctgagcgctgtagcaggcgcgtggcgtagagatatgctcagcgagcttaagggaaggatgctgagcacgcaacgctccccgggcaagcgaccgaggatgaggaaggggttgaagattctgtaaaaggccaagaacagctgcacggatgcgtctatgtgctgaatactgaaagctgcgagtgcctactgaaaagtcaaggccgaggcatgtagaaaaaaagacgggtcctggctcaggtcgggaattacatccatacgaatacgtgcaagactgtgtatatagtcggcaagtactacatgcagtatgcgctgtttatagatattgtaacttgaaggatcaaac

SEQ ID NO: 15439 - DNA, 298 bp, Zea mays
  Clone ID: MRT4577_114082C.1
tcagcagctccagataaatcccgattctcgggatctgcacgagtcactcctactccaccgctgatggccagcagaggaatggccactcttctcattggcacagccatcctttgccgggggggcatccagcccgggtggccacccctccttatctctgggtggtgcacatgcccttctttccccactccctgactagagccactgcacaggaggctatctgtagccccaagctgcctttctgttggacaccaactttagtcttgggctgcaagccagctcagctgaggcgaagttgact

SEQ ID NO: 15440 - DNA, 611 bp, Zea mays
  Clone ID: MRT4577_114083C.1
ctgcaattcccctccagcttcctccccggccccttgttttcccctggctggagcctcttccagccgtgtgccagtccccagctccttccctgcggcgcccgctcccttctctgcttcccctgcttgtttctatggcgcgcacccatatgctctgctcgctcgtcgccgtagcccctggtcccagctctggcgcgcctgcttcctggctcgcctgcgcgtgcgttaactccctctgcccaggcgccccctcactggatcccctccatttatgaccagcgccacttcctggtccaagctccctggttcttttccctgtgcgtccaggcgtcgaagctccctgcactcacctggcgctcgcccctgacctcccatggctgtctgccccagctcggcttggccctctgttcggcgtgtttgcccctgcagagtcggcccagcctccatttttccccagcccccctctccctgctcgccttgctcctccggcgccgcggttttctgctcgcttggccggccatggtggctgtgcatgcctcctggccatggacggttttggcccaggccaccgtcgcgcccagagaaatggtgcgcgtccctgcgcccggttttcg

SEQ ID NO: 15441 - DNA, 608 bp, Zea mays
  Clone ID: MRT4577_114084C.1
cctcgaggccggccgggccgggacctatagctgatctaatgtgctgatagcctctactctcttctctccttcctttcttctctctgcgctcacctatcgaatcatcctctatgcgcaccgtcgccttggcgcctaccaccaagagctgtcggacagcactgcacccacaaataaagcctagcagataatcctgaccctgacacggcagatccgtcccccatgaaatgctagcgaggtcttctccaaacctcctacattgccttccttcctatgtggatgacgccgctgccgccacagttccaccgccgcctctactaatcgctgctggcaaaaatcactatctgtcagtggatgagtctctgctgagatgctcacacacctgggcggtctcctagaataattcgttgacactctgaaaggaaacgtctgctgatgtaaacactggaatgtattgcatacagcatggcgtctgacctgcctcaaagactactggacattgccatcagttgcctgcaccataacgcatacctgcgctgggtctaccatgaatggtagtgctgtactgacacgagggattgctgagaacatcaagttgtggcacacctcaa

SEQ ID NO: 15442 - DNA, 261 bp, Zea mays
  unsure (1)..(261): unsure at all n locations
  Clone ID: MRT4577_114085C.1
ggggggacccacgcgacgnccacacgnccgcccacgcgaccggggaaccagaaaaggcccacgaacgaaacaggggggggcacccggaaggagggcggggaaaaaaagacaaaanaaacaagagaagcaaaccagcncggaagcggacagacccaccaagccgacacaaacgaacaaggccaaaagggacacaaaccgaaaaagcaaccgaagaagagccaaccggagggaccaaaacaggacggcgaaaaaacaaccaca

SEQ ID NO: 15443 - DNA, 795 bp, Zea mays
  Clone ID: MRT4577_114086C.1
tgggacctcgagccggccgggaaaggctgctacaatgttcgttccacaaagaaactacagtggttcttgatgaacctttaagctacagtttggatgactgcatagagtttatccaagaagatgagatagtggaggttactcctgcaagcatccgtatgtgcaagaacccaaaagtctcgaagaaaaagtaacataatcgcatccatttgtcgtcaatgcatcttctacacatagaagctgcatgctccgttgccaggtctcgtatgagtgacggctgcacggcgtcctcctcaagtcagtaatcaggatatttttggtggtctacagacaaagactaaaggtcgccagattaagatagaggattatatggcagttttgtgatgaataaatcagccgatacctggagtagtattatttggccacggataaggcgggcactgtttctcatgtactcccctgttcatttttatttatcctgttttagttcaaaaatgaactagacgacaaatattcgagaacagagttagtattacacatatattgtgtaggtcatacgtaggactataggcattgtacacgattctttcggcgctagtaaagaccggaacaaagctttagcaaatggattagcacacaactgctgctacagactcttatttatttgtaattcaagccaaaaaaaaaaaaaaaaaaaaaaaaaaaaaaaaaaaaaaaaaaaaaaaaaaaaaaaaaaaaaaaaaaaaaaaaaaaaaaaaaaaggaaaaaaaaaaaaaaaaagggcccctagggccccca

SEQ ID NO: 15444 - DNA, 1315 bp, Zea mays
  unsure (1)..(1315): unsure at all n locations
  Clone ID: MRT4577_114087C.1
actccttagggcgattgggttcctcgaggccggccgggctcgccctcgtaacccagccgccgtcgagagagagagagagtccaaagatggaggaagcgacgccaccgccgacacctgcgtgctccatcgcccgagccccgtcctgggtccggtggacttcgcgggacctctcagatcgtgtccgtgcaagcgggcgggcgcgaggattgctaggaattgctcacccaagcaatactcctccgaggaaccgcaccgcgtcgcggtcggcatcgtcgggacttcgtacgtcgccgaaaaactcgttgtcaaaccaggccgggaaagagaaaccgaccttaaaaccgcggtttcagaccggttttgtaaaccctgccgcgcctcaagaacttgtgcatcagaggagtgctggcaccggtggcagggcgcccatcagaggagtggtggcaccggtgacagccccatgtgcgattggatccgtcgtctgtggtgatggcgccactgccaccttcgtctccggcgcggatgtgcgcggtgactcgccatggcggcaggaggcattgaacggncggagaagtatatgaactgtaaaataacaccgaaattatttcattctcattgagccaatcatttctctttcgtacaacaaattgtaggtacattaatattgtttaaatctgttggtagactagagagaactgagtataagcaagttcttgtgatcatgcttgttgttcaaccaaacagacagctcagtgctaaacttgtccatcgccggcttgggcagaagcatcgacacgatggtcgagtggtcgccatcctggttcctgcagctcatgtggtcgcttcccagcttggaggcaaggtcgccagccagtggtatcccaccacccaccagctcggcccacccaaactgcgtcgcattggtggcaatccacttggtgtcagaaacctcgtagatcctgtccatcgtcggaggcggccactggcgcgtcgacgcgatcgtgtccaccatcgactccatgcgttccttggtgacgctgagcttggtcctgcgcacgagatcgaccgtgcgggcgagcggctggctgcatagctcgccggcggtggcctccgccatgggggacacgtgcgcgttgccgtagtaaccccgcgggatgggcgtgtgctggttccacttcctgtgtgcgttcatggtacccatgaggcgaacgcgcagatgggactcgtatcccagcgccaaggtcgggcgcccccacatcccggccgagagcaggtgggaaggatgtactcggacggtgagcgattcagcggacgg

SEQ ID NO: 15445 - DNA, 2621 bp, Zea mays
  Clone ID: MRT4577_114088C.1
cattgggtacctcgggcccggccgggccgcggcaccccctccaccaccggccaccatgcagacgcagaccctcatcctacgcgctggcccctccgcccgacgctccacgccgccgccggccagcaccgtgcacctcgccgcctccggaaggtgcctgctgcgtgctcccagctcgctccgacgccgaagaacccgctctctcagggcctctgcctctctcgagcaggtcaaggaagtcgccagctccccagctccctccgcagggaagagtagtcaagcaactagaagagatgtgaggaatatcgcaattgttgctcatgttgatcatgggaaaacaactttggtggattcaatgttaaggcaagccaaggttttccgagataatcaagttgtgcaggaaagaataatggactccaatgacctagaacgggaaagagggatcacgattctgagcaagaatacatcaataacctataagggcactaaaatcaatataattgatactcctggacattcagattttggtggggaggttgagcgtgttctgaacatggtggaaggagttcttctagtggttgattctgtagaggggcctatgccacagacaaggtttgttctgaagaaagctctagaatttggacatgctgttgttgtagttgtaaacaagatcgacagacctactgctcgtcctgagtttgtggtgaattcaacatttgaactatttattgaattaaatgcaactgatgaacagtgtgatttccaaacagtctatgcaagtggaattaaaggaaaggccagtctatctcctgacaatttagctgatgacctaggacccctttttgaggcaattcttagatgcataccagagccacgcgttgagaaagatggtgccctgcaaatgcttgtatctaatactgaatatgatgagcacaaaggaagaattgcaattggacggctgcatgcaggagaacttcagcgtggcatggaggtcaaggtttgtacaccagacgatgcttgcagggttggtaaagtgagtgagctttttgtttatcagaacttcagccgtgcccccgttgaatctgttagtgctggtgacatttgtgctgtatgtggaatcgatgatatcatgatcggggaaactatagctgataaagttacaggaacaccattgcccactatcaaagtggaggagccaacagtcagaatgtctttctccatcaatacatcaccttttgttggacgggaggggaaatatgttactagccgaaatctccgtgacaggttgtatcgcgagctcgaaaggaatttggctatgaaagtagaagacggggaaactgctgatacatttcttgttagtggcagaggcacactacatctcacaatattgatagaaaatatgcggagagaaggatatgaatttatgattggacctccaaaggtcataaacaagacagtcgatggaaaactactagagccttatgagatagctgctgttgaagtcccagaggagtccatgggatcagttgttgagcttttagggaaaaggcgtggacagatggttgacatggaagctaacgggacggagggaacaacattgctgaaatacaagattcctaccagaggccttattggacttcggaatgcaattcttacagcttctcgtggcagagctatattgaatacaatctttgacagctatggcccatgggctggagatcttagctcacgtgatcagggatccttggttgcttttgaagatggaagcactacttcttatgcacttcttaatgcacaagaaagaggtatgttgtttgtccaaccagggcaggatgtttacaaaggtcaaattgttggtatccatcagagacctggtgatttagcaattaatgtgtgcaagaaaaaggctgctacaaatgttcgttccaacaaagaaactacagtggttcttgatgaacctttaagctacagtttggatgactgcatagagtttatccaagaagatgagatagtggaggttactcctgcaagcatccgtatgtgcaagaacccaaaagtttcgaagaaaaagtaacataatcgcatccatttgtcgtcaatgcatcttctacacatagaagctgcatgctccgttgccaggtctcgtatgagtgacggctgcacggcgtcctcaagtcagtaatcaggatatttttggtggtctacagacaaagactaaaggtcgccagattaagatagaggattatatggcagttttgtgatgaataaatcagccgatacctggagtagtattatttggccacggataaggcgggcactgtttctcatctacttctccctgttctttttatttgtcgtgttttagttcaaaaatgaactagacgacaaatatttgagaacgaagttagtattacacatatattgtgtaggtcatacgtaggactataggcattgtacacgattctttcgacgctagtaaagactggaagaaagctttagcaaatggattagcacacaactgctgctacagactcttatttatttgtaattcaagccagtctataagttgcaacaaactcctgtgcaattttgaactgaagattatagggaagaacctaccattt

SEQ ID NO: 15446 - DNA, 274 bp, Zea mays
  unsure (1)..(274): unsure at all n locations
  Clone ID: MRT4577_114089C.1
taggcggtacgcctccccgctccccccccctctcgtcgccacgagtgtgtgctagggttccggcgtccggcgcgggcggtggcggccattccgatggaggcggatacggggtgtcgggtggaggtggacgacatnatgttctttgtcgacgacctcatttcagtgctccggcgcagcgacgactcccacgccaactcgcaggtgatcgcgggcgcggggttgctgcggaccgcctgccgcttcgagtgcgaccacctccacctggaggtgaaag

SEQ ID NO: 15447 - DNA, 688 bp, Zea mays
  Clone ID: MRT4577_11408C.1
gggggcctcgactccgcactctaaccctagttcatcgctcattcgcccggcagtctccacggtccccagtctcacccggtggccgaccaaccccagtccgccgtccaccctcacagccgccagccgccaccctgccagccgccgccagccaccacctaggcacccacggtccacggacgcacatgcacggcacggacaggccacactgctcacccgcgagcggcgcgcgcgagtctctggctctctgcacgtgcgcgaccagaggtccagagcaggcagcaggtagccaggtacaggcgactaaccgagtagccggccaatcggccatccctgcgaccagagcaggcaccgggcagcaggttgtcctcaactccatccatggcgcctgtgttttctttgcttcgctgtgttcctggccgtgtccctatgttgcctgttggctgctgtctgttgaagactttgaacactgaaaactgaagtgcaagtgttgcagacttgcagtttgtttatttgtgtgaagtgtctttgtgggagtgtttttttatccacgtctcatgtatgtgttgttgtcaacagagagttatgtattcataatattgcttgcttctgtaacagtaatcaggtttattatgtcttggatttttcttttgccctaaaaaaaaaaaaaaataaaaagaaacctgcggcc

SEQ ID NO: 15448 - DNA, 436 bp, Zea mays
  Clone ID: MRT4577_114090C.1
ggtcggaacctttgggctgatttatgtgcttgtcctcctccgacgccatcttttcgctatcaggcaccgagatgtctggcggcactcctattagaccgactaatagaaatatcataacttttataaagaaaagctaggcgcctctaatcgtcgtcgataattagatttaagcgggcacttgggcgccgtaaggcgagtgcgaaacggtcatagataataagtcttccggcgaacccgattctgcgggtaccttattcgttttaagaggtccgttctagaccgaggccatacctgatactgacgttaacggaaccgcgattgctctagttaaagacaaggtcattgggaaggagtagaatactattacatgacttctgggcgggtcgctagaggtcgatacttagaagacggcgtaagaagtcgagtcgtacgttta

SEQ ID NO: 15449 - DNA, 297 bp, Zea mays
  Clone ID: MRT4577_114091C.1
ccggccgggcaaaccctaccaacgcccagggtcgccgccggtcgcccggccgcatccgctgccgccgctgccgccggggacgatggcgaagcctcggcgtggccgctccgcgtcctcgctccacctcgggatcttcctcccgctcgccgtcccactccgtctcctccggctccgtgtggtcccgctcccgctccttctcgtgggcgccgacccagtcccggagtcgctcccctcctcctgctaagcgcaagtcggctgcagcacggaaaggacaatcaccttggccggccgctaaaa

SEQ ID NO: 15450 - DNA, 325 bp, Zea mays
  Clone ID: MRT4577_114092C.1
cctaagcgaatgatctatagaataaaactggaattagccccatctgattatggagccgaaggggtgctgatctttttttctataaactctctagaccaacctattccgcatgaggtctattcttaacaccaagtgaagctatactatatgcctataggaaaactgagagactccgaagaatttttatttgattctcaacagccgtactatcttaaatggaatttagccactgtaaacgactctttagatgagatatagagggtataccaaagtacctataccgggcaggacgtctcgagccctattgtgagtcactttatataga

SEQ ID NO: 15451 - DNA, 223 bp, Zea mays
  Clone ID: MRT4577_114093C.1
gataatcacggactgttcacggctttattgaatcatcatttacggccaaagtttcccatcgctagtgatcaattcacccccacggtttaaccaatcccatgggatcaatagatcacacaccacgtgggaataaaaaaaaaggacccccaaaaagcttacacattcaaataatgtttcaagggttagatcaaacagcccgaaaaacccccaaaaatagggggga

SEQ ID NO: 15452 - DNA, 310 bp, Zea mays
  Clone ID: MRT4577_114094C.1
ccggccgagaggccgattttacctgcgggcaagcgaggtgggccgtggcgccctgcctatcctacgcccgcgggacggggtccgacccctccgagtccagatgcagcggcgtaagaaacctcaagagcgccggcagaaccgccgccgacaggcacgccgcctgcaactgtcttaagaacgccgccaggaccgtggggggggggaacgccggcaacgccggcagcataccctcaaagaagcaggaggagcatgcactacaccataagaagcttcaccaagtgctaacaagggaaactaaaaagtacaccac

SEQ ID NO: 15453 - DNA, 253 bp, Zea mays
  Clone ID: MRT4577_114095C.1
aaacgaactggacaccgggggggtttattattgggaaaaatcaagggaaatgccgacattggtttctttacttgggccgcaaagttggccttgatggggtccaccttgccgcttttgatgcggaaggccttggcgaggatgttgggagggcacgggcggcacggcgcctaaaagcgtaatgggaatggcctgcattccctggagctggctgttgaaagctccaacaacggcgggggggccggggcccctgttt

SEQ ID NO: 15454 - DNA, 228 bp, Zea mays
  Clone ID: MRT4577_114096C.1
ccatgagggagtgcatctcgatccacatcggccaggctggtatccaggtcggaaacgcgtgctgggaactgtactgcctcgatcatggcattcaggtaacgaaccgtccatttccactcctgttctcgcgttgttgaggtagatctgtacggatctgtaccgtcacatacatgtagatctataatcggtatggggggatttcgtcgttcatgtgtgcctgatttggtg

SEQ ID NO: 15455 - DNA, 578 bp, Zea mays
  Clone ID: MRT4577_114097C.1
ggatatagtcctgtgcctgcctaccaactgggtaaaagggtccatatagaaacaaacatgctattattgtgcgtttatatggagctcatgacatattttcagggcgtgttatttgtgagcaactggacaattcaaaacatctgaatgggtacttcagccacagacttctggtgaggtgcagtgataacagcagagatatcccaatttgtatagcagataaatgtactgaacaaaccgtgggcattcttttaactatatacatgcatgacaattcttctctctctctctctctctctctctctctctctctcttccaaatttccttgtacctatcataccactgcattattttatatatgtatataggtccatagttcacagtacttgaggatcaatgactgcttcctacagactactgcggactgaatcgcgccctggaattgcagtgataaccacggaggccaggaacatcctgctgaggcacttgtaccagaaatccgaggagaaggtgagcagctactgctactgctagtaagacttcactatcacgcacggctacataaaaccacatcaccgat

SEQ ID NO: 15456 - DNA, 278 bp, Zea mays
  Clone ID: MRT4577_114098C.1
gcaggatccatctatccgaggagagctggcagtgatactattgtcatgtgttgcagacatgatcagtcggggtatccagccgggaccagaattcatgccagcaatgtctcaaatcgtccaagacctagctaggattgcaggtgctagtagtgaggtatcagagtgacacacagaggaggaacatggaaacatgcagctcgccaatggcgtgagcagcgaagattacctaaatccatttcgcagtgtcagggggactttatgcatcagcatgtattttg

SEQ ID NO: 15457 - DNA, 149 bp, Zea mays
  Clone ID: MRT4577_114099C.1
atagacagagtttcatagcgcaagatgcggatggtgcacaggccactagcttgacagcttcgacgggatcctgcgatagctataccatgcagctcaggatgcctactacagcgcatgggatgcgccactatagcgcactaatctcatga

SEQ ID NO: 15458 - DNA, 1107 bp, Zea mays
  Clone ID: MRT4577_11409C.1
atggggccgcgccacaagttccggctgtcagacatgatcccgaacgcgtggttcttcaagctccgggacatgcgcgcgcggggcgggggcggcgccgcggccagcccccgcgtggccgcgcacgccgcgtcgcgcacgcccccgaccacgccgaggcacggccacggagcgcccgccgccgccgccgccgctccgtggctcccgcacagggcgtcccactactacacgccgcgggcgggggacctcgtcctgggctcgccgctgcgccccaaggcctccgacacgcgcttcccgccgctgcagctgtcgccgccgcgccggtccaggcgccgccaccggaggcggtccgccgtcaagctgccgccaccaccctcggccagcagcagcggcggcgtggcgtcctcgccggcctccaccgcctgccgctgcggccgccggcccgagctcgtggtggccgaggcgcccgataccccgccgtgccgccgtgacgtctttgtcggttacagcagcgacgacgacgaatacgtgaagaaaccgacggctgccgtccgcgcccacgacaagctctacgcccaagtgatcacctccgccacggacatcgtcatcgacctgcggaccaaaaggaggcccgaaaagacgctcccgccgatcatgaccaagaccagaccggcgaagcccgacgtattccggctcgaggacaagcacgtcgacgtcctcgcacacgcggcccgacgagcctcacctgtccccgaacagggcaagctcagaccgaggcggtccgtgtcgtcggcgcgccgcctgaaaacgcgcgcgaacactccgcgcttagcatcgtccatgaagtgcaagtcgcccacgacggccacgccgccgaccaagccgccgcctctggctgagagcttcgcggtggtcaagtcgtcgcgggacccgaggcgggacttccgggagtccatggaggagatgatcgtcgagaacgggatccgcaccgccaccgacctcgaggacctcctcgcgtgctacctggccctcaacgccgccgagtaccacgacctcatcgtcgaggtgttcgagcatatctgggtcacactctctgacgccaagctgtag

SEQ ID NO: 15459 - DNA, 2708 bp, Zea mays
  Clone ID: MRT4577_1140C.1
ggaaatgcgaaaggcagccgaggccgcgagccgacgcacgcggctcgttgcttcctccatcccctttcctcacgccgacgccaaagtataccaacgaattcctcctcgggctcccacctaatcgtgttcgccgcctgcctctcccaaaccctagcaacccacgatcgaacccaaatccgctcctcccacccgaggaattatgcgaaattccccgagatcctagcccagcactagcagatcgatccatcgcttgcccacctgccggccaccaacccttgtagtctcagtcaatctgtagattgagactacgatgagcctgtcaccgctcgactcctcctccccgccggccgcggctgcggctgctgctacggaggtgcccctcgccccgggcttccgcttccaccccaccgacgaggagctcgtctcctactacctccgccgccgcgtcctcggccgccgcctccgcgtcgacgccatcgccgagatcgacctctaccgcctcgagccctgggacctcccctccctctcccgcatccgcagccgcgacgcccagtggtacttcttcgcccgtctcgaccgcaaggtcgccggcgctggcgccgggggccggggcggtcccggcaacaggaccaaccgcgctacgccgagggggtactggaagaccacgggcaaggaccgcgaggtgcaccaccgcggcaagcccgtcgggatgaagaagacgctcgtcttccacgccgggagggcgcctaagggcgagaggaccaactgggtcatgcacgagtaccgcctcctcgatgcagacggacctcaggatctgcatgtggtttgtagaatcttccagaagcatgggtctggaccacagaacggtgcgcagtatggtgcaccatacatggaagaggaatgggaagaggatgatgatgctattgagaatggttctacccacgatgcatctggtcaaattgctgcaaccacctgtgctgtagatgaggagtcaaatgaggacgatgagaatgcatattgtgaaacaaacagacctgctcgagtagaaccatctcatctgccttcggtccatgaaatgctcaatccaccagagatggctcctctccaaggtcaagattctaaagagacaagcgatggaagttgttctgatgttgctatttctctggaagagattttgcaggaacctttgtcaaatattagtgtggagaatatgcatagacttgaagggcagaatgccactgatgataacatcagtgttgataacttgttatcagcatatcccacgaaagataatggctacgtaggccagtataacactatgaatgggagtgctccagcagatgaagctcacgcacgctggcctttgagaacatatagtaatcagaattatgtcaatggccctcttgctgatgagttctttgacacagggaatgataccaatggggttgcatattccaggcagcagcaagctgatggcttcccagcacctcgccaagttgatgaaagtatggtattttatgatgccccatctgattacaacttggtggatggaaaagatgacttcgtatatctgaacgacattctgaatgagccacttggaaatgaatcgctctttgatggagatgatatgatggcttactttgatgccacagagaatgatttcaagtatgacattttgggctctggtcagggtttggattatccacttgcagacatgccgttgaactttgcccaaaagagtgacaaggaagacaagtttacattcgaagggatctctgaggttccggaagcaaatcctcagtacggtgcatcctcatctggttcacatgaagatctgtatactgatactgaatttctaggtgtgccaacagatgacactgctgataaaacttacggaaatcgcctggccagcatgttaggctctatcccagctccacctgcaatggcctcagaattcccgccgtcaacagggaaatctgctgggatgctttcggctgtcagctcgagctcaattcgttttactgctggtatcatccaacttgatggcctcactttcagcagcggctccggtcagtggcccttgcagaagaatggagacttgagtttgcttgtctcttttgctgtggagggcgacgtggcatccaagctccctgttggtcttgggcgtgctactcggattagcaccgttcccatggtgctgcgcagtggtttttaccttttctttatgtcggccatgattctcttgtttagctacaaagtagggtcgtgtatctacagcaggtaagttgaagttgatggcgcctcttgtccggccagacctgtgggctgtttattttagttcaacacgtggatcattccctcagtgatgggggtatagcagtcgttcgacaccttttttacacatttaccattttgacctgtcaaaacatacagcaataaactttcgaactggtggtggtgatcaaaaaaaaaaaaaaaaaaagccactaaaagcagtgcactgtgaatttggtgctctgctcttattattgtaaccaaaattaactgcaatatgttatattctgtcctgtagaggaaaagctattttatctggttattgtaaccaagattataccttggtgggttgctgtcaaagaaacaatggaaatatgattattatcaggccgtgttatttgctccaggccagataattaccatttgatcaacat

SEQ ID NO: 15460 - DNA, 730 bp, Zea mays
  unsure (1)..(730): unsure at all n locations
  Clone ID: MRT4577_114100C.1
cctcgaggccggccgggtttagagtgttggagtgtgcagaagagcgtcgcagtcgcaaccctaatcagaagaagcgcagcttcaagcgagtgacagccaccagccatgggtcgtatgcacagccgcggtaagggtatatcctcttctgctttgccctacaaaaggacacctcctagctggctcaagatctcttcgcaagatgtcgaagaaaatatctgcaagtttgcgaagaaaggtttgaccccgtctcagattggtgtcattctcagagattctcacggtattgctcaggtcaatagcgtcactggcagcaaaatccttcgcatcctcaaagctcacggacttgcgcctgaaattccagaggacctgtaccatttgattaagaaggcagtttcaattaggaagcatcttgagaggaacaggaaggacaaggactccaagttcaggttgattcttgttgagagcagaatccaccgacttgctcgctattacaagaagactaagaagctcccaccagtctggaagtacgaatcaacaactgctagcactctggttgcttagagaatgtatcaactttcatgggttttgctaccgtgcagtcgccgttgagctagcaatttgcgatatcattttgatgtttatttgaaggctggataggttatgtggcttaattttgttaagaacctatggtttgactgggaaagatattttactagntaagtcatttatc

SEQ ID NO: 15461 - DNA, 306 bp, Zea mays
  unsure (1)..(306): unsure at all n locations
  Clone ID: MRT4577_114101C.1
acgcgacggtgggcctccttcctccagggttagatccagggaagacaactagatcgctcccacttcttcctcttgcctcctctgtgcttggatctatgtttcaccacccccaatgctgatccttctcgcctcgatgtccaagagctccgatatgtcgtccaccgagccccggtgctcagatcacaacacgtgcgtgtcctcactctctctattcgcttacgcgtccgaatttgatgagctcggccggggtggctggctgtggtgggggcgcagatgccaaaggatttggcgggcgtacangggtgt

SEQ ID NO: 15462 - DNA, 1569 bp, Zea mays
  Clone ID: MRT4577_114102C.1
acccactctgccctcctcttgtagtccctgcccccgccccctgccgatgccgtcctccccgccgccgggccctccgccccccccgggcgtgccaccgccggcgccgtcccccggccgctcccccctgcccccgctccgccgcccgcggtgctccgcgtccttccggcagccgccgtctccccgaaatcctccaataccccaccctacgaatcttccaacccctccgacgatgccttccgcgccggcgctcgtccccgcgtgcgacatgcaggagccgttgctggcggagtcgtccgaccgcttctccatgttcccgatccggtacccgcagatttgggagttctacaagaaggcggtggcgtccttctggactgccgaggaggtggacctctccgcggacgcgcgccactgggacgcggccctctcccccgacgcgcgccacttcatctcccacgtgctcgccttcttcgccgcctccgaccgcatcgtgctcgagaacctcgcctcccgcttcatgttcgatgtccaggtcgccgaggcgcgcgccttttactgcttcctaatcgccatcgaaaacatccactcgcagatgtactctctgctgctcgagacctacatccgcgatggcaccgagaaggaccgactcttccgcgccatcgaaaccgtccccgccgtacgccgcaaggccgactgggccatgcgctggatcgacggcggggagcgctttgccgagcgcctcgttgccttcgcctgcgtcgagggcatcttcttctcgggctccttctgcgccatcttctggctcaagaagcgcggcctcatgccgggcctcactttctctaatgagctcatctcccgggacgagggcctccactgcgacttcgcctgcctcctttatgacctccttcggggcaagctcgatgagtcccgcgtccgcgagatcgttgccgacgccgtcgacatcgagcgtgagttcgtttgcgacgcgctccccgtcgcgctggtcggaatgaacggcgggctcatgagccagtacatcgagttcgtcgccgaccgcctgctcatggcgctggggcacaggaagatgtacaacgtcgccaaccccttcgactggatggagctcatttccctgcagggcaagactaacttctttgagaagcgcgtcggggagtaccagaaggcgtccgtaatgtccagcctcaacggcggcgctgctgcaaaccataccttcagcatcgacgaggacttctgagttgacagttgtgatcgcgtgcttaatttattgctccgataatctcataagtcataactcataaccttattgtgctttttcttgcttgctagttgtagtagaggtaattactgatctggatggagcaaggcagtggtttggcagccaccatatgatatatatataggtggatggatggtcttccattcgctagaagtgagctgtattgtcctatctgaattacttgtcttcaatgtgaattttttattaaatcgctggaacgatactcacattcgatccttctcgtttgtcagccaaataaaaaaaaaaaaaaaaaaaaa

SEQ ID NO: 15463 - DNA, 496 bp, Zea mays
  Clone ID: MRT4577_114103C.1
ccggccgggattcccaaaagaaacaccgccctagctagcaccacacaccgcaggtatggagaaggcgacgaggctggccttggcagcggcgttggttctgtgcctgcttctggcgaccgggccgcaggaggccgccggcgccgaggggatgctgtcgtatgataagttgctcagctgcaaggtgctgggcaactgcgacaagaacaggggccccggggccacccgcccggggaagcccgtaaacaagtacacccgcggctgcagcccgctgacccggtgccgcggcggctgatcatgggcctgtttggttcagcttttttctgaccagcttttctgaaaatctggttgtgggaagaatctagctgtggggagaatctgagtatcattacgattacgtgtgaggaagataaagttgttcatagggctcaggatctagaaagtaacggattcctactattacaatgattcggcagattatcacaacaagaaataaaga

SEQ ID NO: 15464 - DNA, 818 bp, Zea mays
  unsure (1)..(818): unsure at all n locations
  Clone ID: MRT4577_114104C.1
ggtacccccccggccttccgggtagatataagccctctccttattgttgtgtttttaggtctttggtgtgtttcatgttctttccattatgccaatgtgctaccaaacatttgggaggtgaaaattgcactttgactggcattatgttcatcatctgtgtaactgcatgcataatatccaccactccgaaaaggcctctagcgtaatggttaagctttccgagtaagacctccaggtcccgggttcaatccccttgggggcgaatttcgggcttggttaaaaaaaatcccctcactgtgtcccgtcagttcctgggttacgtcctgtgcgccaccctccgtctaggccgtcgcagagtggggggtgacggcccgctagtgaaggggggcagggtttggggatattttcgtcttggaccatgtttcagtctctttttagtataataccgggaagacggtctttcccttcccggccgagtttttttaatatccaccacctcctacccttttatttcttagaaaagataccaaactttggtgaaagttgaatagtttttgcactctttttgctcgagtggggaagacctctagaagtttggtctgtttttccacttttgtctttagtgttcaccatgtggactaacctgttcaattgtatttccttcacaattgatatttgcaatacctcaaatgtaccttactgattntaaagcctctgctttctacggtcatttgttatggcactgttcatgatgacatacattactactgatatctaacagaaaaaacgacctatatgattaattgggtcatgttctg

SEQ ID NO: 15465 - DNA, 629 bp, Zea mays
  Clone ID: MRT4577_114105C.1
cagcacatagaatcacttgagaccgagaaatcatcgttaatggatcgattggctgagaatgaaaagagcttgcatgaaacaaaccagtacttgagtggactattaaatgctttaaatagagtggatgttgctcgggaatttgatatggatccaatcaccaaggttgaaaagatggctaaatttttccttgacctacagtcaacagtggcttcatcgcaaaacgaagtgatgaaatcaaaacgagcaacagagctgcttcttgctgagttaaatgaagctcatgaaagggctgacaacctgcaggaggaattggtcaaggcagaagctgcactttctgaatcttctaaacaatacattgttacagaatctgcaagagctgatgctgttcgtcagcttgaacttattatgcatgcacagtcacaaacaaggaggaggcacgcagcatcatttgctggagttaaactccaccagcagtcaactaagagaagtctgctttgaactttcacactgtcttgttaatacattcagtaaggatgtggaccttatctgctatgtggtgaacttcatgaggtcttctggtaaaatgatggatgacacaaatacgatggacataccgattgcctctaaac

SEQ ID NO: 15466 - DNA, 577 bp, Zea mays
  Clone ID: MRT4577_114106C.1
cgttaagatcaggttggcatacacctgctcatatctactgccgtagctctgtctccgcataattagtgtcgaaattacaggggcaattatgtacaaagctgtcgttcaaatcgagctcactaaattgttcaaactaactaagcagctcagtaattttaagaatgtacaacaggaaaactgatgcggcgaggcttttcatgtctgctgattcgccttgttccctgccaagatgagggagatctccaggccacgactaaacgcttgattgaaaaggaaacgtgactggaatgttgacacaaaggggaaccatgagaagaagacgatgggcacaaagatgatggcgcccattcctgcatcgtacatccttgcaatctcacggactgaatcccatagccgaagggttttcactacctttttccatgtgacggccagacataggatacaccagccagttgctataaaagcaagtgcacttgcaaataaatcagcaatagtgaatgatgtgagcacgataagaagaacaattcctgcaattatcccaatagcaaggacgccctgcagaaaccgaataaaagtc

SEQ ID NO: 15467 - DNA, 318 bp, Zea mays
  Clone ID: MRT4577_114107C.1
atgtcgtcctcttcctcttttgctgccgatacaccgccggccggcgcattatccgaggacacgctgagcaacgtggcggcggaggagttgcatcctagcgacacagtggaattcggcgcgtcgcggatgtcctcggtctgcgtgcaagacatgcaacagcttggatattttggcggcggagtggcgcgtgtcccgggggcggaggaggtccccgacccagaaggcgagttggtcgtcttcgaggcctttttcgccgctggccttcgtctgcctgcgcatcgatttgtggcggaggtcctgcgtagattcgaggtctag

SEQ ID NO: 15468 - DNA, 361 bp, Zea mays
  Clone ID: MRT4577_114108C.1
gctctcaccagtcaccactcacctgacgacgagcgagcgagaggaacggggcgagggaagttaaacgcgcggcgatgccggagccgccgcccttcccgtccttccagttcgggatggctggcgcgatatatatcaaaggcattcctgtgacgaattataagagatccgctgttaattccgaagaggagtggccctccaaacactctaaattctttgctgagcttgatgatggtttggagttctctttcactgataaacggcgctttgcaagagttcgtttgtttgaagatgcccagatgctctgtttgaaccaatgtccgtcgatagtttcttggactccctgggtagaaagaagataggg

SEQ ID NO: 15469 - DNA, 1322 bp, Zea mays
  Clone ID: MRT4577_114109C.1
ccggccggggacggaagggagtgctctcaccagtcaccactcacctgacgacgagcgagcgagaggaacggggcgagggaagttaaacgcgcggcgatgccggagccgcccttcccgtccttccagttcgggatggcaggcgcgatatatatcaaaggcattcctgtgacgaatataagagatccgttgttaattccgaagaggagtggccctccaaatactctaaattctttgctgagcttgatgatggtttggagttctctttcactgataaacggcgctttgcaagagttcgtttgtttgaagatcctgaaaccgtacccccaatttctgagctaggtccagatgctctgtttgagccaatgtccgtcgatagtttcttggactccctgggtagaaagaagatagggataaaagctcttctacttgatcaggtgaccagcatccaacctacaagctttgcctgtgcaattttttccctgcactgtacatacttgacttgttgcagttttttataaaatgagcagagcttcatatcaggcattggcaattggattgcagacgaggtgctttaccagtcaaggatccatccattacagattgcttcaaatctacctagggagagttgtgaagcactgcaccagagtatcgaagaggttgtcaaatatgctaaaaaaaaaaaagcaaacatggaccgctttccgaaggaatggttatttcatcaccgttggggcaagaagcctggcaaagtcgatggaaagaaaatcgagttcataacagctggtggcaggaccactgcctacgtgccgcaactgcaaaaactggttggaacccagtccagcaaaacgatatccgtggccgagaacggtgatgccaaggattcagggaccgagggagaagatgcagatgcagatgttttgaatccaagaaagcgagccgcggcctccaggggacagcgaaacaaagataccgccggctcgagaaaagcaagaggaaatggcgccgatgctgaggcggctgaaccaacaacaggtgtcgtcggaagcaacggtgagcaagcttttggccaacccaacagtgacgctgtcgataaatcagatcgggctacaagacgatcgtcgaggaaagtgaaagcccgcaagtaaatctgaacaaggtagagccagggatctgtccatggagttccataatatgtgtacgtactggccagcgtatttgcgcctctgagtaatgtatcttaggaacagaagattatattcatgctgtgctgcatattcctgggggattcgctccggaccaaaaaaaaaaaaaaaaaagcggcc

SEQ ID NO: 15470 - DNA, 527 bp, Zea mays
  unsure (1)..(527): unsure at all n locations
  Clone ID: MRT4577_11410C.1
gtatccntnncgaggccggccgggaaaaaaaaaaaaaaaaatacccagaccaagggcgccttcaagacctacaacaccgcaaagcccaagatggcgacgtggcagcctgttgctgcacctcgggaataaggatgagatgcggttaagtgtacataaattcacgtagggagcagttcggcacaaccaatatggtattgaattcaaacgaaattctacaaattgtatggcttgctcatacagttggtgaatcagaacgtgcactctatggctcacgatcctcctcttacatgactacataggaaatatctacgactttgcttcaattgcagatttgatagcttggagggttagctgggtttataaacagggggtaaaacttaccttcacacgaaactctagcatctccaaacagcatcttagcgttgggcatgtaaaacatggggttgggaacatcagctgcacttgttagcggaatcaaatctgaggttgagacacttaccaaaaaaaaaaaaaaaaaacccgcggcc

SEQ ID NO: 15471 - DNA, 1707 bp, Zea mays
  unsure (1)..(1707): unsure at all n locations
  Clone ID: MRT4577_114110C.1
agatgctcaagacttattccatcacaatatgcatcaatgcatcatggaagattggaaagagtacataaacctcagtgcatttatgcacaacctagatatgctactatccatagcacaaggagctgcaccactgagcaaacgttggtccggagcgaatcccccaggaatatgcagcatgaatataatcttctgttcctaagatacattactcagaggcgcaaatacgctggccagtacacatataatgaaactccatggacagatccctggctaccttgttcagatttacttgcgggctttcactttcctcgacgatcgtcttgtagcccgatctgatttatcgacagcgtcactgttgggttggccaaaagcttgctcaccgttgcttccgacgatacctgttgttggttcagctgcctcagcatcggcgccatttactcttgcttttctcgagccggcggtatctttgtttcgctgtcccctggcagcactggaggtcgcggctcgctttcttggcttcaaaacatctgcatcttctccctcggtccctggatccttggcatcaccgttctcggccacggatatcgttttgctggactgggttccaaccagtttttgcagttgcggcacgtaggcagtggtcctgccaccagctgttatgaactcgattttctttccatcgactttgccaggcttcttgccccaacggtgatgaaataaccattccttcggaaagcggtccatgtcagcatcaacttcgacagcatatttgacaacctcttcgatactctggtgcagtgcttcaccccacgccctcgcccactttgaagcaatctgtaatggatggatccttgactggtaaagcacctcgtctgcaatccaattgccaatgcctgatatgaagctctgctcattttataaaaaactgcaacaagtcaagtatgtacagtgcagggaaaacattgcacaggcaaagcttgtaggttggatgctggtcacctgatcaagtagaagagcttttatccctatcttctttctacccagggagtccaagaaactatcgacggacattggttcaaacagagcatctgggcctagctcagaaattgggggtacggtttcaggatcttcaaacaaacgaactcttgcaaagcgccgtttatcagtgaaagagaactccaaaccatcatcaagctcagcaaagaatttagagtgtttggagggccactcctcttcggaattaacagcggatctcttataattcgtcacaggaatgcctttgatatatatcgcgcctgccatcccgaactggaaggacgggaagggcggcgcgtcgagctggagccagaggttcttgcccctccggcgcgcggcgacgatggtccggccgaccatggcccgctcgaaggccgcgcggccggcggcggcaacgaccaccttggcgtcgtccgccacggcgcagcgcgcgatgcgcctccccacgcagtgcgcctgcagcgcccgacgcgccgcctccacctccggcagctccggcatcgccgcgcgtttaacttccctcgccccgttcctctcgctcgctcgtcgtcaggtgagtggtgactggtgagagcctcccttccggcctacccttagtcacaggaacgcctttgatatatatcgcgcttgccatccagaaatggaaggaanaggaagcgtgcccccacaggg

SEQ ID NO: 15472 - DNA, 396 bp, Zea mays
  unsure (1)..(396): unsure at all n locations
  Clone ID: MRT4577_114111C.1
cttacgtacaagaaaaaaaaactcgttcagtctcccaacaccttactcatggatgntaagtgccacgggtgcttcagcataaccactgtcttcagccactcccagactgatgatgtgtgccctggctggcaaactgtcctttgccaacccacatgaagcaaggcaaggctcactgagggctgctctcttcgcatgaagggagactacagcggtcgtggtcttcaatgtttgctctatgccagatactatcgtcatgaacttgccttagctaagattttccattaggtgttttcgagcagctatttgttgcatagtagctacttccaaacttaaatcttgtttggcttggaatgttgacaactaatgactccttgaatttatttcatgatggtgacc

SEQ ID NO: 15473 - DNA, 1520 bp, Zea mays
  Clone ID: MRT4577_114112C.1
gaggctctcaccagtcaccactcacctgacgacgagcgagcgagaggaacggggcgagggaagttaaacgcgcggcgatgccggagctgccggaggtggaggcggcgcgtcgggcgctgcaggcgcactgcgtggggaggcgcatcgcgcgctgcgccgtggcggacgacgccaaggtggtcgttgccgccgccggccgcgcggccttcgagcgggccatggtcggccggaccatcgtcgccgcgcgccggaggggcaagaacctctggctccagctcgacgcgccgcccttcccgtccttccagttcgggatggcaggcgcgatatatatcaaaggcattcctgtgacgaattataagagatccgttgttaattccgaagaggagtggccctccaaatactctaaattctttgctgagcttgatgatggtttggagttctctttcactgataaacggcgctttgcaagagttcgtttgtttgaagatcctgaaaccgtacccccaatttctgagctaggtccagatgctctgtttgagccaatgtccgtcgatagtttcttggactccctgggtagaaagaagatagggataaaagctcttctacttgatcagagcttcatatcaggcattggcaattggattgcagacgaggtgctttaccagtcaaggatccatccattacagattgcttcaaatctacctagggagagttgtgaagcactgcaccagagtatcgaagaggttgtcaaatatgctgtcgaagttgatgctgacatggaccgctttccgaaggaatggttatttcatcaccgttggggcaagaagcctggcaaagtcgatggaaagaaaatcgagttcataacagctggtggcaggaccactgcctacgtgccgcaactgcaaaaactggttggaacccagtccagcaaaacgatatccgtggccgagaacggtgatgccaaggatccagggaccgagggagaagatgcagatgttttgaagccaagaaagcgagccgcgacctccagtgctgccaggggacagcgaaacaaagataccgccggctcgagaaaagcaagagtaaatggcgccgatgctgaggcagctgaaccaacaacaggtatcgtcggaagcaacggtgagcaagcttttggccaacccaacagtgacgctgtcgataaatcagatcgggctacaagacgatcgtcgaggaaagtgaaagcccgcaagtaaatctgaacaaggtagccagggatctgtccatggagtttcattatatgtgtactggccagcgtatttgcgcctctgagtaatgtatcttaggaacagaagattatattcatgctgcatattcctgggggattcgctccggaccaacgtttgctcagtggtgcagctccttgtgctatggatagtagcatatctaggttgtgcataaatgcactgaggtttatgtactctttccaatcttccatgatgcattgatgcatattgtgatggaataagtcttgagcatct

SEQ ID NO: 15474 - DNA, 193 bp, Zea mays
  Clone ID: MRT4577_114113C.1
gccttccctgctgaaacagcaagaccagtgggttggcgtgggaggcctgggcttcaaaccacctctgctatcacctggctgtgggtccccaggcaggacatacacacagtccctctctggccctcatcctcctcagctgcaaaggaaaagccacgtgagacgggctctgggacaatggtgaccaggctcttcc

SEQ ID NO: 15475 - DNA, 443 bp, Zea mays
  Clone ID: MRT4577_114114C.1
ctttttctcttttttttcccaccccatcctttaaagggacttgttttttttttttaaaggaaaagacccaccccgttaaccccattcctccaggtgaaaaaaaacaaaacatgtttgttcacaaaacagcaacaaaacatgtccaggagcaaatgatctttgaacccctcaaaccctacgaaggatctggcgcttccattcccgaacagtaaaaaatgggaaaaaaaaaaacctttgctttgaccacatccacagggaaaaattcccattacgggaaactggcttacattactgtgccggggcgccctgggcttaaaataaaatccccgggaaaagtcccttgctaatgggccggacaccatttcatttttttttcccaggataaaacccaacagctcgtctattttaacaaaaacagcatcccctggggcatttccttgccc

SEQ ID NO: 15476 - DNA, 288 bp, Zea mays
  Clone ID: MRT4577_114115C.1
gggacaaatgttattggtacctgaacatgctgggacttgcacagagagttggagctatgattttgttggcatcaacatctgaagtttatggtgatccacttgagcatcctcgaaccgatgcctactggggcaatgttaacgcaattggagctcatgagctgttatgatgatggtaagcgtgtagcatagacgctgatgttcgactatcacaggctgcattgcgttgtaatccgaattgccgatattttcaacgcctatttgccaaggatgatcattgacgatggccgt

SEQ ID NO: 15477 - DNA, 694 bp, Zea mays
  Clone ID: MRT4577_114116C.1
gtctcccgccgtgatcctgctcccgccccgccatcttcgccccccgctccgctctcatggatggaaggatcgctaccgcccctgccctcgccctcgtagtccatgtctgtcgatggaagggtcgctaccgcggtaccgcccctgccctcgcctccgcaatccatggacacccccaccccgagacgtgcccaccccgagacagccgctcgctcaccttgctaccccacacccgtctcgttctgctcctcgtcccggcgctcctactactcccctccatggcgcgcaggtacgcctcctcgttcccccgcctgcctccctgttccacttctgttgcctcctgacaggcgaaagctccgtggggtccctgtgctgcgtgggggacgaatcagcgagggcgcttagcgtcggaacaaaatggcggcgcttgctgtgaacggcagtagagaagcccgtgctgccccttcgcctgccgccggatctctgcaccggcagtagagaagcccgtgccgcccctcgtgtatcaccagaacttgcaacaaagacatggttccagtttagtggatgcgagtggaggattcagcgagatgcttgcctctacatggaggtactatgtatttggaggcaaagatggtgtggggaaaacaagcatggtggtttgcttgctgtgaagtttgccaaccatggtgaaccaaca

SEQ ID NO: 15478 - DNA, 504 bp, Zea mays
  Clone ID: MRT4577_114117C.1
gggcccttcccttattggaaacggaaacaatttacttttacggacggacaatttccgcatgggccaagctaagaggggggataatgccgggccacccccccaccccaccccggagggaagggccgctaaaaaaaaaaaattgggggggggggacgggaacggggaacacggcccggttggacttggacccctaccactggggacacccacacccctgtttgtacaggacccccacccattaggggggaaaaaaaccgggttaaaaatgggttcaccgggggttgttgttgttgttgttggcccccgggggggggccggccaccggccaaaatcggaaaaagggggacaaaaagggaaagcccgccattttaaaccccttggtggccccccaggcgggggggggcccccaccggcatttgggccgggggggggggtacaaaagccccaccagggcccacccccccggggtgttgggaaaaaaccccaacgggacaaccccctccc

SEQ ID NO: 15479 - DNA, 245 bp, Zea mays
  unsure (1)..(245): unsure at all n locations
  Clone ID: MRT4577_114118C.1
ggatacagatgtcggcttctcctcgctcctgctgttgcgtttttcctttttcctgacgccctgcaactcctcccaaatcctccacccggttagccggctccgtgccaccgcgcgactcccctctgcgccaccatggtaagtccaaggccatagggtccacgagctgggcggccccgaggtgctgcggtgggaggaggtggaggtcgggagcccggtgttggtgtatccgntgttgaccaccgccg

SEQ ID NO: 15480 - DNA, 179 bp, Zea mays
  Clone ID: MRT4577_114119C.1
ccgggccgacccacgcgtgcggaaacctcagggttggctttgatgcaaagatttctgcatgtcgtcaccaagctcgggatggggtaactgggcagctactgccccccatacctcatttaacaagctatcgccccgattctcactgttcaaacatcccatcaattttgaaatagtagcaa

SEQ ID NO: 15481 - DNA, 384 bp, Zea mays
  Clone ID: MRT4577_11411C.1
acaacactcagcgatagcaagtggcgccgccttcgcttcgagagcagagtatccaatctagccatgctcgcacctctgtgacctacctaggttaggcgactatatctggtcaggttatgaaagcaggaaggagctgtaccgcacggcccgcgagggcgagacctgcgttcccggcgagacctctagcaagagcttcgatgcccagtagcacctcaccaaagggcgcagccggggatgccagacttagaaggagcatctgacgcagcagttgtacagcgtgatggggtagtagggcggactgtgcaccagcgacgagtccaccggtaagcgctccgccagggagggcgtcagcatcgacgagtccaagttcaccatgtagtccta

SEQ ID NO: 15482 - DNA, 1711 bp, Zea mays
  Clone ID: MRT4577_114120C.1
tctacacgaaaaaaagattgtatacatatccaaaataacaattgaacgagctaaactgggattcagagttgttgacaatccttatatggtaaagctcaacaagagaaccattgtgcttgaagataaggatcaaattcaaggttttcctaaatatacattctcactaacacccttagataagttggaccaatacaaaaacaagaccgatcgttttatagatgtcattgctaagatcagtggagtatcaaatgtagcaaaggttcctacaacctcaggagatcagcaaatgaggagagttgtattattagaagaccttaagggaaacatgattgagctatcactatcaggaaaaagagctttggaatttgacggagatcaagttttagatgtgggtcagcaacatcatgttattgcaatatttgtaggaaccttagtcaaactttacaaaggtgaatatacattcttgagtggaacatcagcatgccggtggtacattaacgaaaatgacattgctgaaatcaaggctttccagaaaagtttgccaagtgaacctgtacctaccaaaaagacctatctccaaaatgatgatgcaacacacaaatttgaggagaaaagtctggaacaactcaagcatgtagaccctttccttgacatgggacaaagatatcagtgcacagctactataattggtatcacagaaaaccaaacatggtgttacaaagcatgcaagatctgtaactcagcaatcattcaaaaggaaaatggttataaatgcacaaaggaaggatgtccatctacacaatttgaatggaagtacaagataccattcattgcaagtgaccacacctataatctagagtttatgttctttgaaaaaaagggaatggagcttataggaaagagtgcatcgactcttcgaaaacaatatgaaccaaaggagataccaccggatataacatcttggataggttataaattcacttttgttgttagagtcctatcaaagaaaagtgtcaagactattgatccatcctttgaagtgcttatgataaaagaaaaataccagaaggaacctattatatcatttatcagctcaagtggagttgtaccagcagaatcaacttcctctacaatggcagaatacaaggaattaccattgctaatgccaattacctccaaagacatagaaaaaaaggagcgatccacttcacaaccagaacacaccgaagaaactcaagatatggacattgaaccatctggcatttgggaagaatctcagatttcaaacaaaagaagctttggagacccaaactatgacaaacaggaaacaactgatgacaaagatgatcttccccaattcaagaaaatcaggagtacccactctcaaggaaaaagcaaaaaatgatgcatgatagactaagaagacaaagtaaagtagtagactttaaaagatcttgactaaagtaatatatctatattttctgtttcgataaacaacgatagcgctagcgctacatcttttgatgtatataaccatgtagtatcaatagcgctaaatcttaagcgtgtagcaccaacagcgctacatattttgatgtatataagcatgtagcatcaatagcgctacatcttttgttaaatataagcacatcttttgatatatataagcatgtagcatcaatagtgccagctatggtgctaatcttccgtt

SEQ ID NO: 15483 - DNA, 815 bp, Zea mays
  unsure (1)..(815): unsure at all n locations
  Clone ID: MRT4577_114121C.1
gcattaatcctaaaattgcaatacttttatatttagtaatatctatctttcataaatcatatagatgtcattgctaagatcagtggagtatcaaatgtagcaaaggttcctacaacctcaggagatcagcaaatgaggagagttgtattattagaagaccttaagtacgcactctatactatatgtttagagtactatataaaaacgctctgccaataataatatatgttttcgagttttgcaagggaaacatgattgagctatcactatcaggaaaaagagctttggaatttgacggagatcaagttttagatgtgggtcagcaacatcatgttattgcaatatttgtaggaaccttagtcaaactttacaaaggtgaatatacattcttgaatggaacatcagcatgccggtggtacatcaacgaaaatgacattgctgagatcaaggctttccagaaaaggtgacatacaaacaaaaactataatcccttttattttaccacaaatagtactaaaatttataaaatgttaatagtttgccaagtgaacctgtacctatcaaaaagacctatctccaaaatgatgatgcaacacacaaatttgaggagaaaagtctggaacagctcaagcatgtagaccctttccttgacatgggacaaagatatcagtgcacaactactataattggtatcacagaaaaccaaacatggtgttacaaagcatggcaagatctgtaactcagcaatcattcaaaaggaaaatggttataaatgcacaaggnaaggatgtccatctacacaatttgaatgggag

SEQ ID NO: 15484 - DNA, 349 bp, Zea mays
  Clone ID: MRT4577_114122C.1
gtccccggctccggttttcttgctaccggctggcggcttcttcttccgttcctccccagtcctcttcccggtggaatcatgatcgtctgcgtcgccgttgtcggcctcctcgtctctccgctgtgcctgctgagcttctcggtggcgggcgtcgccctcctgctcctccgcgtcgtcccctgctctctcggcgtcgtgggcgtgcgggtgcgctctccttggtggggtgcccctgcgttgcttgccgcgttttggggtgttctgttcccgtctggtccctgcggcgcgtgtggctgtgttgcgggcgcggtgggtgggtggttcgtgggcgcgtctggtcttgttgtcg

SEQ ID NO: 15485 - DNA, 440 bp, Zea mays
  Clone ID: MRT4577_114123C.1
acgatcgctcgaatgactggcttgtcgatataattaattgcaacattggtcatgatgctagctcggcatgtcttatcggtgtgctgcacatctatggcttcgagagcttcacggtgaacagattcgtacaattctgcattaactatactattgagacactgcatcgacagttgactcatcacgtgttcaacacggtacacgacgagtaccctggacagcaaactgattgaaggcatattcagcgtggtgacaatcgagatgctcttgaccttatggagtggtaacctcgtggtggtatcgtacttcttgatgaagcatgtatgctgcacactgccactgacgagacatgcgtgctgaaagtctaccatagttttgaaaagcacaagctgcttgtgaagccccagctatctcgtgacgactgtacaatctgtcactacgcc

SEQ ID NO: 15486 - DNA, 391 bp, Zea mays
  unsure (1)..(391): unsure at all n locations
  Clone ID: MRT4577_114124C.1
gggtgccagcnngagagcggggtgcgngcgtgctgcccttctctgtgcgntggacggtcctcgagggggggactcctgttggggacggtcgtgcttgtggtcgngcgtttccggtccttgggtgcggggggtgggatgactactgtctatttgtgcgctggggcctggggggggcttactttggttggttgaccctcgcgtgcccgtgtgtcggtgattcgtctgttttgtggtggtgaggcgcccgggtgtttggggtctgtgtgttggttgctgggtgggggttgtgtggggtgtgctggggttgggctgtgtgtgcnctgttgttggggggcggggtggcgtggcggtggttgntggtgtgtgcgggtggtggggtgggggttggtgg

SEQ ID NO: 15487 - DNA, 410 bp, Zea mays
  Clone ID: MRT4577_114125C.1
gtggtgggggtcgtgggacgcaggcacaccacgtgctgagcgtattcgcggtcgtccctcatgctcgtgttgcaccgcatcagattatacggttagaagctatctgcatgagtagggagacgatagtcgaagaactacccatgcgtgagcgctgagtccagggtggccttggtgaaggtcaggcgcaggcttctggctcttatagtcgagaggagctgggcacccatgatgctgcgcctctcgtggtactaggtggggacttgcgacatgaattttgggaccggcgtgcccttccgaaccagggagagatactgggaactgattcaatgctccatggccatgttgaacatggcgaacacacgtgattgcgcctatcaaggaggagacaacacaccctgctcctatgacca

SEQ ID NO: 15488 - DNA, 720 bp, Zea mays
  Clone ID: MRT4577_114126C.1
gggtacccgggccctcctcgagttttttttttttttttttttttttttttttttttttttttttttttttttttttttttttttttttttttttttttggggggggaaaattttacccgggaccataaattttttatttagggggggccccaaaattttttcgggggggggggcccccccccggtaaaaaaaaaacaggaaaaaacgggggaaaaccttggggggcccaatttttttggggggggaaacaaaaccgaaaactcgacggaaggatggggggatatttccccccttcccggcagggggggaaacggggggggaagaactggaaacaaaaagggtgaagggaaccccccgaggttaaaagggaacccaaagtttttgccctgggcccgggcaacttccctggagggcccaaaaccggtttggaccctccccccccgggtctggaaggatttttcacggccaatttaagggaaaccccgggggggtttgtggccccccgggaggacccagggaaaaaaaaaaccccgaagcgggccataaacgtcccgggggggaaaaaccctggggggcgggttgccctggcccaaaaaggcggctttgacggggagaaagggaaccccccccccctggggagaaggggccggaatgcgggagcttaaaaaggaccccaaaaaagttttcccggggcccaacagtctaaggggggccccgggg

SEQ ID NO: 15489 - DNA, 563 bp, Zea mays
  Clone ID: MRT4577_114127C.1
cattgcacaacacagttttgaaccattgagcagtgtgaaagtttacttgactggcgaaaagaagcaatagaacttgacctttcatgagcactgatactagtgaatgtccacatccattgcactgtgaagatactaactgaagatcacaacataacccactaaatggaaatcttgataccatggatgaggcggtctaagacaataccctgatttgtggttactctacaagcagtgaccctgattggggaaccagaaacgcagtccagaccatgcttcgatagaacagccacatatgaagggtttttatcctgttctaaacaagtgcccacgcttcaagatatgcctaaggtttgcggcccctctctgtaacaagctactccaatttgcccatttccatgtgttccaggacctcgaagggtccactgtttgagaatgccctgagcaacatacacgctgaatgaactttaccacaccattcgtgctgtacccaaagagtcatgctgcgtacgcgttgttcgttcaccaaggaaatgaatacaaggctggtcgcggtatctaataaa

SEQ ID NO: 15490 - DNA, 783 bp, Zea mays
  Clone ID: MRT4577_114128C.1
aagcagatgaacttctctatctttttgccaattcattcaaggtacagcaaattctaaagtaaacaaaagaatatctactttgttgtcaggtataaaccaccttatgcaccagttcatttaagaatagctagataactacggagcaataatgacaagatcaagaagacttaaactatgctaaacacaccactactctgcctaacatcctcatagggaataacttatgctctgaaatgaaaaaagaaaacttgatgaagatttacatgtcattgtttgccctcatagcaacgccgaacgtgcgagttgtcaacatctacatacttggaccagaatggcttgtacttggaaatggcaaggtcaagccagggcttataattcccgttgtaatgaactaccgcagcgttgtcgatctcagcaatgtcaacagctggatcatagcccaggcccaagacatgccaagtacgattcaacgggtatgtcaggttgtagaaagtaattaaacctggaggcagcgtacccagcttccacagcttacggtcctcattcaaatcttgccaataatggtatattccagtgatatttcgcttcttccactccttcaggtcaaacatgttcatcccgaaagcccacccacaagcgtgtggatcgaagttctctgagatctttgggtgtgagaagttgagataagtgtcaaagcgatggaaactctctttacaggtttccacagcgccatttaccatccctttaagatcaacatcccaaaggggtgttaaatccttctgt

SEQ ID NO: 15491 - DNA, 265 bp, Zea mays
  Clone ID: MRT4577_114129C.1
atattgaaacaaatatttcaatacctatttatatgatatataacagtgggagcaagatgtgaacaactggctagaaacatatgcatggctacatatatgctcgcaaaaaataatgagtatgcaatccaatactgaatacccttattcgcatcacttacttgggtgtgggtccgacttaattaagacgacgtagcatctcacgaccaccccattttggcgttagctactacatagcgcaagtcctccatccctcggaccccggacg

SEQ ID NO: 15492 - DNA, 374 bp, Zea mays
  Clone ID: MRT4577_11412C.1
aggaaacaagagtttttaatttttccgcggaggagcagtaaaatactaaaaggtgaagggtaaaatacgggcaaaacgatctcacatcccttccgtacatacaacactatgagctgggtccaggcatttgaggaatgaacaagatcacagggagggacgggggacggagactctttgggaggcgatgcatctcttcgtagcacgaatacccctcctacggagcaccatccatggggcctctttgtcatgggcaaccaaagaaaagcagtggctcttctaagccggcctgaacaaggagaacatgaacagatagaacgccaggggggccatgtgtacagccaagatgctcacccaccgccacttggacctggcaa

SEQ ID NO: 15493 - DNA, 262 bp, Zea mays
  Clone ID: MRT4577_114130C.1
cggacgcgtgggcggacgcgtgtgtgccttatcagatccatgaaattaaatacgtcctcggcacacttaaaatgacgtatggcctatcatactaacccatcataaacatctccttgactaatctttatctacacctgcacaactacaagttcacatcgagataaacctgcctgatgaaaatgctacgcttcaaattcttcatattcatacatataatactaatgataattctctactatcaccagatattaatctacttgat

SEQ ID NO: 15494 - DNA, 505 bp, Zea mays
  Clone ID: MRT4577_114131C.1
ggataaattccgccggtcaattacagataaagatgggaaattacccaatgttacaggatacaacatttgacttttacaacagtttcttgacaaaataaactaatttatgtagcaaaaattatgaattcatggctagccacaagaaattatctaagttactgcccagaaagacttgattctctaccaagcgaaggtggcacagacaacaacctgctacatgccgccctggaagcaaccggccgcggaccttcaagcacaccacaaggggccgggttggagcatcgcgtagataggaagcgacgcttacatgacacaggtgagccgacacacccagacggtcggaggctagcagacgaacacgtagccttattgaactcccgcgacgtcaatgcccgaacggagatgaaggcctatgccacatgtgcgccgcacgcccttggacgaacttgttgcccctagatcagaactccggtgtgatgtgattgacggtccccaccacatctac

SEQ ID NO: 15495 - DNA, 521 bp, Zea mays
  Clone ID: MRT4577_114132C.1
atacctagtggctgggtgttcccgaacgatggccagcctctaagagttggggtcccggtaaaccagcttaaggcattggtgtcaggcagcacccctgattctgtgaggggttactgcattgatgttttcaagtcagcaattaaactgctcccttacccagttccttaccagtttattcctattggggatggcacaaagaaccctagttatgtcagcatcgttgggatggttgcttccaatacacttgatgcagctgtaggcgactttgcgatagtgagaaatggaacacggcttgcagagtacacgcagccttacattgattcagggcttgtgatagtggcgccggtgaaacacataacctcaagcgcttgggctttccttaaacccttcacatgggagatgtggtttatcacaggcgctcttttcattttggtgggaattgtggtgtggctacttgagcatcggagtaatccagaatttcgagggcctccatgtaatcaagtcataacaatattctggcg

SEQ ID NO: 15496 - DNA, 649 bp, Zea mays
  Clone ID: MRT4577_114133C.1
atcggttcttgaccgtggcgagaagattgaactgcttgtcgacaaaactgaaaatctgcgttctcaggtaacgggttgctgattcctttttagcaatttaattttgcatgtgtgtagatccaagaaagaaaagatgaatcgcttcatctatagaatatataactttatggtagcatctaggaaaattggccataaaaattagcatatgtctttcgccctgagacgaaaacatgtatatggcttcttgacccttaagcagcccccctttggaacgcaggagtgatagaggagtcatacaagaatcagttcattttgataggaaaagcgcagcatagagggcctaagtgtgtaatgaatttgacttgatatgttgtagaagtttgatatctgtgctattcaatccaccttaagtgccagtgaccttgtttgttggaatgtcactattacgtagtaggattgcatcatttgttaaataattttcactagtgcaagtattcaggtgttgctttatcagttgaaagtggaaacataatgattcattaaatcaactggtcaaaacgctgtcttgaatgttaacagatcctggagtctgaagtaacaattttttttttttgtcagaattagcaagacatcaagtatgtaggaatac

SEQ ID NO: 15497 - DNA, 459 bp, Zea mays
  Clone ID: MRT4577_114134C.1
cccggccggggatcacgcgcgccatcgcaccgaacccgagagcgaagggtaccgcttctggtcggtcaacattacccgtacgatcaagttcacgatgaagcgctggaggggcggccactagcataggttcgacttcaacgctgtggtggacctgcacccgttaacccgggtgaggacatcacgagtcctatatcgccaggaacggctagatgccaaacagactcatcatggcacggcgccgctgcatacacgcccaccaccaagatggcacctaacgttacaaggacgtaaataaggacgtttataacatgatggcttcgataacgcaacagaacagattttcaacgatgcactacgacgggtatcccgctttgagagcaagtatgacaggccagctaagtgactctagcagcccgtggtacgtaccatcacctacacacactaagcccccacacgagc

SEQ ID NO: 15498 - DNA, 243 bp, Zea mays
  Clone ID: MRT4577_114135C.1
tctttcggacataccatgaagttgcaaagctaggctttccttcaaaatagggggagtctttgaaggtagcaatgagggtaccagcaatggtaaaaggttctgggaattgaaggaccttggtatgccaattcttttgggacttggtgggccaaatttctagggtaacatctagacattttccaaatttggttgtccatgtgtaacttcttaacatagatgatagctactctaacctatagagtt

SEQ ID NO: 15499 - DNA, 154 bp, Zea mays
  Clone ID: MRT4577_114136C.1
cagctagaccccgcaccatcgttgatctggtgccaacgagatgataaaacgccataagaaggcaggaagtgccgtgcccatacggaaccaggcagtgacgctcgcctgcaacaatgaatgaagaagagggaggcataccagcacgccaaggacc

SEQ ID NO: 15500 - DNA, 454 bp, Zea mays
  Clone ID: MRT4577_114137C.1
ttatttttttgtttttttttgttgttttctgctttctttttctgtcacataatcaagactattgctgacatgtacaaaacgaatcgctagctaactcagtattgttgggcattgcctggagctagtaattcagtactaggagtcatgctcaggtggtcacaggtcacaggctacagcataacctagttctgcgcttaccttttgtttgtaggacaatattgcgcagccgttgagataaatcaacgcggtccatgccataggcagaaacaatctttcgtggcagttgaaagctctctgatatgcaggcaaaatctattttatagcctttgaatggtaaatcacagaatatcaccatcagcaccagaccatcttggattaaactatacatacagacgcaagtggcacaactccaggcatgcctattatatacacaccctaggctttgattggctgc

SEQ ID NO: 15501 - DNA, 140 bp, Zea mays
  Clone ID: MRT4577_114138C.1
tacgtaagctcggaattcggctcgaggtctcgatgcggaccggttagtcctgcgaacaggggatagaggacaaactgaattttagaggcaggtgggtaatttccccaacgccgcccaccgtgacagatgctgtgcgtttc

SEQ ID NO: 15502 - DNA, 452 bp, Zea mays
  Clone ID: MRT4577_114139C.1
aatagaccatttgaacgcacaggtgcagattactattactggctgcagagtgccatatgattccgagggacaagacaacagtacataagattgctagataactgcgaagtcatatacccgtttcagggagaccaccattaattgagtttacacaacagggaccacatgcaaattattttagaactgaccagatgccgagggaggaattcttgaggcggtctacacaagtgtgcaccgcgcactgcaatgcccaacaacaagaatgttgcatggaacatgcaagagaaaggctcggggggcaaggcatcaagtccgctatgacgagaaaccggggttaacaatcttgctgataccaaaccgtgaggaacctgcccaagaacacgctgagcttgtctgccttgaccaccggattagtcttggcaatagcgtccttggcagtagtccggaagtcg

SEQ ID NO: 15503 - DNA, 374 bp, Zea mays
  Clone ID: MRT4577_11413C.1
tcggtgcgaagaagccatactgatgttcctgggggctatgtaatgctagctgctgaggatatcgtggctgacactgtgattgtgaccaatctctttggtctgctgctatcggagaatagaccagctcgctaggcttgctccttggactcacttcatggtgcatctacagcatggcgttgtgattcacctgctccaatggctggtcttggtgctgctgaggctttaccgatctgagctatcgaccatgagggctctgagaagacgcttgagatcacattctctgacgctcctggctctgatgacccttatgggcgaagcatgcgtgcgctctgcagggaccatactgactatgttgtggagcttgcacggtgcac

SEQ ID NO: 15504 - DNA, 395 bp, Zea mays
  Clone ID: MRT4577_114140C.1
attgtagcgtactagcgattgggtacgaaaacatccgcataggcgcgttacaagatttacacagggcctgaccttgcgcaacgaaacctatatacaaatccatccttattgttacataggaccgtgctattcacattactgagtacctgtgccttgcagaccatactcaacacaggcccatcgattctaatacccctgcacatacggacccaagcgcgcgacatgccctggagagtgcctgacccaacccatgtagctggtaagcactgggtatgaacaaactggagaacacctggtggctacttgagatcctcaacccgctggggggtgagcttcgatgaaaagcccgttgcggtggtcttgtacggggagagcactgtgttcctgggcttctg

SEQ ID NO: 15505 - DNA, 407 bp, Zea mays
  Clone ID: MRT4577_114141C.1
cgatcatatagatggaaacttttcactttaaaaaaaaaaaaaaaaaaaaaaagaagaaaaaataaaaaaaaaaaaaaaaaaaaaaaaaaaaaaaaaaaaaaaaaaaaaaaaaaaaaaaaaaaaaaaaaaaaaaaaaaaaacaaacattcaactacattccttttttaataaaaccacctaacttcatttaacttccctttatttttcaccttactttacttctaaaaccctgtctttacccattttaaaactcgtaaaatctcatcctactttaaacatttgcacttttatcaaataggccctttcccatcttccttcctaacaattttagccccctaaatggcccttttaacaatctttgtaacgcttaattaattactgaatctcccctttttcccccccttttt

SEQ ID NO: 15506 - DNA, 914 bp, Zea mays
  unsure (1)..(914): unsure at all n locations
  Clone ID: MRT4577_114142C.1
cgtcaatccggcgattggaaatctcgaggccggccggggcgatgcatcactcttacggacggacttcaccatctctttccgcccgggacgactactaacgccaaccctcccgcgaccggcagatcacacgattcgagatgggtcactcatacggaaagagagcgggcacccgctatgccttcagccgggacttccgcaagaagggtatgattgccctgaacacctacctccgacagtaccgcgttggagatatcgtcgacattaaggcgaacggtgccgtccagaagggtatgcccttcaaggtctaccacggaaagactggtgtcatctacaacgtcaccaagtccgctgtcggtgtcatcatctacaagcaggtcaagcaccgatacatcgagaagcgaatcaacgtccgaatcgagcacatctcgcagtcccgatctcgtgaggacttcctcaagcgagtcaaggctaacgccgaggccaagcgtgaggccaaggccaccgggaaccgttgtccaggtcaagcgtcagccccttggacctcgtggcgcccacacactgtcgctctccgagaacccccccatgaccgttacccctcttgcctacgagaccacgatctaaaagaaaagatattgcggggggttggtggtgcttgcttctatttatttggggtattgcgtccggatgggaaagaattctgcatggcaagggcttgccttttgatgtctgtacggcataggaccagaaaaaagacatcgtttgaagcatccccttctctgtattagaagatacctctggtgaattgtgaccggcccatatagaaggncccggtgatgacttggcgtanaatgaactgacgcttctcccaaaaaaaaaaaaaaaaaaaaaaaaacccgcggcctcgagctcagctt

SEQ ID NO: 15507 - DNA, 443 bp, Zea mays
  Clone ID: MRT4577_114143C.1
ggtttttccttttttttttttttttttttttttttttttttttttttttttttttttttttttttaaaaaaaaaaagggactaaaaccccctttaacattctttcctaactagcacaactgaaaaaaagggggggcaaaaaggaaaatttattggggtggggcttttttaacccccccttgggggactaaaaaccaaaacaggggaatttatgtttaaccccccccctttaccaatttagggcctaaaggaaactaaaagaaggggaacaatattttgcccctcaaaccaaataaaatctaagcaaaagcttatttgccccccctccccctcctttggttccaccccgggaagactttccgatataaaaaatatatatttttttatttgccccccccacataaagggggtttcaaaaaaaagatttaatataccttattcgag

SEQ ID NO: 15508 - DNA, 766 bp, Zea mays
  unsure (1)..(766): unsure at all n locations
  Clone ID: MRT4577_114144C.1
atcgaacgcgcaggagaactgcgcatcttatatattaagaaaaaggagatagaggtctaaaatagacccagtacaagctgccaaaacatacattaaaaaagaagaaaaaataataggggggtgggtatccagacaacccccagccccaccagcacctaaggccacaatctcctaagatctcttgcccctgccaagccccaccgaacagcatcctcatgaatatgctgcatgataatgctgatgttgggggatgcaccatcaaacacacattcatttctatgcttccatagccaccaagccaccagaatcactagggaattaaatcctcttttctgattttttggcacctggcactcagcttctctccaccagtcttggaaagccgttgttgtcaatcctggagtcaggcgatgcagccctaccttgtgcaaagtctgccaccaagtgtctctggcaaacacacaagccaccaagatatgctgaactgtttcctcctgctggtcacaaagggggcaccttacaggatgcacgagacctcgtctgcttaatctatccgctgtccagcaacgatttagagaagccaaccaaatgaagaatttacaccttggggggcccaacttttccaaattctagtagccggctcaaaagagactgaaccagccataaaacgatcatatngccgatttagtggaataatctccagatgcagacggggaccatctatgcacatcaggaatccccggaatgtacttgaaaaccttgcact

SEQ ID NO: 15509 - DNA, 471 bp, Zea mays
  unsure (1)..(471): unsure at all n locations
  Clone ID: MRT4577_114145C.1
ggctgcgcggtacccggggggcggggagtcctcttgtccgcaccatcgcctccgctccggatcgccgaatcggcgctggcgggcgagacgtggatctcgacggaggagactccgaccatcgctccatggaggccgcggactctgaatccgtcatctccaccttcacctgtccgcactgtcagcgggaggttccatcttcaaacattgcattgcacaggggggactgcgctcggaaccttcagaagtgcgaacattgcggagatatggttgccaggaagcttatggatgaacactacgatgaaaaccatgctccgaacgcgagctatgggatcttcatacaggcatacaatgcccacaaaggatgctcgcgtgccaatactgtcagtttgaactgcctgcagttgatctttttgaacatcangatctgtgtggaaaagggacagaatattggaaaagtgggaggaagggtat

SEQ ID NO: 15510 - DNA, 1858 bp, Zea mays
  unsure (1)..(1858): unsure at all n locations
  Clone ID: MRT4577_114146C.1
acctcaggcgtaatgtggttgggagacatgcccatgtagaagccggtggtcctgttggggtcgatgatccggtccacccatttggcccatgtggtgagcacctccttgaacgcctcgggtcggtccacctccacgtgctcggtgtagccgccctggtcgtagaagaacgacccctgcttcaggactttcatgtcgagcgtgttgagcccccacatgtccgtgttgaagtcgaggtagtcgacgccgatccagttgcgcgcgtgcttgtcgatggcgtgccactgcatcacccggtcggggtcactgtgcaccttggggttgtcggagttggactccaccaggaagggcgcccagtagaactccaccgtcgcgttgtactcgtgggcggacatcccgaaaaagcctattccgtttccgcccccggccccgagcctgtcctcctgcctcgtacgtcctctgcgcggtacccggggagtcctcttgtccgcaccatcgcctccgctccgattcgccgaatcggcgctggcgggcgagacgtggatctcgacggaggagactccgaccatcgctccatggaggccgcggactctgaatccgtcatctccaccttcacctgtccgcactggtaactctctctctctctgccccccccccacccccctctctctctctctccggntggaatctctctcttgctggtcttggccccctcgactacccagcgtctccgcttacccgccacaggtagtgggttaccttctgcaaattatcgaactcgcgtacttatataatcagttttaccagcatcgtatcaggtaggtactcgtatgattaccacgatggggtatgttttttttagccagctgtacattatattatgagcttcgattctcctcatgctctttatccaatcagctgggattaagtttgttgattgttgacgaaatttctctgcttatattctatagtcagcgggaggttccatcttcaaacattgcattgcacagcgcgcactgcgctcggaaccttcagaagtgcgaacattgcggagatatggttgccaggaagcttatggatgaacactacgatgaaaaccatgctccgatgaattgctcactttgcaaacacacagtagagcgcgagctatgggatcttcatacaggcatacaatgcccacaaaggatgctcgcgtgccaatactgtcagtttaaactccctgcagttgatctttttgaacatcaggatctgtgtggaaatcggacagaatattattagagttgcaggaagtatatcagacttcgtgaatggattggacatgaactccagttccatacgattttgaatgctgcatcagaactttcaagtgacaggactcgagcagcagcagagcagccagtaccaaagccagcccgacctgctactggttcgcttcacaaacaactgctcttgacggttgcagtaactggagttgcagttttgattggatcaatactgtaccaaggtaaggggaagtagttccggggatagtaatttcacgccccttgatgtgtaaattccctcataaccaaaagagtacagtttagaccccagttgagggaaacaaaaaagaagaaagaaagagagagtacagctgagattacaacatttatggaaggaccaatgaagctatgtcgttgttctatgtaaatggtaattttcccatcaaacttgtgggcgtttggtaacctatgcaaaatttgttacaactgcaaaagttgtaatatcttatggattcatggacaaactgtgatgtgcagtcagtcaaaaataacttatcctaatacatttgccacccaaaaaaaaaaaaaaaagggcgggc

SEQ ID NO: 15511 - DNA, 880 bp, Zea mays
  Clone ID: MRT4577_114147C.1
cattgggaccctcgaggccggccgggaatcgccaactcggagaccttgagaggaaagccaccgcgcgctagggcctagggcagggcacgagcaaaggccctcccgcgggttccattggagcgcgagcgaacggcgccgacgcggcaacacacattcgctttattcgccatggcatcgccatcgtcgtcgtcctggctgctgctgctgctctcgtgcctcgcgcttgccctgctcgcggcggacgccgaagtgcaccaccatgagttcgttgtccaagagacgccagtgaagaggctgtgcaagacgcacaacgtcatcacggtgaacgggcagtacccggggccgacgctggaggtcagggagggcgacacgctggtgatcaacgtcgtcaaccgggcgcagtacaacgtcaccatccactggcacggcatccggcagatgagaaccgggtgggcggacgggccggagttcgtgacgcagtgccccatcaggcccggcggcagctacaagtaccggttcaccatcgaggggcaggagggcacgctgtggtggcacgcgcacagctcctggctcagggcaaccgtctacggcgcgctcatcatccgccccagggagaacaggacctaccccttcgccaagccctcgcgcgaagtccccgtcatcctttggggagtggtgggacgcgaacccgatcgacgtcatccgggaggcgcagaggacgggcggcgcccccaacgtctccgacgcgttcaccatcaacgggcagcccggcgacctgtacaaatgctcccagaaagagactacggccatcccgggtgaagcccggcgagacggcgcttctgcggttcatcaacgccgcgctcaaccacgagctgttcgt

SEQ ID NO: 15512 - DNA, 1039 bp, Zea mays
  Clone ID: MRT4577_114148C.1
ttgtcgaggtcggccgcggccgggatcgcaaactcggaaaccttgagaggaaagccaccagcagcaagcgaagaccaccagcagcagcgcagcggcgacgtgtttcgctctcgccatggcgtcgtcgtcctcgtcccggctgctgctcctcctcctcccgtgcctcgcgctcacgctgctcggcgcggcagacgccgaagtgcaccaccacgagttcgttatccaagagacgccggtgaagaggctgtgcaagacgcacaacatcatcacggtgaacgggcagtacccggggccgacgctggaggtcagggagggtgacacgctcgtcatcaacgtcgtcaaccgggcgcagtacaacgccaccatccactggcacggcatccggcagataaggactgggtgggcggacgggccggagttcgtgacgcagtgccccatcaggcccggcggcagctacaagtaccggttcaccatccaggggcaggagggcacgctgtggtggcacgcgcacagctcctggctcagggccaccgtctacggcgcgctcatcatccgccccagggagaacaagacctacccattcgccaagccctcgcgagaagtccccgtcatcctcggtgagtggtgggatgcgaacccgatcgacgtcatccgggaggcgcagaggaccggcggcggtcccaacgtctccgacgcgttcaccatcaacggccagcccggcgacctgtacaaatgctccaacaaagagactacggccatcccggtgaaggccggcgagacggcgctgctgcggttcatcaacgccgcgctcaaccacgagctgttcgtcaccatcgcgcagcacaagatgacggtcgtcgccaccgacgcgtcctacaccaagcccttcaccacctcggtgctcatggtcgcgccgggacagaccaccgacgtcctcgtcaccatggaccaggcgcccgcccggtactacgtcgccgcgcgcgcctacgtctccgggcagaacgtggcgttcgacacaccaccaccacggcgggcgtcg

SEQ ID NO: 15513 - DNA, 312 bp, Zea mays
  Clone ID: MRT4577_114149C.1
atctagaagcgccccttttcctctctatctctatttttgacgggcgaagcttcggaccccaatctaatcgacaccttgccgagatggggccccaaggtcttcgtcgggggcaactgggaatgccatggaaccacagatcacgtcgaggagattggcaaaaccctggatggaggacagggttccccttcagatgttgtggagggcggtggcaggccttcctatggcttcctttccgtgggcaagagccagctgcgcccagaggttcatgttgcggctcaaaactggtgggttaagaagggaggggctttcacc

SEQ ID NO: 15514 - DNA, 267 bp, Zea mays
  unsure (1)..(267): unsure at all n locations
  Clone ID: MRT4577_11414C.1
gtgntccacccgcctcgggcctccccaaagttgctgggnttacaggcttgaggcccccgcgcccagccatcaaaatgctttttatttctgcatatgttgaatactttttacaatttaaaaaantgatcctgttttgaaggcaaaattgcaaatcttgaaattaagaaggcaaaaatgtaaaggagtcaaaactataaatcaagtatttgggaagtgaagactggaagctatttgcataaattcacaanctatactcttctgtataac

SEQ ID NO: 15515 - DNA, 307 bp, Zea mays
  Clone ID: MRT4577_114150C.1
tcctcctggaaaaagaaagacagacctgacacatgggccatttgagaggcataccatgtaactaggactcagctgcgaaggagacatataacgagaactaagccgagaaacaaatgtctaaaacatgaccccaacacaactggctgctgccaggacgccctggatggacaccgggctaaccacacttggcaaccttttctaagcactggcttgagaccgatacagccccccaaaatccaactagtcggacattggacccaggaagccgataccatataagacataagactcccatagggagcgtcat

SEQ ID NO: 15516 - DNA, 224 bp, Zea mays
  unsure (1)..(224): unsure at all n locations
  Clone ID: MRT4577_114151C.1
tcgngcacgcttacgctcacgcatgctgtaatgcgtctcgcgttcggttcgctgcgacacttcacgagatggagaaatggatccccgatgagtctggtggtctatctgcatgagggacgcaaacctgaggaggccgtactctatcaggctcttgccaacctcgaggcgcataatgaggagggtgtctagggcctcgaagcctacatcttcttgcttagtgatga

SEQ ID NO: 15517 - DNA, 277 bp, Zea mays
  Clone ID: MRT4577_114152C.1
gggggtgtaggcgggggcggcggccttggtacaggtggaggaggtggctttggaggtgggaaaggtggtggacttggcggaggtggtggccttggcagtggaggtggtgcaggcgtaggcggtggtcttggagggggtgccggtggaggcggcgaccttggaggtgggaaaggtggtggccttggtggagggggtggcctcggctgcgcgcgcgctcctctcttcggcgctctcgtaccgcctcgtcgcgtccaagccctactctttcttccccacg

SEQ ID NO: 15518 - DNA, 443 bp, Zea mays
  Clone ID: MRT4577_114153C.1
cttccatcccgattcctccgcctttgactttccgcgcccgcagcccccgccggggtcctggcgacctgcctaggacagctgtcacgcccgcaaatcacgtgaccatgcccttccatgtcctcgcgtcctccactccgcccgcgattcccctccccgcacccgcagcccccgccgtcgtcctcgcggccagccgaggacagccaccgcgcccgcaaatcacacgaccatgcccttccatgcccgcaaatcacgtcaccccttccatccatggcagtcgcgctccctctgcgcccttccatccatggtcgcggatccctacgcgccgcgattcttcccatacgctccctctgcgcccttccatccatggccgcggatccccgatgttgagatctgggagctgaagctggagatctcgcggatgcgggtgcggctgacggcggacg

SEQ ID NO: 15519 - DNA, 650 bp, Zea mays
  Clone ID: MRT4577_114154C.1
cattggtacctcgaggcggcgagaacagtctctcggccaggtctccctctccccggctctccgccttcctcttccagtccccgcgcgcgagatcgccgccccgtgtgggccctacatcccgatggactcgcgccgccgcaccctgatcagggtcatcatcctcggcgatagtgagattgggaagacttccctgatgaaccaatatgtgaacaaaaacctcatcactcatgacgaggctactatcgccgtggatttccgccccactcacgagcacatcatggacacgatcttcgctctacgattatgccacgccgatgtgcaggatggcgttcattacccataaggttgccccctacattggcattatatgggtatcaccaacgctataacagaatctctcaagggactgtatgacaatgtgcacaggtttaaaaaatacaatgtcaatctggctatcttctcaaagcctgatcactacgcctatgccctggactctactccggatgatgtagacgcgggcacccagccgccatggtgactacatgactattactcgatgtgataattgctcagtcaacgtcgcgaactttactactgctgctaaggacgtaacgaacgacgaaaacgtccgccattgtatcgtgaacaac

SEQ ID NO: 15520 - DNA, 747 bp, Zea mays
  Clone ID: MRT4577_114155C.1
tgggaccctcgaggccggccgggccgggtaccttctcctcccccatcctctcccttgtgcctctagatccactcctccccgaggtcactgctcctccaagaacaagtggatcctaaacctcctgctgccaacaagggggatgccaatagacacatgttctcctcctgcgatcttgccctggctcttgcactgacgaaaaacaccagcctgatcgcgcaggctctcgtagccttgtcgcaaccaaacaccctggtacaaccactcaccgaccacactccaccgacgaatacggactattcgacggactcacgctcatccagaccaaattgtccaaggcacccttgcgcttgaatggaagcttaccaagataccacctccccacactctgtgcatcatgagcgaacatgctggctcaccaaactcaaagccggagtgtggtgcaaagaacgcatcacatgcgtgttccgaaaggccacacctcgagcatcatcgaagcacatgaagaggctactccagaattacgactcatcatatcgtatgaacgctcctgaagagaatcccgatttctacatctgctatatggtgcatgaccgatcactagtgacgctggatctgttcacatgtcgatgggtcagatgaggctgcaagccattattctcgagggcagcataaccgtgaggtcgctacgcatgagctaatgatctcatgcatgcgatctgctgatctagcccttctttctggatgctc

SEQ ID NO: 15521 - DNA, 238 bp, Zea mays
  Clone ID: MRT4577_114156C.1
agaatcaacacgtgtatcgcatgcatggctgcacagtctacgaccttagctgtgcctctgagttgaagatgcttgacgagtaccttctaccacgcagctacatcaccgggtaccaagctacataggatgatcttactgtttatgcagctttgccaactgctccatgagatgaatatggtaatgtttccaggtggcacaagcacattgatgctttgctgagaatctctgtggtttctgg

SEQ ID NO: 15522 - DNA, 176 bp, Zea mays
  Clone ID: MRT4577_114157C.1
tttatataagcggacaacatcgatcgaggggcgtttgacaaatgaaattttcaaagggacaatgaagcgagaaaaattacaatatttaagaaaatccagagttgcactcaggccaggacacttggaacgcacaaacgggacggcacttctataactcccacaggaacaattccaat

SEQ ID NO: 15523 - DNA, 310 bp, Zea mays
  Clone ID: MRT4577_114158C.1
attctgctcgaaccccggggtggcaagggcaaggctctgaagctcattcagagccgtgtgcggccccttctggaggaggctgaggtatcctttaaactgatgctcaccgaacggcagaaccatgccagggagctggtgtgtgcagaagaactgggtcactgggatgccttggcggtcatgtccggtgacggtctgatgcacgaggtggtgaatgggctaatggaacgacctgactgggagagtgccatccagaaacccctatgtagcctccctggaggctctggcaatgcgctggcagcttctttgaact

SEQ ID NO: 15524 - DNA, 179 bp, Zea mays
  Clone ID: MRT4577_114159C.1
accatttcaccatctcgcagatacaatgcgcgagttatatctcctctggcgccatggcgctctatgcgcagaagacctgatatggaccggagtacaagggtaaggatctctaacacgcgaactgctttcgccttaagattgaactgtccgacggagaaatgcccaccctaatggcgtgc

SEQ ID NO: 15525 - DNA, 822 bp, Zea mays
  Clone ID: MRT4577_11415C.1
cattgggtacctcgaggccggccgggcgacacgactctcggcaacggatatctcggctctcgcatcgatgaagaacgtagcaaaatgcgatacctggtgtgaattgcagtatcccgcgaaccatcgagtttttgaacgcaagttgcgcccgaagccttctggcggagggcacgtctgcctgggcgtcacgcacccacgccgacgagcaaaccctagcgagcgagagagcccggagccgagagaccagccagccatggcgctgcgtgccctgtacaacgagatccggagcatgaaggtccgcgacgtgccggcttacctgaagccgcgcttgacctgggacaacgtcaagaagagcgccgaccaggccgtcgaccgctacatcgagaagtacatcgacacgagctcgccggaccctctctaccacgtctgcatcggagggatgatcttctcctacttcgtcaatctgccctgggagcgcgcccacctcgcccacctcgaggagatggagaggaccggtgggaagcactagatccgctgccccgtccctcgccggcagcgcgggaggacgggtgactttcatggggtccattcaggctgatggcttctgttttcttctgctgttgagctactggagtcatgttactttggtcgttggttttgtacccagacagcaagaaactgtccagcttattgtcttgttcctcgcgtcttgtcataagtaacttcaaacaaaggagtgcatgcattgtgattaaaaaaaaaaaaaaaaaaaaaaaaaaaaaaaaaaaaaaaaaaaaaaaaaaagggagttctagatcgcga

SEQ ID NO: 15526 - DNA, 671 bp, Zea mays
  unsure (1)..(671): unsure at all n locations
  Clone ID: MRT4577_114160C.1
gtacgcctgcaggtatcggtccggaattcccgggtcgacccacgcgtccgaaggaacccgcgctctagtgctcacttgggtcttcagccactcacgcggctcccttctgggtcacccagccgcagagccctagcctagaaccaggcgttccaagggagaggagagtgcggatcgccgccgtgagagagtacatcggcatcatgtggatccaggttcgaactatggatgggaaggagacccacaccgtgaactctctgtccaggttgaccaaggtgcaggagctgaggaaaaagattgaggaagtgtttcacgtggaaccccaactacagagactcttttataggggcaaacagatggaggatggccacacactcttcgattatgatgtgcgcctcaatgacacaatccagctgctcgtgcgccagagtctggcactgcctctcagtacaaaagaacgggactcggagctctcagactctgactctggctatggtgtgggtcacagtgaatcagacaagtcgtccacgcatggtgaaggggcagctgaagcggatgacaagactgtgtgggaggacacggacctgnggctgtacaaggtcaatgagtatgtggacgtgcgtgacaatatcttcggtgcatggtttgaggcccaggtggtccaggtacagaag

SEQ ID NO: 15527 - DNA, 363 bp, Zea mays
  unsure (1)..(363): unsure at all n locations
  Clone ID: MRT4577_114161C.1
gccttcnnnntatattatatttaccccggnnnnannnnnnntgggggggggtttgttaagaaagccatccctattgtttccaacacgcccagtgaaacaggagaaaccgaaagccggcttttggagggccggggcggggggggtccctcccggggcaggaaagcaaaagggggcaaacaaaacgaatgcaagaaagggaaaaaacccatggggacgcaccgggccggggaagaaaaaaggggaagacaacggcaaggcgaggcaaaaaagggccgctcgccccaaggccgggaaaggcaaaaggggggggcccgaaaaaaaccggggggaaacgaagggctcgacccccacaagggggggtcc

SEQ ID NO: 15528 - DNA, 1657 bp, Zea mays
  Clone ID: MRT4577_114162C.1
ccgggggtatgcgatcataccagatctaattcgccggatcccatgagcacccagaagatctttgggggtggccgagagtcctgccacgacttctaacctctcgcgatgcccgtgtcgtcctcccgacaaagagggaggcgccaggacttagaggcttccagccatcccttctacgctctccccgttcccgtgtcgtcctcccgacaaagagggagccgctagggtttagcggcttccgcttctgggcgagggcttacccgcgagggacggcgcgacgcggcggcacttgagctagggtttccctccgatcccgttcctttcccggcgaggcgatggacgaggcggcgattgacgacttgatccggcggctcctcgaggcccgcggcgggcgcaccccgcgcaacgcgcaggtgactgacgccgagatccggcgcctctgcgccaccgccaaggacgttttcctctcccagcccaacctcctggagctcgaggcccccattaagatatgcggggatgtccatggccagtattcagacctccttcgattatttgagtatggtggctatccaccagatgcaaattatctgttcctgggtgactatgttgatcgggggaaacagagcatagaaacaatatgccttctcttggcgtacaagataaagtacccagaaaacttctttcttctcaggggaaaccatgaatgtgcctcgatcaaccggatatatgggttttttgatgagtgtaagaggagattcaatgtgcgtatctggaagatattcactgagtgttttaactgcctcccagtggctgcacttattgacgataagatcttttgcatgcatggggggttgtctcctgagctaaagaacatggatcaaatacgtaacatttctcgtcctgtggatgttcctgacgttggtcttctatgtgatctgttatggtcggaccctgataaagagattgttgggtggggtgagaatgacaggggtgtttcctacacctttggagctgacatagttgctgagtttcttcagaaacatgatctagatttgatctgcagggctcaccaggtcgtagaggatggctatgagtttttcgcaaatcgccagcttgtaacaatattctcagcaccgaactactgtggagagtttgacaatgctggtgcactgatgagcatcgacgactccctagtatgctcgttccagatactcaagccttctgaaaagaaaagaaaagcaggagctgagaacatgccaaagcccggtacacctcccaggaagataaaaataagtgttacccgcatttagccagattctcgttatcaaactggatttgagaagttgtgattaaatgctccccaaacttgttatggtaggttttttggtgagcttaacacggtgttaaactgtggagtgtggaccaccgtgcttatgtcttgctgatctgaagtcatgcaaatgtatcctggcgttttgccaaacaaaaaagatcatgctaacagaaacttctggattttttttttattgtggacctctgttcttattccccaacagatgcaacatgtttatgaatgggtagcattgcttgcattggagattgtgctttcttttgtactacttaataaatacttaatagcaaaaaaaaaaaaaaaaaaaaa

SEQ ID NO: 15529 - DNA, 1856 bp, Zea mays
  Clone ID: MRT4577_114163C.1
ggtaccctcgggctttccacaaatacacaatcccctcttcggtacctttctccgagtcgtcttcccgtcgatcggcaaagagactttaagcgagagccgctagggttttagcggcttccatttctgagcgagggtttatccgccaggggcggcgcgacgcggcggcagttgagctgggatttccctcccatcccgttcccttccaggcgaggcgatggacgaggcggcggtcgacgacctcatccggcggctcctcgaggcccgcggcgggcgcaccccgcgcaacgcgcaggtgaccgacgctgagatccggcgcctctgcgccgccgccaaggatgtgttcctctcccagcccaacctcctggagctcgaggcccccatcaagatatgcggggatgtccatggtcagtattcagaccttcttcgattatttgagtatggtggctatccaccagatgcaaattatctgttcctcggtgactatgttgatagggggaaacagagcatagaaacaatatgccttctcttggcatacaagataaagtacccagaaaacttctttcttctcaggggaaaccatgaatgcgcctcaatcaaccgaatatatgggttttttgatgagtgtaagaggagattcaatgttcgtatctggaagatattcaccgagtgttttaactgcctcccagtggctgcgcttattgatgacaagatcttttgcatgcatggagggttgtctcctgatctaaagagcatggaccaaatacgtaacattcctcgtcctgtggatgttcctgatgttggtctcctatgtgatctgttatggtcggaccctgataaggagattgataggtggggtgagaatgacaggggtgtttcctacacctttggagctgacgtagttgccgagtttcttcagaaacatgatctagatttgatctgcagggcccaccaggtcgtagaggatggttatgaatttttcgcaaaacgccagcttgtaacaatattctcagcaccgaactactgtggagagttcgacaatgctggtgcactgatgagcattgacaactccctagtatgctcgttccagatactcaagccttctgagaagaaaggaaaagcaggaaatgggaacatgccaaagcccggtacacctcccaggaagataaaaataagtgttacccatatttagccaggttctcgctatcaatctgcatttgcgaagttgtgattaagtgctcccccaaacttgtgggagcgcgggcctcgacgtctccgtgcgcacgagcctcgacggctcacgggcgggcgcgcgaccccgaccatgccggctgcgggcgctgcccggttgcggccggcgcacggcgcggacgtcgccggaacgtgcggccctggcgcagacgcggcttggcctcgccggctgtgggcgctcggcttggtttggcggcttcggcaagtggtggctggtggcgcgaggaccgagatggcggcgacgacttgaatgggaccctaactgcctcccttttataatggatgcgtggggcgcgggctgccccagcctggtggcgcctgggccgctccggcctgctggctggccacgcgggctgccccggtgggccgtctcgaccagattggactatgtggcctatttattatttataatttctgaattttagtataaaaccctgttttatatgtacattcagtcctaacttgagttagggcgtctaaattcgaatatttagactcctacaaatatatgtaattgtacatatttgtcttttttatatacagacttgatagtgaattatattttatttacatttataattcccataaaaaaaaaaaaaaaccaaaaa

SEQ ID NO: 15530 - DNA, 389 bp, Zea mays
  Clone ID: MRT4577_114164C.1
ttttcctctttttttttgctgcattaagttttacactgacgttttccttccaaaaaacaaaagtttctgctccattgctggacaacttgcgcttcaaaaacgaatcactggagctgtgcgagccaaactaaataaactctcgacatactttgttcccgtaagccctaacgcaaaagtgaatcaggcgacactctggatgctgatccccttcagggggcccggcttagaatcgccctcgctccccgcatcagttttccccgaacgtggccgccttccccccgtatcttgtcgaggttctcctcgtagcctgggagttccgctgggagccccacctcccggtggaattaaataacaccctcgccggcgttgccgcctgggattatgggccc

SEQ ID NO: 15531 - DNA, 482 bp, Zea mays
  Clone ID: MRT4577_114165C.1
gggggttggggtccactacaacccaaaattaaggggcgggtgagccattgaagcttccgggcataggcaggagggaccagggccccccccattccttgggctgggctgaaaaaaggaacggaagatgggaaaataaaaaactggggacttgggggccactgccaaaaaaccatccggagcctgctgactggagtaagggggcaaacagttcctgggcaatcagttactacccatcactggtatactagggctggaggggctcctaaaatggcccaaatttggatgccgcccccatgccaaataaagttccaaggaaaaaacgggagggtctttacttgattttaaaaaaacgctcctggaaaaacttgggaatatcacccacgggacgctacgctttcccttggtggccatgggaacttggtgggaaggaatgacctaacaaacatgtccgtaaatacggggcggggctgtccttaaaaacc

SEQ ID NO: 15532 - DNA, 198 bp, Zea mays
  Clone ID: MRT4577_114166C.1
gtccgggcaagcactagggtccagagcctgtgcgtgggagccctctgggctagaaggctgacggagggcgtggggtcgtcgcaccatcttcctgtccctgacacttgtgtctgcttgctcttgggcagaggagcgctcacatcttttctgcaccccaagtaggccagagcaacagggttcatgtctcacctccgaacc

SEQ ID NO: 15533 - DNA, 534 bp, Zea mays
  Clone ID: MRT4577_114167C.1
cgcttggtcgctccttcttgaccccatgaggctgctcgtcgttcaggggatggccatgtccaccgccgtcgcgggcctcccatctcacaatcacggagccgcctcatcctacgtctgcgcctcctcctacgcgatcgcagtattcgcagacttacgcggcgcccggcatgggttcggcgtcgtacccgacttgtcggacagcggcactccagttcttgacgtctactgcctcagaggggacgagaaaactaaaaggcggaaaaggctcaccctttcatatggcaatgggaggccgcgcaaccaaaagaagggaactgggcctgcgcggctctttgcccctcctgctcctccaagtaaggatcagtgctatgatggggagatcttttcgatcggagatagactaggacatacctggaatacgtcgtccgaattctgcatcgctttatatttgccctgagcttaattggtctattttgtaccaaatcaaataccacatattgtaagaaaatatttccccgcttaaaaaaaagaaaa

SEQ ID NO: 15534 - DNA, 409 bp, Zea mays
  Clone ID: MRT4577_114168C.1
catacactggcgaatatagaaacggtcaatatgaaggacgagatagaagtaggggtggcgttgttccggacatctagcattctatctgcaatggtaggccatacgatcgggattcataatggaaaagatcatatacctattcacataacaaatcatatggcaggtcccatattgggggaattcgtgcctactcggcatcttacgagttatgaaagtacacgagagggtactaaatctgagtcttaattgaattcagaatagaacgattcagaataagcttcatatataggatacatattatcaaataaagtaaaggttggcggctaataaccttatttatgacaagattcaaatcggggaagtatacccctaagattaagaagaagaaggggcttaaaaaacttcgtag

SEQ ID NO: 15535 - DNA, 719 bp, Zea mays
  Clone ID: MRT4577_114169C.1
gtaccccgggtcggccggagactgcaccccattcggcagagcaaaatgtacctagccgccgacgaggcggacctacatagccgccaagagcacatctttgcgaagactctgacggggaagaccatgactttgcagggggagtcctcagacaccattgacaatgggaaggccaagatccaggacaaggagggcatgcccccggaccagcagcggatgatcttcgccggcaagcagctcgaggacggtcgcaccctcggcgactacaacattcagaagagagtccaccctctacctggtgctccggctccgaggcggcgccaagaagcgcaagaagaagacgtacaccaagcccaggaagatcaagcacaaccacaagaaggtgaagctctccgcgctgcagttatataaggtggacgacgccactggcaaggtgacccggctgcggacggagtgccccaacacacagcgcggcgcgggcgtcttcatggacaaccacttggaccggcactactgcggcaagagcggcctcacctatgtttacaaccagagagcgtaattgtttgccccgatttgctttatccgccaacctatcaagcattgcatatgttggttactctaaaagcatctcattgagatctgcctgaggtggaaacttataaggagcagtatgagctatcatcttggcggagcagaagaatctacccggccgcttttttttt

SEQ ID NO: 15536 - DNA, 1014 bp, Zea mays
  Clone ID: MRT4577_11416C.1
gggtacctcgaggccggccgggaaaagaagcggcaggaatggcgtaagccggcccggattttgtatctgcccgaaccggtatgcgtgggatgtgggagggaggaggacgaagacagacgcgctccgccgtctctgccttgtgggccttacgtgggcctcatggcttaaaatgccatgccccagcaactacacgagtcaacacaggcccggcccggccgggacgcggcccaagaacccccatctctcgattcctccaacaaattcccctttcccttactccccatccccacccacccacgccgacgagcaaaccctagcgagcgagagagcccggagccgagagaccagccagccatggcgctgcgtgccctgtacaacgagatccggagcatgaaggtccgcgacgtgccggcttacctgaagccgcgcttgacctgggacaacgtcaagaagagcgccgaccaggccgtcgaccgctacatcgagaagtacatcgacacgagctcgccggaccctctctaccacgtctgcatcggagggatgatcttctcctacttcgtcaatctgccctgggagcgcgcccacctcgcccacctcgaggagatggagaggaccggtgggaagcactagatccgctgccccgtccctcgccggcagcgcgggaggacgggtgactttcatggggtccattcaggctgatggcttctgttttcttctgctgttgagctactggagtcatgttactttggtcgttggttttgtacccagacagcaagaaactgtccagcttattgtcttgttcctcgcgtcttgtcataagtaacttcaaacaaaggagtgcatgcattgtgattaaaaacgttttcagcaattgagtacgaatattctctttttttttgtaaaaaaaaaaaaaaaaaaaagtcatatttgctgcattgctggaccaaaaaaaaaaaaaaaaaaaaaaaaaaaaaaaaaaaaaaccctagactatctctctctctctcctcgtgc

SEQ ID NO: 15537 - DNA, 422 bp, Zea mays
  Clone ID: MRT4577_114170C.1
aagaacaaataacttataggatcggtgtgggtttccccacttccaaatggggggaaattggtctggggaaaatacaacaatttgggaaaaggactgaacaaagcatttataatcctgtttttggcatgccccccacaccaaaggggggggggaagctcaagttgcctcaaggaaaaaaaggtttttagtactttatttttaaaaaaaaaccaactgggcaaaaaggggcccggggggttcatatggccataaaaacaaactggcgcaaggtatgaacccctcaaagaattttacttatttgagccggtccatttttcataggccattatttaaataggggatattggcaacaccaattcctttggggaggggccttatgttttttggtgacatttttggatatccaattgccagggcggggg

SEQ ID NO: 15538 - DNA, 649 bp, Zea mays
  Clone ID: MRT4577_114171C.1
ggtaccggcgcccttcctcgagtttttttttttttttttttttttttttttttttttttttttttttttttttttttttttgggagcaaaattacattgcaagattttatggacaaaatatatatttttttacgggaggcaggaataaaaacccaataaggcttcatcctggaattctgaacactccctttcattgaaaaaataaccagggcaaattttttacaaaagcccaaaaaagacaaagccccagcaagatacaaaaacccccgatcttattcaaaggtcttctgaagagctctgctgggtctgcatttgttgctgctgctgcaagctgacaagcttggggaaggccccgtttttgtcctcaatcaggggctggggccccccctgctttatgatcttgccgtcctgcaacaccgaaatgacgtcggggtttttgaccggggacagccggggccccaccatcacggggggccggttcctcataaccctgttaagggcctggtgcacaacgcgctccgactccacgtccagggcgcttgtggccttgtccaaaaaaaggatggccgggtccttcacgatggcgcgcgcgatcgcgatgcgctgtttttgcccgcccgacaggtgaacgccgggctccccgaccttg

SEQ ID NO: 15539 - DNA, 690 bp, Zea mays
  Clone ID: MRT4577_114172C.1
ggccgcttttttttttttttttttctctgcaaactcttgattttcgcatttttcataaaacatgaaaacctaaaaaagaacagaaaaaaaaaaccagggcacttcccctcccaaagagatagagaaagatccctcattctttcatctctctttttaagcctcagtacggggtccaccacgtccgacaccggcgaacctgggcttgaagtcgtccccggtctccttggcgttacctccgtcttgacgacggcggtaaccctcgtctcctccggcgcgcggcgcgcggtaagctccaccctcggggcgggcacctccttgtccaggacgaggggcacgaacttgcttcttgaacgtagcaggaacgatctcggcggggaggtggaggtactcgcggaggtagtcaataccctcgggggtaaggacgtagtagtagtattgccacgagaagtgggtcgtgaggaaacctttcgaagtgagcgattggcacgccttgatgacgaacaagttcttgacgtcgaggtcttggtgcttgggcgcgttgaagtccttcttggcgacgaggacaccctccttgaagaggttctcgtagatggtacgcctgtcggccttggggatgatcatactgggctacgaaaggagtgactggcgatcttgtggacggatgcgagttggcgggactgacggggctcg

SEQ ID NO: 15540 - DNA, 275 bp, Zea mays
  Clone ID: MRT4577_114173C.1
cgggatccccctcagcagacggtgagctgctgtgagcttatgcctcctcatcggctcaccaccctggtttatccaccttgcagatacagtggcgattgcgttcctcgcctaggggacgtactgaccgacggaaccaatatccgtgaggaagagcgtgtgcaatgcctatgtgcggtcgtgctgtagcccctgtaagagacccgaccgcgtagaaacatctggcccttttgccgtaagtagccccagatacctcaccccattgtccccctcggatt

SEQ ID NO: 15541 - DNA, 909 bp, Zea mays
  Clone ID: MRT4577_114174C.1
ctctcggcaacggatatctcggctctcgcatcgatgaagaacgtagcgaaatgcgatacctggtgtgaattgcagaatcccgcgaaccatcgagtctttgaacgcaagttgcgcccgaggccactcggccgagggcacgcctgcctgggcgtcacgcaagtagccaaccgaaccaaagcaggagcgagtcccttctagagagccccttgagagtcgcctgtagcttccccgatcccgcccgatccccaatctccgacgacggcgatgccggccggacgagagatgggagaggtgtgtggagatctgtaaatagcaggtctaggattagatcgagtcttgcccaagtggtgtctggcgctatgccgtggtggagcgcgccgccggcgcacgcgagctgcgcctggtggctagcgtcggcgtttctgatggttgcggtggcgaggtgctgcgtgcaaccggaggaaatgacggcggcgactccttcaataagctcgttgtgtttcctgttaaggtggaggcccggctgctcttccctttcttttcaagccatcgtggtggtggatggaggaagaaggagaggcggcgagctggactttgcagtttgggaaggagctcatcctcaatgggtttgagacgaggcaacggcgcccgcttcggctgtcggcagccggtcctcaccgtctcgccattgaatatgctggccgaagggcggccctttctcttcctcccggcctggtgcctagatgggaggcagttcatctccgaatcggagtctaaggcttcttccttctgcggtgttgtgctatgggagaagcagctgcggaggtcccgacgtaccaagtgctaacgtccccggcgacgacgggattggatccggttgggagatgatttggacccgattgcatttct

SEQ ID NO: 15542 - DNA, 274 bp, Zea mays
  Clone ID: MRT4577_114175C.1
accactaaacacatgtccacacggggaactgctttccgttactactaaacaatccatgtaacgaagtcaaacaaacaaaaccaccggggtcacggggggatgaacaacaaacacagttgggggggcggagaaaaggaatccatttaagaataaacctagcacgcgacagcacaaacgagggtaacagaggttccggcccacattattaggggggttccacgctgccgccgccacataaaaaaaggaaacaacagcgcgtccttgggacgcgggg

SEQ ID NO: 15543 - DNA, 534 bp, Zea mays
  Clone ID: MRT4577_114176C.1
ctcggccaaacagtgcgtctttctatcccggtgggtgagcgcaagggctgctgcacccctgacatgatctggcaaggctcatgtgagctgagtgtgttgcgtactcagggccgtaagacggactaactgacttatgcactgccattcctacctcgtgccttgtggctggcggcactgatcccagcgcagctggacagccatcgcttgctcagctctactgttgactaattaggcatgatgtccttctgcagggcgtgtgttgtggacaccccctatgccaatcatctgtttaagattctcctacatgttattgatgacctgccccccgatagccgcaacatcttgcaggtgacatgattgaggcaaagcttaggccattgtattctctcaaagcaaggaccgaaggcggtaccatcctgtgcagggctggtgcctctatttcaggacgcgaggccgacagcctgaatagggaagaactttcatctccttgctgagccacaggccgctgctcgagcaccagcctcctctcagcta

SEQ ID NO: 15544 - DNA, 315 bp, Zea mays
  Clone ID: MRT4577_114177C.1
gcaacaggatattgaaaactgtacaaatagagagcgttaaatgcctttgcacacaaaatgcgacgaagttcatcccgtctatgaccatgttacacaatctaaccactaaggtaaacttaaaactataaatcacatgcgcactaacaacacaaattcacacattacgaaacaaagcaacatttaatgaacatagtaatacattataacaactagcaaaactaggaacgctatcatatatctacagccatagccgaaaacaaaacaactccttacatctaggaacctatcgaccaaacacaataaaaattaatttaa

SEQ ID NO: 15545 - DNA, 1296 bp, Zea mays
  Clone ID: MRT4577_114178C.1
cgaggagacatcacaaaagaacaaagataaccgatccaaagttaaatttcatcaaacaacgggatctcgtagctatatggttcatgtagaaaatttgggagataaaaacattggtcaagagcccgatgcattagatttgttcaaggagtgtcattacagcaggaaaaagaaatgttacacatctaccgtgcaacaagctataactcaaatggataacaagcggtctgcaactacagaaggtgaaaaatcaatgtctgcaactgaagttgttgctaatgtgcttgctgaaaatacaaagaagaatttgttccttcaaaatgtggggatacaaaatgttggtcctaggtctagtctgagaaatattgaagcacagttggaagtggagaagagggcaaacagtgaccttaaatctattgttgatgctcaacatgaacaattggatgcattgttaaagcaaatgcaagaaactgaagaaaataggatcagggagcaagaggaagtgaagaagaagcaagctgagatggaaacaaagatgcaacttgtgttgagtcagattcattcaagattgagatagtatttatgtcatgttgacaactttttttgttgttgcaacaactttctttcttttttatggaaccaactataatgttttggatatgatgtggtgttctggttggatagtctttattgtttgggattgtccatgtgaagttctagttggatatttgaatttaaatattgatattttgtccttgctgaaaatacaaagaagaatttgttccttcaaaatgtggggatacaaaatgttggtcctaggtctagtctgagaaatattgaagcacagttggaagtggagaagagggcaaatagtgaccttaaatctattgttgatgctcaacatgaacaattggatgcgttgttaaagcaaatgcaagaaactgaagaaaataggatcagggagcaagaggaagtgaagaagaagcaagctgagatggaaacaaagatgcaacttgtgttgagtcagattcattcaagtaaggagaatggggatgatatttatgtcgacccctcttttgtcgttaggtcttattcatccaagtgttgattgagatagtatttatgtcatgttgacaactttttttgttgttgcaacaactttctttcttttttatggaaccgactataatgttttggatatgatgtggtgttctggttggatagtctttattgtttgggattgtccatgtgatgttctggttggatatttgaatttaaatattgatattttgtcattat

SEQ ID NO: 15546 - DNA, 707 bp, Zea mays
  Clone ID: MRT4577_114179C.1
gggacacccgagaacgcttaactgtctatcttgtttccaagctccacattcaaacccaccaaaacaaatccgtttcacccacaccaaacaacctcaaacccaaccgcaaatatgcgtttctcaactctcatcgtcgctgtcgtccccatggtgctggcccaagagaccaccaccaccgagtccagcatgagcatgagcatgcccacgggtacttctgccctgagctcggccgccagcgtcacctcctccatcggctctgagatctcgtccgccctgtcgtccgcctcggaccgcgtctcgtccgccctgtcctccatcacctccgagggcaacagccgcgcctcgtccatccagtccgagctgtccaccgccaccggctccgccgccagctccctgtcctcggagctcgccagcctgagcagctccgccgagtccgcggcctctactgcctctaagtccgccagcagtgccgcctcgagcgccagcgcgtctgcctctggaaactacggccccgtgcagaccgctgccattggcatgggtgctctgttcggtggtgctgctgtcctcgccaacctgtagatggggctcactccaagttaatgggtcgggagttcactttttgtctaatggagaaacggagagcactttattgtatttaatcacttggtccacccccacacggcggttataataaaagttaagccatc

SEQ ID NO: 15547 - DNA, 1426 bp, Zea mays
  Clone ID: MRT4577_11417C.1
ccctcgaggccggccgggcgacacgactctcggcaacggatatctcggctctcgcatcgatgaagaacgtagcaaaatgcgatacctggtgtgaattgcagaatcccgcgaaccatcgagtttttgaacgcaagttgcgcccgaagccttctggcggagggcacgtctgcctgggcgtcacgcacgccgacgagcaaaccctagcgagcgagagagcccggagccgagagaccagccagccatggcgctgcgtgccctgtacaacgagatccggagcatgaaggtccgcgacgtgccggcttacctgaagccgcgcttgacctgggacaacgtcaagaagagcgccgaccaggccgtcgaccgctacatcgagaagtacatcgacacgagctcgccggaccctctctaccacgtctgcatcggagggatgatcttctcctacttcgtcaatctgccctgggagcgcgcccacctcgcccacctcgaggagatggagaggaccggtgggaagcactagatccgctgccccgtccctcgccggcagcgcgggaggacgggtgactttcatggggtccattcaggctgatggcttctgttttcttctgctgttgagctactggagtcatgctactttggtcgttggttttgtaccagacagcaagaaactgtccagcttattgtcttgttcctcgcgtttatagtgtaaaaaaaaaaaaaaaaaaaaaaaaaaaaaaaaaaaataactcgctcgaggccgggggacccacccacgccgacgagcaaaccctagcgagcgagagagcccggagccgagagaccagccagccatggcgctgcgtgccctgtacaacgagatccggagcatgaaggtccgcgacgtgccggcttacctgaagccgcgcttgacctgggacaacgtcaagaagagcgccgaccaggccgtcgaccgctacatcgagaagtacatcgacacgagctcgccggaccctctctaccacgtctgcatcggagggatgatcttctcctacttcgtcaatctgccctgggagcgcgcccacctcgcccacctcgaggagatggagaggaccggtgggaagcactagatccgctgccccgtccccgccggcagcgcgggaggactcgtgactttcatggggtccattcaggctgacgacttctgttttcttctgctgttgagctactggagtcatgttactttggtcgtttgttttgtacccagacagcaagaaactgtctagcttattgtcatgttcctcagcgtcttgtcataagcaacttcaaaacaaaggagtgcatgcattgtgattaaaaacgttttcagcaattgagtacgaatattttctctttttttaaaaaaaaaaaaaaaaaaaaccagtcatatttactgcattgctagaccgcggcc

SEQ ID NO: 15548 - DNA, 762 bp, Zea mays
  Clone ID: MRT4577_114180C.1
gttttcaactgaatgcaatattgcggggggggagcgtgggccagtgtacaagcattggagggattacaagaaccgtaatggcctgtttaacctatttacagataaacttagtgcaaagtttgatatcaacacaaatgatgcaccagtccaaaaggcttgttcccaaatgatgaaaaaatggtggggggggcaacggtgcagactaaagaaaaaattcttttatccttttccactacatttggtgacaaaaacatcaccaatcagatcgatgagtaatgaagagcggaatgatcttgtggaatattggaagagcccaaaaggatggagacatcacaaaagaacaaagataatcgattcaaagttaaatttcatcaaacaacgggatctcgtagctatatggttcatgtagaaaatttggtaagttcatttaatagattgcagggatcacataagtaataatattgcatctagctattatttctagggagataaatacattggtcaagagcccgatgcattagatttgttcaaggggtgtcattacagcaggaaaaagaaatgttacacatctaccgtgcaacaagctatagtaagacatctctatttaaaaatgcttttatattgttttcttcaagggtttttataatcagtaaccatttatgtttcttgaatgctagactcaaatggataagaagcggtctgcaactacagaaggtgaaaaatcaatgtctgcaactgaagttgttgctaatgtgcttgctg

SEQ ID NO: 15549 - DNA, 785 bp, Zea mays
  unsure (1)..(785): unsure at all n locations
  Clone ID: MRT4577_114181C.1
gccggccggtccgggggagtcgagcacttgagtccccttctctccttcccttcacctcccgattgccgccgccaccaccaggcaccaggcccaccaccgcgtctcccaaccccaagcactcgacgccatggtgtcggatgccagcaagaagaaggccgcccagaagaaggccgccgcggctgccaagaggggaggcaaggccgcggcggcgtcctcctcgtcgtcgtctgcggccgcggccgcggccgtcgacaaggcggcgaacggcgtcgcggcgctcaagctataggaccggacctgcaccggcgtcctcgcgtctcacccgctctcccgcgatatccacatagagtctctctctttaacattccatgggcatgaccttattgtggattctgagttggagctgaactacgggaggcgatacggtttgcttgggttgaacggctgtgggaaatctactcttctcacagcaataggctgcagagaacttcctatccctgaacacatggacatataccatctaagccatgagattgaagcttctgacatgtccgcactgcaagctgttgttacttgtgacgaagaaagagtgaaattggaaaaggaagctgaaattttggctgcacaggcgagctcttggaatcacagaattgntactctcatatgttccttctctatgtatggccttttcatgttgcaaactataaattaaagctggcgcatttttaggatgatggggtggcgaaactcggaacgtgtttatgagcgtctagtgcaaggatgct

SEQ ID NO: 15550 - DNA, 364 bp, Zea mays
  Clone ID: MRT4577_114182C.1
ccagaggggaggaccgcccgcagttgaccgcgctctttttccagctgggccggtccaccgaaaattttcattttttccagttgggggagagggcccattttcagctccaaaaccgtttcggcctgggtttccttgttgtaaaagcgcgacatcagccctgggttcggctcatcctcgcggggggtgatgggaacccccccatcaacctgggggaacccccccagcaaaccttcaaggttttgcagaccacccaacacgctttccaggggatgattgaaaccacctgtcacggcttcggggggtgacaccagccattccgagaggatccccaaaaggtttttaaccggcggacggtattccagcc

SEQ ID NO: 15551 - DNA, 294 bp, Zea mays
  Clone ID: MRT4577_114183C.1
cttgcatttatgtcactttaccttttccacttgtataaatcactggcttgagtattaggtggtggtatagtttttgtttcagtcgtcaaatgtgattttgagaactgtggattgacacacgtatgtatccacatttctcatctttcctttgaccctacacccatagtcccatattcatcccttctgcataagaactttctatagccatttttttattttgatttttttgttttaattttttgtattgtggaaatgacggaccatattcccgtagcgattttttagcatttctaa

SEQ ID NO: 15552 - DNA, 291 bp, Zea mays
  Clone ID: MRT4577_114184C.1
cttttgcgtgggctcacgcctgcgcatatgcccgggtctataatatcgaaccaatgtgatctagtgaactgttagctgatgtgaagtatcatctattcgaagatgacatgctcagtggaactggtcacatttaagtgctatccttttgtcatatctgtgtagtgttgtgtacagaatatgacccgcgttatagatatgcaatagcgagacccatctatgggacacaagcatacggacgtttgcatgtaatattaaaggctttaatataatgtaatgtaaataccattatgt

SEQ ID NO: 15553 - DNA, 152 bp, Zea mays
  Clone ID: MRT4577_114185C.1
gctttacccccacatgaccaaggccactccaagccggcaactcggtggcaattgacttcaacgcggactgatgcggtgcatgcagcggcatccacccactggtcggggaacacggcgagaacatcactcagggcgtgcacccgtaactggac

SEQ ID NO: 15554 - DNA, 229 bp, Zea mays
  Clone ID: MRT4577_114186C.1
aatttaaaaaccgaacctcccatccacaggggggggatacgtaattacttacattattttttcatacgcccgcgactgcgcccgattggctcggcctattcacacaagtatgaagttgatgccataagacccctcaaaggaacacgcatacccggaatgcgcgatcaaaggacgtacgttcgtgcggaaacctgaaagggctacgccacaaactttgtggctgtccagt

SEQ ID NO: 15555 - DNA, 624 bp, Zea mays
  Clone ID: MRT4577_114187C.1
agctcagagagactgctcctcgcatttcttcacatcggatgcccccttcaccgcccactctctattactgacgattcaatggaggaccgaactgaagaacaaacgccgatgagacgaactcctctcgaggaagaaccttggcgccataaggcgacctgcgcccttaagccgaaggtgcagaatggctgcacccgctggtcattccggtgccagggtacgcgagaaggttcagaggccaaacaagaaggacagcaaaattgtgtagacctacaatatcatacgtcctgatacgtgtgaactggatacaccagccacctggacgtcgcctcctacgtcatagtcgtcgtgaactccttcattaacaatatctcctacaagctcagtgtatgaaactgcccagatcatgcgctatacaaccaactctaccgatccacacacgtgacatcatagatgcacgatgtatctgcaacatctcggcatatgctgcaacaacctgcactcctagatttccttgctcgacttatacataggctatctctaaagagctaccaacacgctcttggagattctctcctgtgctcacaagctcttgctagaacttatgtgctgatgactgacgctttc

SEQ ID NO: 15556 - DNA, 272 bp, Zea mays
  Clone ID: MRT4577_114188C.1
aagcacgcaactagctgatgaaggacaacccaacattggaaggtgaattgaaacataatgacatgacatggaccggctaccacttgaaaaaggaccccatcggggcaaggaaaaagggttcaaaaaaaatatcattggcccccactacttgaagaagggggacctatagaatatatacctatatatgggccgaaaaaaagggcgtttaaaggaaagaaatccagctttttttcgttttttttggggaggggggagaagcccccccccttttt

SEQ ID NO: 15557 - DNA, 251 bp, Zea mays
  Clone ID: MRT4577_114189C.1
cttcgccgtcgcctgtcactttcccgtgcttctccgccgtcgaggccgcggttccgtgcgaacagcgcacgaatccgatgcccaggcgcgaggcacagcacatgtgtcccggtgtcgggcaagaggtggccgtcgctctgggattttggtattccaggacgcaccggctatatggggtgaggctgggcctcgggggatggtgcagcatgatgaggttgcccaagaagcagagggttagacgattcgccatg

SEQ ID NO: 15558 - DNA, 280 bp, Zea mays
  Clone ID: MRT4577_11418C.1
gccacctcgccacctcgccacgcgtagccacgcgtcgccacgcgtcgggacgcgtgggctagcgcaccgactgctgtcacgaggcgaatcagagcttcgtccggctcgggggctcgggtccgtgtcgtcggcgccacggccgctggaggcgttgggagggcaacggcgccacgttcgtttggtggcgtggggcaactgtgtgggcctcccggtttctcgtactagcgctggactgagatcgtggctagtgtctgcaagccagcaggctctcgcatgacca

SEQ ID NO: 15559 - DNA, 224 bp, Zea mays
  unsure (1)..(224): unsure at all n locations
  Clone ID: MRT4577_114190C.1
gggtcccctagagcgggcggccctttttttttttttttttttgaaccagcgggtgggcggttccccacgccgagaaggccacttaagccttaagtacaaaatactccccccggtctttgttaattatggggggctaagtataaaaaggaccagccggccaccaccattctnnagccgnagggggggggggtccacgccttggtgccgcaccggtcattcacggg

SEQ ID NO: 15560 - DNA, 2782 bp, Zea mays
  Clone ID: MRT4577_114191C.1
ttggaaaatttgatatatgggggggttttttaattataaattaaagttggaaaagggattttttgtaatataattatgttggaaaaggacagggtttttccaattatgaggttgtttaaaaaagggttgtttaatgtatttaggttgtattaatataggagatataaatttggtaggccgcgttattaaaaatggatcttttttagaggccgcccgttttttttttttttttttttttttttttttttttttttttttttttttttttttttttttttggccgcttttttttttttttttgcatttcaaaaaccatatatttcacaagtaacatttccagttaatttagaatgaaaaattctattgctgtacaccacaggaaaaccaatacagtacggcaaaatgtgtcaacactaattagcccttgatggagtagcaacaaggaaaacatttggctacctcttatctaaaactgcatccaaaggctctgcaagaatggcttgacacatgggttacgaaatgttgaccccgtgccatatagttcttccgacattcaaatacctatctacaaagaacaccatcactatgcctcaaatttacaaagaactacaatagttggtatttctcagaattgttatcgtatctattgtaattccatagacccactctttagtctctccattcgtgcttgcagcccagatagagctcgctcatccatgggtggtatattacttcgtttgttggggttcaccgtccaatcgagttcccccatgcaccatattacttccgttcatacttgccaacggccgagcctgagcaccgtcaaaatgacctatagctgccgcttgaatgcttttcatcctttccctaagagcatccaacgtgcctgaggtatggtatctatcagtttgttggtcagtgatggcaccttgacctctgaagggttgtgtctcaccactggcattatcttcgttataatctgttttgctaccaattgattttgtgtgaactggggacggtgccaattttggagaaggtattgctgctattgggggtggcgtggacagtggaagactagaaggcgttcttccagctgctgcattcttctccacctgagctagcccatccctgatataggttctaaatgcttcactagcattctgaagctgagcaaatatatcaacctttgggtagagctgagttatccgatacagttcgtagaggccaatagtacatgtttgcttgtcgccgattttcttgaagacagcagcaagctcttgcttcaattgcgcgtctgctgagtgagtagatggatttggattgtttgaagcagcatcaccccagtgagtttgacccataggtcccgatggcgtcaacattctagcagcagcaagggtctggagattaagatcaatgtatgctagaattattggctgaggttcagcatctataggaaccatcgaaaggtgaccctttattgccgttccccgaagcttcacaagttcatgcaagacggttttgaccattcttaatggcttatcatcagcaccagcccttctccgtatttcttccatcccaagttcttgtaaataaatatggatgctctgaagaattcgatcaaggtcaacttcatatattgtactctgaagaacctttgtcaacttaattaaacatttgacaactaagtctgaaaacttctgattttttacagcaagagactccattggtgtaggcgatggccatcttgaagggtccaaaggcctcagcaaattaatcagcacaacaaacgaggatgttctctcagcattatccaagattttaagcatcaaaacatttagtgctttgagtaattggctgccatcatccataagaggaaccctttcatctaaaagccaaagaagtaactccgtaataaggttgtcaagggtaccctccttcacagcatgagcaagacgtttgatctgaaatgtctgcatgagtgtgtttaagacatatttgcaagaccttgaagaagcaccagataagctaaaattgaaggttttcggaaccataacagccaagcatgacactaatctgtcagcttccttaataagatcttcaagcaatgtgctttcagggtcagctgcctgtgttagctcatggcatataactttcataccttcaacggactgctcaggcaaacctaatgcaactatgtcaagagcttcgcgccagtccacaggaccagttgtacttggaatctgcctaggtaccatgtgcctatccatatgagcatctgcatatccgaggtcccttgagatcattgatcctgtcactggacgggagactacttctccgctttgttctgctatatcagacccattctccctaaccgaacgcctcaaagctgctcgtgcatcaccaggccttccttctctccttttatccatttctcttgccttccatttaaacctatcatcgagcatgcttctttgggcatctgagagttttccaacatatcgccatacatcatccccaaggttcttgtaggctgttgcaagcgtattaagggcagctttcctaatctcaccatcacgctctgctgtcagtgctgcaacagatggcaagtttttcatcaacccaccaacctcggtcccatgatggtcaatgaaatatccaacaatatcaacacattctatccttgtccggttattcttggagcggagcccctcaagaatatagggaagtaatttgggaagagaataaatgttgaccatttgctttatcagatcccccatttttt

SEQ ID NO: 15561 - DNA, 539 bp, Zea mays
  Clone ID: MRT4577_114192C.1
atccgaagatgtgcctgataccatttgcatgcaatggctcctatgccgacattgcgctctgtgatgaaacgagcttggcgggacgacacgtcccatcgacgggtcttgcggacgctgactgccaacaactggggatcgttctgcacgagcgggaagggccccgcctcatgggaacccacgctgtaccctgccgacgacaatccgttccctgtcgctaggatctggaagcctatgcactatgaacctcaagaccggcgtcctgcttgagaccgtgaccgatcttgctgccagggcgcttcatgggctagagagcgtcgtcttcaagcagatcacgcctgcgctgccatttatctctgagtcctttcaagatgaatggctgaccggtgcagaccgtgaaccagacctgtgggagcgctacatgcatcactagagtgatgctatgggtgttcgtgcccgacctcatcgatgacaactgcttgtgacagccacgctgatcatacagaggagataccgacgcgagctttacgagaagacgggag

SEQ ID NO: 15562 - DNA, 148 bp, Zea mays
  Clone ID: MRT4577_114193C.1
catggaatgactgcacttaatgatggaataccaagttagattaagaatgcaggaccttattcttcgactctagaagcagacatacatcatatggcattatattagaagtggatgatcactcatgagaagaatcgaagttcatagattc

SEQ ID NO: 15563 - DNA, 261 bp, Zea mays
  unsure (1)..(261): unsure at all n locations
  Clone ID: MRT4577_114194C.1
tctatcaaacattcactaactctttccttcattttattctnaaagacaagagaaaaactcacaagaatgacttttcttgaccggtggcaggtcaacaacttnttcatcaaccaaatgaagagcctttctaatccatctcatctcattccatttgcacataatggagcttgttctcctatgatagaccgtttctttgtgtgtttagggcaatacctcgcatttgctttgagaattataatcgtggttaaacctgacaatgac

SEQ ID NO: 15564 - DNA, 317 bp, Zea mays
  unsure (1)..(317): unsure at all n locations
  Clone ID: MRT4577_114195C.1
ctgctgcattgatctgatgcntaggcacgcgcacgtctgcttacacttcgtctcgagctcgtgcgatctgagtaagctgttcaaggaacattctgagacgaacaatgtcaaattttagcttgtatgaatacatatgcggcattacgtctactgtcttgcaactcttgaccttcctgaaagtccttctagagcatggattttgacgtgttgagccctgaataattaattgagcattaattgggctggctcatgttgtcggacttccagatcatgcgagatacttaacatacaccacatgccagacggatgtttcaaat

SEQ ID NO: 15565 - DNA, 530 bp, Zea mays
  Clone ID: MRT4577_114196C.1
tgcttctatagatcctatgcatagaacaaacattcaactgataagtattatgcaccattgggtgatacagcaggccaaaaaactaccattgcttctgtatttcccatgatgatagataagcggtgcctcgcataacttacgatattccgtgctctcgctctgctgcacatgtcaaaccttccagcatgttcatttgcggtgcgcataaagacatcaactgcgacaaacgatacaagtacaacatgaagatctgacattacctgcttctggatgaagccggtcgaacatcgaagacaaaaggattcgggcatgcattagatgaatgctcgaactgcatttaccccctgctggttcataaattcttttcctccaccaattacttgttctcactatatgaaaaggacattcccgtatactgctgattagagcatgtacaacccaatttaagggctaagcgaaaaaatacaaacaacggtctcttattcaattaaaaagacatagtgcgcggcggattcaaagaggtgacaaag

SEQ ID NO: 15566 - DNA, 384 bp, Zea mays
  Clone ID: MRT4577_114197C.1
tcgccagcactgaacacttgattgattcattaggtagctagctagctgaatcacaatgggtcctgccaagttccatgcgtggcagtagccacgacacgactgtgacgactactaacgctggcgctcctgtgtggaacgacaacgaggctctgactgtgggtcctctcggtcccattctgcttgaggactaccaccttatctagtaggttgctctacttttgctttagtctcatttatatctgctttgtttatatttcttttttaattttttattatttatttttttattattttacattgtgtttgttgtttttatttttatattttattttattttaattattattatttttttatattttattattattttttttatttttt

SEQ ID NO: 15567 - DNA, 610 bp, Zea mays
  Clone ID: MRT4577_114198C.1
gggaccaggaactccggatggagcgggagcgcctggtctccgcccggcagctggaggagcagcgcgtgcagttcttcctcaagatgcagatggagctctccaaggccacgggcggcgcggccaccgccacgcccacgcccatggccgtcccgatccctacggacggcaacggcacgcggagagcgggcgtgaccgccgaggtcgccaccagcagcaatcaccgcgttcggtaccgcatcaagggcagcaggcaccagcatgccccgcagcaggcgcattaccagaacagcacaagccccaccgggggcgatgacaacggcagcgactcggacaaggaagcccaggaggatgcggaagacgaagatgaagagagccagtgattgctctcctcttcagcaatggaatggtaactcaacacaaaatagtgtgggggtgactgtgtgtaacttgtacctgccagtttgttcccgtgattgtggtctgttgtcttggagagattgtcatcgtatgtaacatgcttacttttgtgggaaattgttagctctattcgtgtttattcttggaatgagtattgctgtcctagagagaatatgttcataggactgcttgg

SEQ ID NO: 15568 - DNA, 476 bp, Zea mays
  Clone ID: MRT4577_114199C.1
ggggcctggaacaagggggggcttaaaaaaagggaaaaaaaaaaaaacgaagcaggggtttttggttttttcccacccccttttggagaaacgtaccccattggcccgggaaaagggccctatttaaaaaaaaaaggtttttcaaccccattttgggacttttggcacccaaaaagaaattttccccctttttggacaaaaaaaaatcccccccccagggggggccccgggggtggttttttttttggggggggggcaaaaatttggggggaaaatataagcccctttttccaattaaaaaaaggggtaaattggggggccccccaaaacacagggggatttccgttaaaaaataaaggggtcccccccccaaaaaaaaaaggttggggaaccaaaaacgggcctttcctgggttttggggatttccttcccaagggagctgggggggggcccaaaaccttgggccgaattccggg

SEQ ID NO: 15569 - DNA, 476 bp, Zea mays
  Clone ID: MRT4577_11419C.1
gactccgtaacctccctcgagcccgagcgaagaagaaaggagggcgctgcgccggcggcggagcggagatgtcggagaggaggcgcggcgcggcgcggcgccggcaccggcacccgcaaggatgaggtggtgacccgcgagtacaccatcaacctccacaagcgccaccacggatgcaccttcaagaagaaggcaccaaatgccatcaatgagatcaggaagtttgcccagaagaccatgggtaccaccgatgtccggatcgatgtgaagctcaacaagcacgtctggagcagcggtatccggagtgtgccgaggcgagtcccaagtctgttatctttacacattccgagcatctgtatttattatgctgagacagactcatcaatttttgcttgtacaacctgatatgactgatgtagccatgtgttttaagattttttgacacatgaaagatcacttgtagccctgtttgtcac

SEQ ID NO: 15570 - DNA, 201 bp, Zea mays
  Clone ID: MRT4577_1141C.1
aaatggtgttctttttttagttcggaaaaaaaaccctgggagccttaaaaaaaaggttctgtgtgggaaaaacggggtacaggaaaatgcgggaaaaaaagcttttttggctatgaccaaaggaaagtggaggtgtgaatttttggagggggggggcgtgggaatggggggttagcttggccagtgcacgagaatcggggg

SEQ ID NO: 15571 - DNA, 976 bp, Zea mays
  Clone ID: MRT4577_114200C.1
cccacgcgtccgcgagacctggccgcacgcgtccgcccagcgcgtccgagagcggcaggcaatcgaagcagaagcaagcggctgggcgccaagctgaggtgcgcgggcggcagcagccagcagggatggcgattgtgggcgcggagtactgcgaccccgaggaacgcgtgctgacggtgcgcaagacctcgcacttctcccccggcgacgggttcgcggcctacgaccaccgcacgggcgggctctccttccgcgccgacacctacgggcggggccacggcgggggcgcggcgtcggcgggcgagctcgcgctgctgggcccggccggggagcctctgctcaccgtgcggcgccgccgcccgtcgctgcaccagcgatgggagggcttcctgggcgcccgcgccgacggccagaaggcgatcttctcggcccggcgcccgtccatcctcggcggcgccgcggccggcgccgtcatcgagctcctcccgccggcgccggccgccgcccccgtgctgctccgcgtggacgggtccttcccgcgccggtgctgccgcgtggtgctggcgcccagggccgagggggagaaggccaaggtggtggcggagatcgggcggaaggtggacgagggggcaagggtcgtcatgggccgcgacgtcttcgtcctgcgggtgagccccggcttcgacgccgcgttcgccatggggatcgtgctcgtgctggaccagatcgtgggcgacgagtccggcggcgtcgacgctggggcggacgtcatcgacgccaagcccaaggtttggtgacccatgctatgggttgccccccggccttatcgcgcgcttcttggtttcgctgtgtatagagagcctggcatgcgagatcttgtttccttcccccctttttttaaacgttcgcgtatgagctttgctccggagaactggcaatgcataaatacatggtacatgctcgaggcttttgctgt

SEQ ID NO: 15572 - DNA, 415 bp, Zea mays
  Clone ID: MRT4577_114201C.1
aatcttaaatggaaaaagaaaacggaacggaacaaagaaaaaaaaaaaggaaaaggaaaaggggagggaacccaaaacgaaaacaaaaacggaggcgggaagggagggggggaaacaaaaaccaaaacaaaaaagaaagtggcgggcaagggaagaggggaaaagggaaagaaaaaggaacggcaaaacccagactggggacccagcccggaaccaaaccaaggaacgaggggcggaacggaaaacgaacggaaaaccaaaaaaagggacagggcacgggaaaaaaaacgggcacgaggccggacccgggggcgggcccggggaacgagccccgaacccggaaccgggaccgggacgcggaagggaaaaacgaataagaagggggaggagagaagggcctagccaaggccagagc

SEQ ID NO: 15573 - DNA, 564 bp, Zea mays
  unsure (1)..(564): unsure at all n locations
  Clone ID: MRT4577_114202C.1
cggacccatatactttgagcattcagaaacacaccagcgaagcgcactagcaacgaccaaacaacaatggctaccaagatattagccctccttgcgcttcttgccctttttgtgagcgcaacaaatgcgttcatttttccacaatgctcacttgctcctagtgccattattccacagttcctcccaccagttacttcaatgggctccgaacactcagctgtgcaagccaacaggctacaacaagcgcttgcggcgagcgtcttacaacaaccaattgcccaattgaaacaacaatcttctgtacatttaacaatacaagctcatccaactcaacaggaactacagaagctaccagntctgtaccacctagccatggggaaccatgccgactactttgacagaagctcatnctattcaacncactacctccggcattcgtagtttgataccactaacaactncagctggatgagtttctgtgaccaatagatatacaagaccaattattatcttncttccttggacaactgtcatatctgtttttatcgatggtagtcgttcaag

SEQ ID NO: 15574 - DNA, 503 bp, Zea mays
  Clone ID: MRT4577_114203C.1
ctcgagccggcgggaccctttccgaaagcaatccgaacagaccgttctgctctgcatggcgctctgcgccgtgagttccgttcggtgctgctaccttctgccctccaccttcgcgatccgctaccatggatagcgcctgccgcgttaccgggtggcacagcaggacatcccaaccggaggcagggcaaggtatcctcagagacgagctcgtgctgcaccgacttccgcaacagtacctgtggaccttcgacaccacgtgttatggagtccgagcgtgactacctcatcatggactccgtctccatcaactatctgctactgcactagaaacccggcaccactgagctacagaaccgatgcgatcacatgatagctcgcctgcatctcgcgtcgatcggggagctacatactgctgtatggggagctgaactactgagatcctcttgagcgatcgtgattgcagctattactcatcattatgatgtgccccaacgaatgaagga

SEQ ID NO: 15575 - DNA, 195 bp, Zea mays
  unsure (1)..(195): unsure at all n locations
  Clone ID: MRT4577_114204C.1
ttgggccgagcaccgcttccccagtcagcagaggagataccactcttaggactcgacagctgggttctggcccatcggctcttccttggcccccagactggtctccaaggcagccggggtgtctccncggaaaaggatctgaggctaactgtaaaaaccgacagggctgtatcgcatctacacagcctgaccctg

SEQ ID NO: 15576 - DNA, 384 bp, Zea mays
  Clone ID: MRT4577_114205C.1
taagggggagggcattcccccaaggcatgccaagggcttttcccttttaaggcaaccaaacaaaataattgggttggggattggtgttctttaagaaggcccgccttatattctcctgtgggaaatgataatcggggcgcccaaaattctctcctaataggacaccacaatcgagcgccatattgttgtcaaccaagcatgtggcgccattatttatgaagcgcaacacatcccccccgatgaggggcgtcctggatgatattatgagaactttaggaggtcttctctcacacaactatgtgttgctggatcattgtctcatatgatgtaattatttattttattttgttcagaactcctattatatagtaaagatgtgacatt

SEQ ID NO: 15577 - DNA, 366 bp, Zea mays
  Clone ID: MRT4577_114206C.1
cgaacgcttacgcttgctcggctgtgaacatttcacatggagattgacgcagcgagagctggggcgccttcatgggcatgcgagcgctaacatcggctacaaacgatgctagggcccataacgatcagatgtatgatgacatccgtctagactgagatcgatcagatcatgtactagagcgaccggcagcccacacgttagtatacgcgaaaggtggacacatagaacgattatgcatggcagctccttgctaaccggaccgctcgtactggagacagagactatctgtcatagagtactgcattgctgcctactactactagtccccaacgcttgtcggtagctactactacctcaccgtattac

SEQ ID NO: 15578 - DNA, 365 bp, Zea mays
  Clone ID: MRT4577_114207C.1
gcgcgcggaagaaataactggggcgccgaggagtccagcccgcggccgcccccctaaaccggggggggtttaaaaaggcgagcgggggaccacccagcacaccacaagaccgatcaccagcggcgaccaaaccaaaacaaagcaaatggaagaaaacccccacacacagaaaggcccaggcgccagggagctcggcacagaaacaaggaaacgaacaacaccagcaaggagcagcggaaggcggagcacgcgcgcccccaggcacacccgcacgaggacggacaaggccaagcgcgaggcgggggcgcccctgccgacgggggggacaagcacacatcgcccaccagcagaagccccacggacac

SEQ ID NO: 15579 - DNA, 156 bp, Zea mays
  unsure (1)..(156): unsure at all n locations
  Clone ID: MRT4577_114208C.1
atgtctcttttaaagtctttgtcagataattccactgtacatgttattcagtgtttggtgtccactgagttgtcattgccagacaagtggagatttttgcagctcatccttgnatcnccagtagttccgatatgtaccctcgacatgtgaatgtta

SEQ ID NO: 15580 - DNA, 227 bp, Zea mays
  unsure (1)..(227): unsure at all n locations
  Clone ID: MRT4577_114209C.1
gccaagcgaatgcaatgttaaagaagggatttcgttatcctatgatcaggctcatgtcgcactcaggacaggtgaaacatataaataggaggggcgcgggcgttctttttattaatttatcgccgntaacttcaaaaaagaccgagctgacgacaaaaatatctgagaacggggggggtacgtatagagctcaaaaaggtttctatggagctaactatttttttttt

SEQ ID NO: 15581 - DNA, 238 bp, Zea mays
  unsure (1)..(238): unsure at all n locations
  Clone ID: MRT4577_11420C.1
cctcagtctgggggggggggggtgtgggctctagcttgccgcgcgggtgctgcgtgtngccatccggcttctcatgggctccagtgtgcctgtggcggggtccagacccccaccgtcttggtctgccgtggaagcgcccgtggttgcgacccctcctcctggcggggggggggggggatctgccccctcctgggccctggcttgggctgaggctgaggttgctgctcctgctgctccc

SEQ ID NO: 15582 - DNA, 194 bp, Zea mays
  unsure (1)..(194): unsure at all n locations
  Clone ID: MRT4577_114210C.1
ggccgggaaacaaccaacngacggagncgaacncngcggcgcaccnacaacagcgacgacagggacgcaacccaccagcggnggcnaacccaggggngcgggccnngcgacagcagcaacaaaggcggccacacaaccagaccacgcagaggaacccggccgggcagcggcagcaacccaccgagggaggcgcc

SEQ ID NO: 15583 - DNA, 1206 bp, Zea mays
  Clone ID: MRT4577_114211C.1
attccagattatttgagaatgacacttccatattctcattgggcaccgatgagaaagttggagatcctaccaaaactcataatggctctgagaaagttgcagcaacagaaccactcggtagatgctccttacttattacaccaactgaagatagaactgatggtattactgagcctgtggaccttgcaaagaataatgagaatgcaccccaagaataccaagctgcatctgaaattatccctgataaagttgcagagggtaatgatgtgtcttccacaggaattactaaggatactactggccatagtgcagatggtaaagctctcacttcagaaccgcatataggggaaacacatgtcaactcagcttcagaatccataccaaatgacgcagctcccccaacccagagcaaaatgaatgggtcgaccaagaaatcattagtcaacggtgttttggatcaaccaaatgccaactcagggctagaatcttcgggaaatgattatcctagctacactaactcgagcagtgctatgccacccgcgagtaccgagttaattgggtctgcagctgctgttatagatgttgattctgctgagaatggcccaggtacgaaaccagaacaaccggctaagggagcctcgagagcatcgaaatccaaggttgttccacgaggacagaagagggtgttgcgaagcgcaacaagaggaagagcgacgtaggggcattgctgcgctacattgttgtgtactaatatatgttgacggcccagaagggcaacatgatccctaggttaactagagctagcgccgactggtcgtttccacgtacgatgcactgcgcatcagcctgtatccatgttgtattatcgtagggcttgtaatgaccacatgccctggttagagttgatcattaggaccagtagctgcttgatttgtgtctcggtgatctagctttgggtagtttgtgcagttggaaggagacagtttgttggttgtattgtattgcagcgcacagctagcaagtgttgttgtagccatcaggtacgtgttgtgtagtgaatccaggtccagggacagagctgttcctctgtatggtggaccctgaccctttgttttgtgccatggggcctttctgtgttgtgcttacatgagctggagctgctttatttttctttttttatacgattaatcccctgccgctgagtcc

SEQ ID NO: 15584 - DNA, 347 bp, Zea mays
  Clone ID: MRT4577_114212C.1
cgacccacgcgtccgcaccactccactcgcctcaagtttcttttttcttccgaggggatcggagcggggggtgctttcacattttgctggagcggaacatgcagctgcacccactacacttaagtccgcaccttcaatacaagctcttttacaagctcatcaaggacattgagggcacctgcaacgggcggaacgattttcttgaggcgatcacggctgttgaggacattggcaaggggctcatcctggaaggcacgggatacgtcaccttccacgtcaaataccattgcgttgaatttagacccttgaatggccagatcctacaatctgtcttcaccatggtgaac

SEQ ID NO: 15585 - DNA, 820 bp, Zea mays
  Clone ID: MRT4577_114213C.1
ccaaccagtcgagtctgctgccgctgctgtagacgttgattcggtcgagaaaggcccaggtacgacaccagaacagccggcgaagcgaagagcgaccaacgttcgacgaggacggagaagggtgttgcgaagcgcaacgagagaaggaagagcgacgtaggggggggatattgttgctgtatactaaatattaacggcccaaattaaaggggggccctagctaggttaactagagctatagcaatggctggccgtttccacgcgtacgagatgcgtagtgtgcatcatcaacctgtatccatgttgtattatcgtagtagtcgtaggccttacagtgaccacgcgtactggttagagttggtcgttcaggaccagttgctgcttgatttgtgtttcggtgtcaggatttggttaggtcctgtgtgtagtttgcgcagtcggaaagagactgttggtggttgtatttgcaggttgcaagcagacagtgttgtagccaccaggtacgtgtactgtgtagtaaatccagcgagagctgctcctctctgtatgatggacgctggtgtttcaggggatgtactcatgtaacccttgttttgtgctgtgctatatgggcctttctgtgtagtttgcgcagtcggaaagagactgttggtggttgtatttgcaggttgcaagcagacagtgttgtagccaccaggtacgtgtactgtgtagtaaatccagcgagagctgctcctctctgtatgatggacgctggtgtttcaggggatgtactcatgtaacccttgttttgtgctgtgctatatgggcctttctgtgt

SEQ ID NO: 15586 - DNA, 486 bp, Zea mays
  Clone ID: MRT4577_114214C.1
aaagcttcagagtatggatgcgccacgcgtccgggtcgagctgcttcggcgacagagagccgcttcggagcaagcagcaatggacgctaagcagaggcaaagttcgggtggcatgtggggttggctcgctggaagcccgacaccagcagtttagttccgtgattcatatattttacttgtaacattatatatcatttgactgacaccctctacaatttttttatttggttacttacggcattcgtgttcattttggacccacaaagaataaggtgttctagcgatcgttatactcacaattactcaaaatgtattctttaggtttagcaagggggtgttcatgttagtcgatgtgctggttatccttttgacgctgtgctggtttggttgtccatagattgttcgcttcacaaggggatgttcatgttagtcgatgacttttttgtgaaactgcagtttgatatatgaagtgcaagtatcgtgaac

SEQ ID NO: 15587 - DNA, 2477 bp, Zea mays
  Clone ID: MRT4577_114215C.1
aactgatggtattattgcgcgcccacgcgtccgcgaactcttcgtcgcctcacactggtgctctctctctccccatcgctccgccgcgcccatggcgtccctcttcggggctcgccgccggcgatcaccggaggacgacagcgaggacgatagatctggcagagggaggaccaagcgcttccgcctctccccggaggaggacgcggcgtcgccggcggaggcggggcccgcgccggcgacggagaccggctggctctccggtttcgtctacggagcgaagagggtcatttcttccgttttactgttctcctcgcccgaggagaccggctcgggggaggacgaggaagaggagaaggacgacgacgacgacgaagagggcatccacttgaatgaacatgaagctactcatgacactcatggagcaatagttccttatagcgagccaaagcttactattgagcaaatggttatgaaggaaacattctcaagggatgaatgtgataggatggtagagctaataaaatcaagagttagagattctactcctgaaacccatgagtatgtaaagcaagaagaaatcccaagtaggaatgcaggcattgcacatgacttcacaggaacatgccgctccttgagccgtgataggaatttcactgaatcggtcccattctctagtatgagaatgagacctggtcattcttctccaggctttccactccaagcatcacctcagctatgcactgcagcagttagggaagcaaaaaaatggttggaagagaaaaggcagggactgggcgtaaaacctgaagacaatggatcatgcacattaaatacagatatatttagttctcgtgatgactctgacaagggttctccagttgatttggcgaaatcatacatgcggtcattacctccttggcaatccccattcttaggccatcaaaagtttgacacatcaccctccaaatactctatctcgtcaacaaaggtaactacaaaggaggactacctttccagcttttggacaaaattggaggaatcacgaatagctcgcattggatcatctggagattctgctgttgcttctaaattatggaattatggttccaattccagattatttgagaatgacacttccatattctcattgggcaccgatgagaaagttggagatcctaccaaaactcataatggctctgggaaatttgcagcaacagaaccagttggtggatgctccttacctattacacccactgaagatagaactgatggtattactgagcctgtggaccttgcaaagaacaatgagaatgcaccccaagaataccaagctgcatctgaaattctccctgataaagttccagagggtaacgatgtgtcttccactggaattactaaggacactactggccatagtggagatgttaaagctcccacttcagaaccacatttaggggaaacacgtatcaactcagcatcagaatccataccaaatgatgcgggtcccccaacccagaacaaaaagaatgggtcgacaaccaagaaaacattagtaaacggtctcgtggaccaaccaaatgccaactccgggctagaatcttcaggaaacgataaccctagctacaccaactcgagcagtgctgtgccagtgccacccgcaagcacccaaccagtcgagtctgctgccgctgctgtagacgttgattcggtcgagaaaggcccaggtacgacaccagagcaaccggcgaagcgaagggcacccaacgttcgacgaggacagagaagggtgctgcgaagcgcaacgagagaaggaagagcgacgtaggggatattgtgttatagcgaattaaagggggcaacacatgatccctagctaggttaactagagctatagcaatgactggccgtttccacgtacgagatgcgtagtgtgcatcaaactgtatccatgttgtattatcgtagtagtcgtaggccttacagtgaccacgcttactggttagagttggtcgttcaggaccagtagctgcttgatttgggtttcggtgatcaggatttggttaggtcctgtgtgtagtttgcgcagtcggaaagagactgttggttgtattgcaggttgcaagcagacagtgttgtagccaccaggtagaaatccagcgagagctgctcctctctgtatcatggacgctggtgtttcaagcgatgtactcatgtacctttggtagtttgtgcagttggaaggagacagtttgttggttgtattgtattgcagcgcacagctagcaagtgttgttgtagccatcaggtacgtgttgtgtagtgaatccaggtccagggacagagctgttcctctgtatggtggaccctgaccctttgttttgtgccatggggcctttctgtgttgtgcttacatgagctggagctgctttaaaaaaaaatttttatacgattaatacgctgctgatgagttttttttt

SEQ ID NO: 15588 - DNA, 713 bp, Zea mays
  Clone ID: MRT4577_114216C.1
aattcggcacgaggcaccgctcggcctcctccaccacacgcgctcgcgctcggtgccctccccagcgcggcgccgaaatgcaggtggggcctcgtcggcttcccgcggctgcgacgggccggagcagctaacgccgcggcctggggctgtgatctggggccgcgccgcattgccgactgcctgccgccgggctcgcgcgcgcagttcctgcctgccggtggcgaggggaggcaagatgcggcatctcgctctcctcgcgcttcttctcgctcccgttctcttcgccacaaggaccactctgtccccttctccggccgccactgattctcctgcaaaccaaggacaggcttctagtcctcctcaatctgcatttgctcttggtccagtagctgttccaactgcgccgaccactccatcagcgagtccttccccggagaaagccgcggctgtaagtcctgctgctcccacggagccacgaattgccccggatccagtgactcctcctaaagagtatagtgcacctcctccagttgaggttgcacccactgatcccaccgatgaggtttctccaccagtagctcaaccacaagctgcagttggaaatcccactccaattctttctgggacacctgcattgctaccttatgttcaagctggtgctccatggggggggtgtggcgctgaagggcgcgtcggggggggggcctgggggg

SEQ ID NO: 15589 - DNA, 785 bp, Zea mays
  Clone ID: MRT4577_114217C.1
gcaaacctagcaataggggccttttttttttttttttatactaacccattcatcttgtttctagtagaaaagattaacattatatgggcgattacaaaagcacgaaaggaacaagcattgtagcacattaagcacatatatattcaattgaccgaataacaacacagagtaattagcaacactggatgaaacacagcacagtgctaccagtttgttccctctgattactcttcatcatacaaagaggcttcagaggcaatactctggccgctcagtcggtggagccagggccgggcgtcttggaccctattccgtacttctcctggagcctagtgatctcgtcctccttcttcttgacatccgacttcttggacatcttggcgggctggtagtagagcacgatgagatagcggttggcgacgttgaagccggagaggtggtcgacggcgttcttggcgtcgtatatgtcctcgtagacgacgtaggcggtgccgcgcgtgtccttggcgttgcccagccggatctgccgaatcgcgccgtacttgccgaagatgtcgtacatctcctcgctcgagatgttgaacggcagattccgcacgtacagcacccggttcacctcgggtgggaggcgcgcgttccccttccgcaggcccgccgctgccatcgccgccgtgccgagttcgcctagggtttggggattttggggtatgctttgctaatgcttggcctggccgcctcttctgtagttctccccggccggccgggtcccaatcgcccataggagt

SEQ ID NO: 15590 - DNA, 1297 bp, Zea mays
  unsure (1)..(1297): unsure at all n locations
  Clone ID: MRT4577_114218C.1
gggaccctcgaggccggccgggagaagcgagagagatccggagcagccgcagtcccaccgaccccgccgccggtcgccctccatctcctcgccgctgcctctcgtttctcttttcaataatcaagaaccgcagaagaggcggccaggccaagcattagcaaagcataccccaaaatctccaaaccctaggcgaactcggcacggcggcgatggcagcggcgggcctgcggaaggggaacgcgcgcctcccacccgaggtgaaccgggtgctgtacgtgcggaatctgccgttcaacatctcgagcaaggagatgtacgacatcttcggcaagtacggcgcgattcggcagatccggctgggcaacgccaaggacacgcgcggcaccgcctacgtcgtctacgaggacatatacgacgccaagaacgccgtcgaccacctctccggcttcaacgtcgccaaccgctacctcatcgtgctctactaccagcccgccaagatgtccaagaagtcggatatcaagaagaaggaggacgagatcactaggctccaggagaagtacggaatcgggtccaagacgcccggcccgggctccagcgactgagcggccagggtattgcctctgcagcctcttgtatgatgaagagcaatcaaaaggaacaaattggttgcgctgtgctgtgttacatccagcgtcgctaattactctgttgttattcaggctccataacaattgaatagatatgtgcttgtctaatcgccagcgataatgtttagcttctaccaaaaacaagaggaatgagtagtgtacacctcacacctgtggctatgcttgaattgttgatctatattctgttgtgagactgagagtagcatggttaggctgttaaatttgtgcttctattattggttagtatgtatctttgttttggtagctggtatgtgttatcgtaagctaaaagttcaagcagaatgaagtgggtgtgcttcttgccaaattaaatggattttcagaggctcccaaaaaaaaaaaaaaaaacccagctacccaggttctactttgtgatgttatcttgaactcctttgtgacgttgagcaattgtgcatattagtttgggattggactggtaaaaaaaaananaagnaaanaanaaaaaaagggcggccgctcttgctacaatgcttgttcctttcgtgcttttgtaatcgcccatataatgttaatcttttctactagaaacaagatgaatgggttagtatgtnnanaccntcaactggggctgntgnnccttcatattt

SEQ ID NO: 15591 - DNA, 390 bp, Zea mays
  Clone ID: MRT4577_114219C.1
aacattatcttctgtttttctttttaacatagatcaacttgaagcagatgtttaccctctatggctctaagacgactaactaacggtgcctgatctaagtcttggtcgaagtacctttggaccagccgcagggtacaggctaaacatctgcacagttatttcgtgaatggctacaaagcctccggccgcagaagaccgcctgctttcgttcaggcggcaaaaagaaccactcccagataggggctaggtccccatgaaagaaccccattttgcagagcttgcggtggggctctgtgcagtcattaaagagagtcccatcatacctgtatatttctcgacaagagccagaaaacgcgctcctcagaaggttttgtaacttggaaaataaat

SEQ ID NO: 15592 - DNA, 383 bp, Zea mays
  Clone ID: MRT4577_11421C.1
cggattgaccgactcgtcccacgcagtacgctcatgaagccctacactagatggagagaactgtccaaactaatgatcacctaccatggcaaggatttggaattgctcgtaacatccacaacagaacatattgtaagctatgttcatgagactagtccagaacgctctgatgatgcgctggacgactatcatccaggagctgtcaatcctttcgagcaacttgaactgttcataaaggtagactacgaggaatacgacaagcaatgctcactgcattaaagaaagcatagaaaggcgaaatcagctgacagtgctaggctattccatgcactgtcaaggtctacgagctggtgccaaactattgatccaaagtgatcacctgt

SEQ ID NO: 15593 - DNA, 1648 bp, Zea mays
  Clone ID: MRT4577_114220C.1
attgggacctcgaggcggcgggagtccccgaaaacagaaccatcgtacgggtgacgtggccaacacttccgtttttgttccggccaggcggctcgtgtccccgcagtcggcaggagcgcggacgcagatccgacggcctaggggcactccggggaggccacgcaacgcgcgcggcggcaggaccacggaggaggagataggcacacggcgtgccgcggtgggcgaccttttttgcaccgggagataaatcgacagcaccctgacctcaagtcctcaacccgcaggccgcagctgctcccgcccgccgcgcaagcggccaagcgccgccggttcttctcgagcaattctcataaatcattgtcctcataacttgtaatgggtggaagccagtatgatgatgactgggtgttgcccagtgccgatatcactcttgttctggttgggaaacttggctatggcaagagtgcaactggaaatagcatccttggacgggaagcatttgtatcagaatattcacatgccagtgttactaatacttgtcagttgggaagcactaccctgaaggacggccgcaccatcaatgttattgatacaccagggttatttgatatgagcattacatcggacgaggctggtaaagagattgttaaatgcatgaacatggctaaagatgggatacatgcagttctgatggttttttctgccacatctcggttttctcgagaggacgcaagtacagttgagaccattaaagtcttctttggtgaaaggattgtcgaccacatgattttagtcttcacttatggagatttagttggtgaatctaagttgaagaaaatgttaaataatgcgccagagtatttgcagaatgttgttgagctatgccaaaacagagtggttgtcttcgataacgtgactgaagaccgaaggctccaagcgcagcaacttgacaaattgctcgatgtagtggattcagtttgtgcaaaaaatggaggaaaaccattttcagatcaaatgttcactagcatcaaggaggtgcatgatagagaaaaagaggtgcatacctcgggatattcagatgagcagatatctgaattgaaaaaggagattcatagaactagggatgaacagcttgcgcacataaccaacatggtcgaggaaaagttaaactgcactgtggagaagttgcaacagcagctcatggaagaacagaacgcaaggctggaagctgagaaggtggcgtacgaagctaggctgaaatcagaagcggagatccagaagctcaaggagagcctcaagaaagctcaaatggaaaatgatgagttccggaggatggcgcagagccagggcagtaaatgtgctatcctataggcattagtacttgctagaaattggtggagctatcgtgctgacgcgtctcttgtacgtagtactttctctgttccaaaaatatatagttcaatacaccttagtagagatgactacgagagtatccaaacaagacctcgtcggacatgttagcctgaagcttgcttatggacatattggatatagtttttgggtgagaacttttgaacaaaaaaaaaaaaaaaaaagcggccgttctaatgtttttttctcctagctgtatgcgcacaaaaaacacacc

SEQ ID NO: 15594 - DNA, 498 bp, Zea mays
  Clone ID: MRT4577_114221C.1
atgaataatagtgagactgaagggccatcaaggccggggacttgctccttgttgatgggaaatggctcacatgtgcatgttattggtgttgatacacttaatatgaagcttactttaggaaagattgtgcagttgaaaaacatgcaacatgtatccaccataagaaagaatgttgttagtggatgtctactatgtagagatggatttaaattagtgtttaagtccaatacatgtgtactatctatgtttgatgacacatctagaaccattgaagaggcatattcatctcctattgctaactattggaaggaagtagtgaggagtgagatggattctgttaagtctaatggatgcaagtgggtattcaaaacaaagcttaggccgaatggtattactaaaaagtacaaggcaaggcttgtggctacggattataccttaaaagaacgagaagatttctttgagacttattcaccggttcctcgattggccacatattga

SEQ ID NO: 15595 - DNA, 741 bp, Zea mays
  Clone ID: MRT4577_114222C.1
aaacagaacactcgtacgggtgacgtggccacacttccgtttttgttccggccaggcggctcgtgtccccgcagtcggcaggagcgcggacgcagatccgacggcctaggggcactccggggaggccacgcaacgcgcgcggcggcaggcaagaactccgaagtcggcacggccgcacggccgctacgatacggcgccctcacaattgggccgttataaaacgtcacaggaggaggagataggcacacggcgtgccgcggtgggcgaccttttttgcaccgggagataaatcgacagcaccctgacctcaagtcctcaacccgcaggccgcagctgctcccgcccgccgcgcaagcggccaagcgccgccggttcttctcgagcaattctcataaatcattgtcctcataacttgtaatgggtggaagccagtatgatgatgactgggtgttgcccagtgccgatatcactcttgttctggttgggaaacttggctatggcaagagtgcaactggaaatagcatccttggacgggaagcatttgtatcagaatattcacatgccagtgttactaatacttgtcagttgggaagcactaccctgaaggacggccgcaccatcaatgttattgatacaccagggttatttgatatgagcattacatcggacgaggctggtaaagagaatgttaaatgcatgaacatggctaaagatggggatcatgcagttctgatgggtttt

SEQ ID NO: 15596 - DNA, 1473 bp, Zea mays
  unsure (1)..(1473): unsure at all n locations
  Clone ID: MRT4577_114223C.1
ccggtgttttttctgagttgtgaaccactacggcacgacgtcgtgccggcagctgctcctgcttccgatccgaacttctctcgcccgccggttcttcgcgagcaattcttataaagattaaagtcttctttggtgaaaagattgtcgaccacatgattttagtcaattcggccccagtgccgatatcactcttgttcttgttgggaaacttggctatggcaagagtgcaactggaaatagcatccttggacgggaagcatttgtatcagaatattcacatgccggtgttactaatacttgtcagctgggaagcactaccctgatggacggccggaccatcaatgttattgatacaccagggttatttgatatgagcattgcatcagacgatgctggtaaagagattgttaaatgtatgaacatggctaaagatgggatacatgcagttctaatggnnnnnactggcacatctcggttttctcgagaggacgcaagtacaattgagactattaaggtcttctttggagaaaagattgtcgaccacatggttttagtcttcacttatggtgatctagttggtgaatctaagttgaagaaaatgctaaataatgcgccagagtatttgcagaatgttgctgagctatgccaaaacagagtggttgtcttcgataacgtgactgaagaccgaaggctccaagcgcagcaacttgacaaattgctcgatgtagtggattcagtttgtgcnnnnntggaggaaaaccattttcagatcaaatgttcactagcatcaaggaggtgcatgatagagnnnnngaggtgcatacctcgggatattcagatgagcagatnnnnnnnnnnnnnnnnnngattcatagaactagggatgaacagcttgcgcacataaccaacatggtcgaggaaaagttaaactgcactgtggagaagttgcaacagcagctcatggaagaacagaacgcaaggctggaagctgagaaggtggcgtacgaagctaggctgaaatcagaagcggagatccagaagctcaaggagagcctcaagaaagctcaaatggaaaatgatgagttccggaggatggcgcagagccagggcagtaaatgtgctatcctataggcattagtacttgctagaaattggtggagctatcgtgctgacgcgtctcttgtacgtagtactttctctgttccaaaaatatatagttcaatacaccttagggcttgttcgtttattctaattccatgtgggatagagtgtattgaaatggtttgcgatggattttgacttgcgatgatttaaaccgactcaataccagccaatccacatggattaaccgtgaaacgaacaagcccttagtagagatgactacgagagtatccaaacaagacctcgtcggacatgttagcctgaagcttgcttatggacatattggatatagtttttgggtgagaacttttg

SEQ ID NO: 15597 - DNA, 1076 bp, Zea mays
  unsure (1)..(1076): unsure at all n locations
  Clone ID: MRT4577_114224C.1
cacttccgtttttgttccgtcccggcggctcgtgtccccgcagtcggcaggagcgcggacgcagatccgacggcctaggggcactccggggaggccacgcaacgcgcgcggcggcaggcaagaactccgaagtcggcacggccgcacggccgctacgatacggcgccctcacaattgggccgttataaaacgtcacaggaggaggagataggcacacggcgtgccgcggtgggcgaccttttttgcaccgggagataaatcgacagcaccctgacctcaagtcctcaacccgcaggccgcagctgctcccgcccgccgcgcaagcggccaagcgccgccggttcttctcgagcaagagtacatgacttttgagctaagtgtttttcgtgagttctcataaatcattgtcctcataacttgtaatgggtggaagccagtatgatgatgactgggtgttgcccagtgccgatatcactcttgttctggttgggaaacttggctatggcaagagtgcaactggaaatagcatccttggacgggaagcatttgtatcagaatattcacatgccagtgttactaatacttgtcagttgggaagcactaccctgaaggacggccgcaccatcaatgttattgatacaccagggttatttgatatgagcattacatcggacgaggctggtaaagagattgttaaatgcatgaacatggctaaagatgggatacatgcagttctgatggttttttctgccacatctcggttttctcgagaggacgcaagtacagttgagaccattaaagtcttctttggtgaaaagattgtcgaccacatgattttagtcttcacttatggagatttagttggtgaatctaagttgaagaaaatgttaaataatgcgccagagtatttgcagaatgttgttgagctatgcaaaaaaacagagtggttgtccttcgataacgtgactggaaagaccgaaggctccaagcgcagcaacttgaanaatttgctccgatggaaaggggaattcagtttgtgcaaaaaatggaggaaaaccatttttcagatcaaatgt

SEQ ID NO: 15598 - DNA, 328 bp, Zea mays
  Clone ID: MRT4577_114225C.1
ccggccgggactgtccttgagctctggattcccttcatatgtaaggtggtccttgtgccgtcaagatggtgtaacttcctctccccagtctctagccttgatctgtactagagccgagcacgcctggaaggcgtttccatgtctggaggaggattagttaggtttgtgtataagctttggagggttcctaccttcctgctattgtaataagttatgcactttgagtatatcaggacttgtaataaatgtaactcttcctatgcaataaacttcagttttagaaatgaaaagaatgttttagaaaaaaaaaaaaaaaaaatttgcggcc

SEQ ID NO: 15599 - DNA, 445 bp, Zea mays
  unsure (1)..(445): unsure at all n locations
  Clone ID: MRT4577_114226C.1
aagaaatatatgacattttgatttcaagttcttatggaaaatggcacaaaaataaataaaaaaaggtaaaaactcaaagagtttgagaatcaagagtgaaacaaaaagaaagcaagtagagatgctcactatatgaaactctctaaaaccttataattattcgaggatcgtcccaataactccagcaccaacagtctttcctccttttttgataacaaacctcattccttgttcacaagccaccggcacaataagctcaacaacaatctttactcgatcaccgggcataaccatcttcgactcttcatctttggcggtcatgaacttcgncactttacccgaacatcagtcgtcctcatgtaaaactgaggcctgtaccctgcaaaaaaggaaaaagccttccaccttcctcttttttcaacacctagataaattgcttcaaact

SEQ ID NO: 15600 - DNA, 202 bp, Zea mays
  Clone ID: MRT4577_114227C.1
attcggctcgaggccgcacctcctttttttcttgtaggcaatgtcaatagtcactggggggagtcatcaattgcttggccggccgagcgacgaggaaccacgccgcacagttgcagttacatgggcacggcgcgctgcttcttctgccgggcccgcagtcagaagtgcggctgctcccggccaggctcgacgcactcgtctc

SEQ ID NO: 15601 - DNA, 1747 bp, Zea mays
  Clone ID: MRT4577_114228C.1
cattgggtacctcgaggccggccggggtcccgctggtgtggtggcgtcctttttttccgccgggagataaaccgaccggacccctgactgcgacccgcagctgctcctgcttccgatccgaacttctctcgcccgccggttcttcgcgagcaattcttataaagcatcatcatcaccacttgtgatgggtggaagccagtacgatgatgaatgggtgttgcccagtgccgatatcactcttgttcttgttgggaaacttggctatggaaagagtgcaactggaaatagcatccttggacgggaagcatttgtatcagaatattcacattctggtgttactaatacttgtcagctgggaagcactaccctgatggacggccggaccatcaatgttattgatacaccagggttatttgatatgagcattgcatcagacgatgctggtaaagagattgttaaatgtatgaacatggctaaagatgggatacatgcagttctaatggtttttagtggcacatctcggttttctcgagaggatgcaagtacaattgagactattaaggtcttttttggagaaaagattgttgaccacatggttttagtttttacttatggtgatctagttggtgaatctaagttgaagaacatgctcaatgatgcgccagagtatttgcagaatgttgttgagctatgccaaaacagagttgtcgtcttcgataacaggaccaaggaccgaaggctccaagcgcagcaacttgacaaattgctctatgtagtggactcggtttgtgcaaacaatggaggaaaaccatttacagatcaaatgttcactcgcatcaaggaggtgcatgatagggaaaaagaggtgcataccttgggatattcagatgagcagatatctgagttgaaggaggagattcatagaactagggatgaacagcttgcacagataaccagcatggtcgaggaaaagctaaaccgcactgtggagaagctgcaacagcagctcatggaggaacagaacgcaaggctggaggccgagaaggtggcgcatgaagctatgcggaaatcagaagcgcagatccaggagctgaaggagagactcgagaaggctcgactggaaaacgaggagttccggaggatggcgcagagcagtaaatgtgctatcctatagtacttgctagaaaaactctgtgcggctatcgtgctgacgcgtctcttttttttttgtctgtagcaccttttttaaccgtttatttattacgcgacaactgttatgaagacactgctttgcttccgtaaaaaaaaaaaaaaagcggccccctcaagaaagctcaaatggaaaatgatgagttccggaggatggcgcagagccagggcagtaaatgtgctatcctataggcattagtacttgctagaaattggtggagctatcgtgctgacgcgtctcttgtacgtagtactttctctgttccaaaaatatatagttcaatacaccttagggcttgttcgtttattctaattccatgtggattagagtgtattgaaatggtttgcgatggattttgacttgcgatgatttaaaccgactcaataccagccaatccacatggattaaccgtgaaacgaacaagcccttagtaaagatgactacgagagtatccaaacaagacctcgtcggacatgttagcctgaagcttgcttatggacatattggataaagtttttgggtgagaacttttgtccc

SEQ ID NO: 15602 - DNA, 1876 bp, Zea mays
  unsure (1)..(1876): unsure at all n locations
  Clone ID: MRT4577_114229C.1
cacaatcacacaccaacatcttgcagtggaattttattaccaaattttacaagttacaacaagtttacattgtatttatcggagtggttacaaaagtggttcaaaggaataactttgnaatgttataaattatttatagttttgaaatatatgctagcttaagtgaccatccttaataagaagtatagaagnagttacttagacttataagaaggccgagcccaccggnacttagcaccatccatagcaacacacttctattttcggttcttccttcttctggggaaacacctttgnanaaaagtagcaaagctccgtaggctcttcacctaaaacaacatgggacaaagccctgagtatgaagtgtactttcgcaagtcttacccgactaaggaaaaagactctcaaggatatgctggatttaggaatcaaggagaggctcttagcaagaatcaacttagatgtttttgcagaaatagcttactaaagttgcagggcaacgatcaagtctccactctccggggatataacggcgatctgaatcgatttactcagctgaggatctctaaccacacgacatatgtagcacttaacccttgcatatgtcaaccattcccacagatcctccacaacgtgaaccggtccacgctacccgggagcacagtactcctccgtccagcctctagccaggagggtacacgctactcccaccatctcccacgcccagtgcgtgtttgtcttttcacgtatggaatagctgggttcaagcttaccatgtcccatatccagggcatgtggtcagttaagatagtccttgatcatgcaggcctacttacgcatccaatccttaattaacctgggtggagcatcacctgatccaatcccaagtctagagctaagtacttccacccttaggattgttttgtgttcctaaggatgaaaagagcattatggagaactttgcagtaagatcccaccatatgctcccaattaaaatattcttgcaggtagaaagtcatccttcctcaggataacccctgagctaggcattaatgcaaaagacaacctctatccacaagatctaagcagggctaagcatttttgtaaatcatattttgatacttcatcagaagtatctataaaggtatggatatcaaggtaggcaatgcatccaatagttttcaagcaactcctataaacctaatgcacatttcactagacttaaagtgtgcaaaaattatttaaaaaacacaaggaaggggttgcatgcaccggggcttgcctttgttgcagtgagaggtctagatccctctacaagctacccagttagatggctcctccacttgatctgcagccactggagtagattcctcttcagtcaccacttcagcttgaatcttcagtcctcgtgctgggagttctttgctgcagtgaagaggtctagatccctctacaagctacccagttagatggctcctccacttgatcagcagccactggagtagattcctcttcagtcaccacttcagcttgaatcttcagtcctcgtgctgggagttttatataagaagaccgagcccaccggcacttaacaccatcaacagcagcacaaaactataacctttgttgcagtgaagaggtctagatccctctacaagctacccagttagatggctcctccacttgatcagcagccccccccgtagattcctcttcagtcaccacttcagcttgaatcttcagtcctcgtgctgggagttctggtcacggcgaggtggactaactgctgacgatggtcaccacctagggactgggcaaactgggaaggggagatgtgaacactggtgtggacagaagatttaccaccctcacacac

SEQ ID NO: 15603 - DNA, 1256 bp, Zea mays
  Clone ID: MRT4577_11422C.1
gaaaaactgccaacgtttccaaaaaagaaagggaaaaaaccaaaagaacgggtgataaggctatggcaaatttaacggtctactttggggtaacccccccaccccccgcgttttattggccgctaaaaggggggttccatttcccatttaaggtgggcaaattttttgaaaggccattggtttgggccttttttgtattaagccaacttgggaaaaggggatttttttcaaagcgattaaatttgggaaacccagggtttttccaattcccacgtttttaaaagccggccagttaatttaattttggttaccctataaaaaaaatattacgttgcattcacgggtaagtaaactttgatcctttaaaagggcccccccttttttttttttttttttttttttttttttttttttttttttttttttttttttttttttttttttttttttttttttttttttttttttttttttttttttttttttttttttcatgcgtcaaaaaatcttaaaacacatggctacatcagtcatatcaggttgtacaagcaaaaattgatgagtctgtctcagcataataaatacagatgctcggaatgtgtaaagataacacagacttggcatggcatatagtcaaaatttcaaaacttgaaaggagcaacgtctcgaaacttctatcacacgtcatccggcatagataacaagctgaagcagcattatcaaacttgctctcatggtatgcatttaagtgctagatgattgaacccttcgacttaatcctcatcctcaacaaccttagttcccaaacctttgagaccctccggagggatctcagctactgtgaccagagagtactgcccctccttggcgtcttcctcgtcgttcctcttgcgggcaatcctgacacggactcgcctcggcacactccggataccgctgctccagacgtgcttgttgagcttcacatcgatccggacatcggtggtacccatggtcttctgggcgaacttcctgatctccttgatggcattcggtgccttcttcttgaaggtgcatccgtggaggcgcttgtggaggttgatggtgtactcgcgggtcaccacctcatccttgcgggtgccggtgccggcgccggcgccgcgcctcctctcggacatctccgctccgccgccggcagagcaccctcctttcttcttcgctcgggctagagggaggttgcggagtcgagatatcccggccggcctcgaggtacccaa

SEQ ID NO: 15604 - DNA, 1622 bp, Zea mays
  Clone ID: MRT4577_114230C.1
ataaaacattgttttcatttctaaaaatgaaggttattacataggaagagttacatttattacaagtcctgatatatataaagtgcataacttattacaatagcaggaaggtaggaaccctccaaagcttatacacaagcctaactaatcctcccccagtactggaaatgccgtccagcctccgaatcactttgagtactcctcaacacctacaacaacatgggttcgaaaaccctgagtacgaagtgtactttcgcagtcttacccgactaaggaaaaatgactctcaaggatatgctggttaaataggaatcaaggaaaaggctttagcaagaatcaacttagatacttctgcggaaatagcttattaaagtgagtccttactttcaatattttaacgccagattaaatattaatagactctggttgcatctagtctaatttcaccatctcatcaatacaacatcatttttattcataatgtttacatcctgacctaggttgcaggtcagagatcaagtctccacagttgaggatctctaaccacaccacatatgtagcacttaacccttgcatatgtcaacccgccaccggggttcttaagaccggatcaggttcacgcaaaccgagagcacagatacaccaccgtccagcctcttgccaaggagggtacacgctactctcgccaccgctccacgcccatttcgtgttatcttattccggccttagtctgcccgaggcaaagcttacccatgacgaggcatgtgaccagttaaagggtcctcgatcatcaagcctacatacgcatccaatccttaatcaacctgggtagaacatcacctgttccaagccccaagtctcgatttaagtatttccacccttaggattgtttgtgttccttaggatgaaaagagcatcaaagggaactttgcagtaagatcccaccatgctctcaatgaaaatattcttgcaggtagaaagtcatctttcctcaggataacccctgagctaggcattaatgcaaaagacaacctctatccacaagatctaagcagggctaagcatttttgaaaatcatattttgatacttcatcagaagtatctataaaggtatggatatcaaggaaggcaatgcatcaaagggttttcaagcaactcctataaacctaatgcacatttcactagacttaaagtgtgcaaaaattatttaaaaaacacaaggaaggggttgcatgcaccggggcttgcctttgttgcagtgaagaggtctagatccctctacaagctacccagttagatggctcctccacttgatcagcagccactggagtagattcctcttcagtcaccacttcagcttgaatcttcagtcctcgtgctgggagttctggtcacggcgaggtggactaactgctgacgatggtcaccacctagggactgggcaaacttgggaaggggagaggtgaacactggtgtggacagaagatttaccaccctcacacacgctgcaacctggctggagcttgaggatagggaggaaaagttccctggaccaagttttatagccacagattaaggacagatgtcactaaacctgtgcagtgcatggaggtgaagagttc

SEQ ID NO: 15605 - DNA, 489 bp, Zea mays
  Clone ID: MRT4577_114231C.1
cctcgactgtcattgagctctggattccctgcatatgtaaggtggtccttatgccgtcaagatggtgtaacttcctctccccagtctctagccttgatctgaactagagccgagcacgccagccctctccgtggtaaccattgtccacatcacagtggccagaactcctaccagaaggagtgaagattcaacctgaagtggtgactgaagaggaatctactccagtggctgctgatcaagtggaggatccatctaactggggtttaatagagggatcgagtacctcttcactgcaataaggtgatgaggagtactctagttgttcctgtggctggaaggcgtttccagttctggaggaggattagttaggattgtgtataagctttggagggctcctaccttcctgctattgtaataagttatgcactttgagtatatcaggacttgtaataaatgtaactcttcctatgcaataaacttcagttttag

SEQ ID NO: 15606 - DNA, 615 bp, Zea mays
  Clone ID: MRT4577_114232C.1
ttagaatttaattaattaattgataaattgtgattaggctaattgtattaaaggtgtataaatttgttgttttgtgatgttcgcgttaggttcggttaatctagagaagtgtaattattgcgcgtagtcatatattcataactagtgttttcgtacaaaattgtacaacgcctcgccgctaggtgtttaaattcgccatcgcgtagcactatttagggtttttgatattcctgtctatatgcattcatgtgcataatgcatttcattcaggtgcgataattaatcacgtgatgcgaaagatgactcaagtcgaccccaagcgcgggctaatccgcaggatgatgctgatggatggaccagaagatggataatctgaacgagtgccaagccaaaggatgctcgccaagtggtcgcctaacaacactaacctagtgttacccaggcaagccccggtgcatgcaaccccttccttgtgtttttaaataatttttacacactttaagtctagtgaaatgcgcattaggtttataggagttgcttggaaccctttgatgcattgtcttccttgatatccatacctttatagatacttatggtgaagtatcaaaatatgat

SEQ ID NO: 15607 - DNA, 626 bp, Zea mays
  Clone ID: MRT4577_114233C.1
ataaaacattcttttcatttctaaaactaaagtttattgcataggaagagttacatttattacaagtcctgatatactcaaagtgcataacttattacaatagcaggaaggtaggaaccctccaaagcttatacacaatcctaactaatcctcctccagaactggaaacgccttccagccacaggaactcctagaatactcctcatcacctttgttgcagtgaagaggtactcgatccctctattaaaccccagttagatggctcctccacttgatcagcagccactggagtagactcctcttcagtcaccacttcagcttgaatcttcactccttctggtaggagttctaaactttggtgctcacaaggaatcgaccggagaaagcgtgagttgttcggtcaacacagaggctgttcacggctccggtctgcggtggcgcaactccgttctgggtaacaaacttctcgagatgctctgaccacggcgaggtggaaggatggttgctgtggcaccagagtaccagacaatggaatggcacttgatgaactgaacaaaaccgacgcggaggctaaggagattgactcaggcctggaccacacctttcccagagatgcccaaggatcc

SEQ ID NO: 15608 - DNA, 667 bp, Zea mays
  Clone ID: MRT4577_114234C.1
ccggccgggatcgccgggaccgcgtgcgcgacgtcggcggtctggcacgacgcctgcttcctccggtactcggtccgcgacaccggccggttccgcgaggacgaacacacggagaccgtgttcaacgcgagccgcgcgctgtcgtcgttgccgccgcatgtcggcgccaacaaagcggcggtgaggcgcctactcgccgccgtcgtcgcggacagcacgaggagcggccacatgtgcagcgacatcggtgtaggcactggtgggacgactgcggcaggcggcggccggatctacgggctcacgcggtgcctcggcggtgcctcggccggatctacggatctacgggctcacgcggtgcctcgccgccgggatctcgtgcgccgactgccgccgctgcctcggcggcgctctcgcggtggtagagcgggagtacaacggcagcgcggggatgcaggtcctgcggctcagctgcatggccaggtacgagagctaccccttctacaacaccaagtccttggcccggcgatcgctggcgtcggcgatgatcgattacttccccttaaatgtatcatcatcctttcctgcgagtgtggggggtgtacaacccacaccagcgcctcctggcgggcgtaacccatcgccttgaccgcctgcacaagcacgagca

SEQ ID NO: 15609 - DNA, 409 bp, Zea mays
  Clone ID: MRT4577_114235C.1
aacaaaggcttcaacaccccaaaaaaagaattgttttatgaccaacggatggctgagggtttaccctcccaacccataagggggggtgggatccaaggtattacaaaaggggcatggccccaaaacccaaggtgaaaataaaggccccccgggggggggtgaaaaaccgggagggtgaatggtaccgggggccccgggggggaaccttaatgggggggggggcaaaacaccccaaggggcattttgcaccgggagtctccagaaagggggcttgtataagggccccttttcccaaaatttttttaaggattaagaaccaaaaatgttttccaaaaaaaaaatttgggcccagaaaagggattggggttaaaaacatggggggcctgggttttccccttaaatttagaaa

SEQ ID NO: 15610 - DNA, 1498 bp, Zea mays
  unsure (1)..(1498): unsure at all n locations
  Clone ID: MRT4577_114236C.1
cgaaagataatatttattacaagttctgatatactcaaagtgcataacttattacaaaagcaggaaggtagaaaccctccaaagcttatacataaacctagctagtcctcctccagaactggaaacgctctccagcctcacgaacagatcgagtacttctcatcacctacaacaacatgggttcgaaaactctgagtacggagtgtacttttgcaagtcttacccgactaaggaaaaagattctcaaggatatgctggttaaataggaatcaaggaaaaggctttagcaagaatcaacttagatacttttgcagaaatagcttactaaagtgagtccttactttcaatattttaacgccagattaaatattaatagaccctggttgcatctagtctaatttcaccatctcatcaatacaacattatttttattcataatgtttacatcctgacttaggttgcagggcagcgatcaagtctccactctctggggatataacggcgatccgaatcgatttactcagctgaggatctctaaccacacaacatatgttagcagttaacccttgcatatgtcaaccgttcccacagatcctccacaacgtgaactggtccgcgctacccgggagcatagtactcctccgtccagcctccagccaggagggtacacgctactcccaccatctcccacgcccagtgcgcggttgtcttttcacgtatggaatagccgggttcaagcttaccctgtcccatatccagggcatgtagccagttaagatagtccttgatcatacaggcctacataggcatccaatccttaattaacctgggtggagcatcacctgttcctagcccaagtctcgatttaagtatttccatccttaggattgttttgtgttccttgggatgagaagagcattacagggacctttgcagtaagatcccaccatgctcccaatgaaaatattcttgcaggtagaagccatccttcctcaggataacccctaagctaggcattattgcaaaagacaacctctatccacaagatctaagaagggctaagcatttttgtaaacaatatttgatacttccaaagaagtacctataacaggaatggatatcaaggtagtcaatgcatcaaatagtttccaagcaattcctataaacttaatgcacatttcactagacttaagtgtataaaagccttttttaaaaatacaaggaaggggtaaatgcaccggggcttgcctttgttgcagtgaagaggtactcgatccctctattaaaccccagttagatggctcctccacttgatcagcagccactggagtagactcctcttcagtcaccacttcagcttgaatcttcactccttctggtaggagttctaaactttggtgctcacaaggaatcgaccggagaaagcgtgagttgtcggtncaacacagaggctgtcaacggctccggtctgcggtggcgcaatnccgtnctgggtaac

SEQ ID NO: 15611 - DNA, 1806 bp, Zea mays
  unsure (1)..(1806): unsure at all n locations
  Clone ID: MRT4577_114237C.1
gaagagttacatttattacaagtcctgatatactcaaagtgcataacttattacaatagcaggaaggtaggaaccctctaaagcttatacacaatcctaactaatcctggctgcagaactggaaacgccttccagccacaggaactcctagaatactcctcatcacctacaacaacatgggttcaaaaaccctgagtacgaagtgtactttcgcaagtcttacccgactaaggaaaaatgactctcaaggatatgctggttaaataggaatcaagggaaaaggctttaacaagaatcaacttagatacttttgcagaaatagcttactaaagtgagtccttactttcaatattttaacaccagattaaatattaatagactctggttgcatctagtctaatttcaccatctcatcaatacaacgtcatttttactcataatgtttacatcctgacttaggttgtaggtcggatatcaagtctccactctccggggatataacggcgatccgaatcgatttactcatctgaggatctctaaccacacgacatatatttctcgtaactcttgcatatgtctaccattctcgcggatcctcctctgcatgaacaggtccgcgccacccgagagcacaccaccccttttaggcggtcctttgccaggagggtacgtgccactctcgccatctctccactcccagtgcgtgattgtcttttcatgtatggaatagccgggttcaagcttaccctgtcccatatccagggcatgtggctagttaagatagtccttgatcatacaggcctacatacgcatccaatccttaattaacctgggtggagcatcacctgttcctaacccaagtctcgagttaagtacttccacccttaggattgttttgtgttccttaggatgaaaagagcattatagggaactttgcagtaagatctcaccatgctcccaatgaatatattcttgtaggtagaagtcatccttcctcaggataacccctgagctaggcattattgcaaaagacaacctctatccacaagatctaagcagggctaagcatttttgtaaatcataattttgatacttcatcataagtatctataaaggtatggatatcaaggaaagcaatgcagcaaagggtttcaagcaattcctataaacttaatgcacatttcactagacttaaagtgtgcgaaaagtatttaaaaacacaaggaaaggggttgcatgcaccggggcttgccttcgttcacaggtgagtcgggttcggatccgcaaatatcgaagtagaagcagttgcctgcttgagaatccgaaggtggtggtgtcctgtcttcagttacttcgatctcttcttcacgttctaatcataaccatacataggtataagaatggatgccatgggatgctcatgaggatgcaaagataatataaacttattatctatgtcttcaatacaactttccttcacggaactccgagaacttagggtttccggagtcggtaaaggagttcaaagggcaggggggtggttttttgggttctagttatcaaacatggtccaaatcaactcaaatcctacccaaggcttctaaatatttctttaagttcccataaaaagtttgngcatttttagacttaccaattattttctaanaatccataactgatacttttaaccactttaaataccttaaaatttcttatttccactaaaaatcataaatctatttttactaaattctagggaaaataacaagcctaggaaaattagtttcacaattttagcatttttct

SEQ ID NO: 15612 - DNA, 343 bp, Zea mays
  Clone ID: MRT4577_114238C.1
ggccaagcaaaccatataaatgtgcctttgaactggacccggatcttatgggtgggtaaatctgtaacaaggtgacactctactagttttgctcctgtaataggtggaacgggcacacatatgaacgaatgaatcggagcttattagcctaatccacacttaacaaagagacataccaatataagaagtttgaaatagccatcagctcgattcaatcataaataatctatgtttaggctgacaggttttcatacaatcaaatgtactggaagtctcaatagacatgacggaaaggtttgatgggtactctgatattttctcacatgagaattatgaggaccaa

SEQ ID NO: 15613 - DNA, 473 bp, Zea mays
  unsure (1)..(473): unsure at all n locations
  Clone ID: MRT4577_114239C.1
ggaaaaacataattttccaggggtaaaaccctggtctcaatccttgggccaaaaaaattttaagggtttacaatttattgggcaatatactgaaactggaaaaatanaaaggggttgccctaacaaaaaatcggtttcagggaaccaaccctcacataagtttttgtacataaatttgtttacaaaaaaaagctgaaaaccccgttgggattattgaaaccaaaccaaaatgaatcccctccaaacaaaaatttggaatgccctggggggcgttgataaatttggggttcaaggaattgtttcatcccccccaaaacgaaacatccaaacttttttgggaaatggggctttttaaaatcccgcccgcaggggggaaaataacatcgtttattttttttggggaggggaacaaaccaggcctgaggggtttgccccacctttgggaagctcccatttgggacaaagctgccctt

SEQ ID NO: 15614 - DNA, 441 bp, Zea mays
  unsure (1)..(441): unsure at all n locations
  Clone ID: MRT4577_11423C.1
accaacagcnagggcgaggcccccnnccccccanccancccaggcgggcgncagcaccnnccagagcngccccanngccagaagagcaaagancaacaccaggnccaggggcagcagcagnagcggggcgaaggggncaccaccaccagccnnccagnnccagggcaggggggcgacnnncgcggcggacaccagccnccggcncgagcnggacgagaaccccgaggcgancancncgggggcgnggcccgggaaccgcncccnccncagcnacgacgacccccgcgccnaccncgagncgcaggagacggcggcccaggcagacgggcagcagcgcgggggggcgcnccngagcgagaccanggccacacccgggcngggggccacagcggaccagaccccgggggacgnggagggccacnnccgaggccgagggggggg

SEQ ID NO: 15615 - DNA, 1079 bp, Zea mays
  Clone ID: MRT4577_114240C.1
tttataaattatactacatctttataagtgattaaaatatttcatcaacacacagggcctactaatattctactcggtccactaattcagctaagtgatcggaatagcgcaataactcgctataactgaacctggctcaataatcgcaagaactgcaaagtcgacgagagtttcgtgactcacgcaatttatcgagcaactaatgagtatcacactagtacattaatttataacgatcgaaccattctaaacaatttatcagcttatcgtttccacatcagacacgaatccgcgagatcggtagcgattttccgatccaggcaatttatcgagcgcttagggaatatcacgctgctagcttcgtcttcacccgattcttgggttttcttgctgacgcgcggaacgacgatggtcctaattcaggcgttttgtcgagcactaagcaagtattgcacggcaagatgacgtcgaggcgaggatcaaagatggacaaccggcacggcgcgatggcagcttgaacagagacgagaccgacggcgaggtcgttgaagctggagggggagccgatggcgctggggcaagggggtgaggccgagcgccatggggcaagctggaggacgagctcgggcgtggagatagcagaggggcgagcaccacggccaggcgagctggaaacggctgggaacagggaggggctcgcagagaagaagggaacgcgatgctgggagcaggggcctcggctgggaggagctcgactggcggccatggacggagctctacttagaggagtagcgcgcggccacagggtgcttcgcgccgaagatggagaccgagcagggcgctcgcggcaggactggagccgagcgcgcgcacatgagaaatggagcagggagggcgcggccatgggcatcggcaccaggaaaactgagtgcgtgagccaaggaagaagcaggatcacgcagcggacttcgaacggcttggggttgaagtacacatcgatctcgctcgtgtcctccggtggcggcgcggggttggcatcgggctccggcttgaaggagaccagagagagaagcaagaag

SEQ ID NO: 15616 - DNA, 550 bp, Zea mays
  unsure (1)..(550): unsure at all n locations
  Clone ID: MRT4577_114241C.1
ttccgtcatcattcaaaagctgtctgggcaagtggtcaccttgagcaagcaaaagtttgcttctaatgtcattgagaaatgcgttggaatttggaactcatgaagaatgtgatagccttattggggaaatcatttcttctggtcaaacatttcaggagctgatgaaggatcagtttggtaactatgttgtacagaaagtccttgagacatgtgacgacaaatacctagagatgatcctctcgagcatcaaattgcacttgaatgaactgaagaactacacgtacgggaagcacatcgtagcacgtgtggagaagctaatcgttacaggagannnnnnnnnnnnnnnnnnnnnnnnnnnnnnnnnnnnnnnnnnnnnnnnnnnnnnnnnnnnnnnnnnnnnnnnnnnnnnnnnnnnnnnnnnnnnnnnnnnnnnnnaatacggactgcacactaatcccttgttaggcattggcgtcagatacgacgagcaggtggtataagtgactccggaggaatctggnnnnnaatacatggcttatttaatagggta

SEQ ID NO: 15617 - DNA, 1894 bp, Zea mays
  Clone ID: MRT4577_114242C.1
accactccctacccctagccgccactctctcttctccctttttcctctcacgcacagctcacttctctattcagcgcgcacacggctgcaagcagggagcagccgctcccatggatggcgcccaagcccttcttcttcctcaagccagcggcgccctcattcctccccgcgcagcgcccttttcttgtacctccagcagcaagaagccagcgcccctctccattttccccacgtctcttccctctgtttttcctgtacgtgcgcaggagcatggggcctcccatggcgccctcctccctggtctcccttgcgcagggcagccatggccgggctcccctggagcaggcgctcccagcagccatggctccctccctcggttgctcctcgctgcttcttttcccagggaactggcgcaggggacaactccatctctccccttggcgccaccttcaggcagggcagtagggagctttttcttccctgcgcgcaggagccccatggccgagctcgcccaagcctccatcgccgtcggcctcttggcacccgagatccactgcctctctaccccattccctctcccacgccacattttatctctgatctatggcacacggcagcagcagccatggcgtccattttttttctctgcgcagcgacgccgatccaaaagacagcagccccggattccctccgtgtcgcttgcatgccacccgctcgacatattgcgtagccacattgtggttgctcgttgtcaacaacgcgcagcccctctatttttcccgttggcgcagcagctccgacgtctccgcgcgactcgctgctttgtgctgcgcagtgaacagcacgccgtcgacgctcgccgagtgtccgctgttttgcttacccccaatatcgccgccgttcaccccggcgagaccacgacaattctgtggtaatggcacatcgacattattctccggtgattaattatgcatgtgctgcttgttttgctttgtggaggagacgaaccccgtgttttgcggggagaaggcaagtcgttcgacgctcgtcgacgttcgaagttatgcgcaaatcggaatcgccatcgtccttacaaacaccgattgggtttgtttatggaccgagagatgatgatcgagccagtgatgtggtgccaaccacaagatgccgtggtggacgacctgaagaatggacttaactagtggatgctcgccaagcgagtacccccccagcaaacactatctaagtgttaaattaaagacaagccccggttttatgcataaccgtttatatatgctattttactacaattaatgtttgtaggtttgtactgtgcacttaagtgtaagagttgactgaaaccctagttgcatgaactcaggattcctttttgagatggatactagcatgctaggtcgagtagctgctttattaattagggatctcggtagaagtcgagtgatttttctagcactcgcgcgaggtcaggacattgattgtacccactttcatatcatactgatgttggtctgtggacacggattcatggggatgcgtggtctacgagatgaaattggaataaggattaacgtgcggatacctgtgtcaagcgtttgaacgtactaaacacataccgagaaatatggtaaatcggtaagcctagtacctgattgaacctgccagcagacatatcccctcaggcgacctgagacgtggtctcccattccggttatggtgggtacaagtgcggtcactgcacgacggcagtcggggtcagtgaggcattgtacgccaaggcggtgagccctgatctgttgccagggaatcgatggggatggttgatgtgtgtggggacggagtgcctcgccacgtcgtgtgttaaaacctttaatct

SEQ ID NO: 15618 - DNA, 427 bp, Zea mays
  unsure (1)..(427): unsure at all n locations
  Clone ID: MRT4577_114243C.1
accaagcaaagcattgaagngtacaagcaggaacacagnctagcaattcaagataacaatgggattctgcaggaagtagattgtaaggggtaaagactgaaggaggacagccaggtgagctcgcttagataggaattacactaaaaggcttaaataattaaactgactcttcatgtgtttgaattggtacattaagatcattgaactgtcagatggtaagatctcaagattatttctatgatactcttcatgtgtttgatgccaaagatgagcatgttatagggcatttccacttacttggatggtaaagaagactctcctacaaattgaaatgcacatacttcgggcttcacgacaactggactggacaggtgtctgcacgcttcagtggaagcagttgaagccccatatatcacagagctcatgc

SEQ ID NO: 15619 - DNA, 399 bp, Zea mays
  Clone ID: MRT4577_114244C.1
agccagctcaggagccgagcctgggcagggtagcacaagcccatccaggtcctctatcggcagtattctccctccgtacgcgctgctgaaagggatggcaaggcgtatgatgcgccctacatctgatctacctatgcggctacaactgagtgcgattcttcagatgggcgcaagagctgtactacgcagtcctgacgctacgtttgatctggcacaaggtacaggtatagctcccgtcgagaggacactgtagttatcgcagacagacgacatcatggacatagatcatgggctcgtaaggtaggtgaggtctcaagaatgtgcaaattttaaacagattgaatccaagttgtaccttacatagggtgatttgtggagttctcttgagaccaaatgaca

SEQ ID NO: 15620 - DNA, 409 bp, Zea mays
  Clone ID: MRT4577_114245C.1
acccttccgaacaacctaagggcgggcccggaacaccggtacaccgtcccggcctaaacacttgaaaaagggaaaaccaccccaccggcttggccaccattcccgtattccttgcaacaatcctcgtcgccgttctcctggccgttggtagacctgcttgtttgggggccaccgcaaccgacaccaacaccgacggggccattcgtttcccaagaagttttgttcctgttggccaaccggggaagtgctgtaactatgtaaccaaggagccgttattaaggccgccccgttggccctgaaccaccttgttgaccaagtgctccgccaactgccaaaagtgcaagaagtccccggccggcaacggtttcttttgccgggactggatcttaagcctgttcaagcccccggt

SEQ ID NO: 15621 - DNA, 233 bp, Zea mays
  unsure (1)..(233): unsure at all n locations
  Clone ID: MRT4577_114246C.1
tgaggcacagatgtagtcttgaacggtatcatgtatntgaagttgctgatcgtcatagcatgtgcatcatgcagacagacacgatgtgttgtagatcgatctatacgtgacgaatgatggacagtggacctgcatcgantatgagtgatgtgtcatgtaagtgacatgtagactatancggatcactatagatctgatcatgattgtgcagctatgtatgagaaactgacgtg

SEQ ID NO: 15622 - DNA, 547 bp, Zea mays
  Clone ID: MRT4577_114247C.1
aaaaccttaacatttccatagacacctataacaaccacatagtttactattaactgatttccataaagcacacaaggtaaaatgactaactaaaaactatatacttttagcatcacctatccaagaggcaagttgcaggctttaaataaaaatcaatggtggtgaattagtcattaatatcccaccaagaccctacaatgtctaaccatctattacaattgaatttagaaagtcataataactaaatagtattaacctctccgtgaacacatatatcaatcacataaatctactataatcctttttcgtttaagtataaaaggtagaatgactaacaaaaactaaacttcttgcaccagtcatccaagaggcaagttgaaggttatgagtagcaatcaatggtgctcgatttgttataaatagcctaacaagaacctacaatgtctaataaaaaactcgacctgcggggtaagaccgtccccgagtattgtattaagaagaagacctcacacaagtcgagaaaatccccgaacccccgacagcaacg

SEQ ID NO: 15623 - DNA, 196 bp, Zea mays
  Clone ID: MRT4577_114248C.1
gaggagcacaggaagctcctgtacgggctaaggcatctggacaaggctcacgtggatgtcatcttcaaaggcttcgtcaccaccacgacatccacccatgtggccagccacccccagaaatactttctattgcagacccacccccggatgaaaaaacgcccttctagcctattctacttttgtatcacagactaca

SEQ ID NO: 15624 - DNA, 272 bp, Zea mays
  Clone ID: MRT4577_114249C.1
cggacgcgtgggctggtgctccgcctcaggggtggtatgcagatttttgtgaagacattgactggcaagaccatcaccttgggaggggagtcgtctgccccaatcatattgcaaaacccaaaatccaggccagggagggctttcaaccgaaccagcagcgcctgttctttgtggcaagcaacttgaggatgggcgtacccttggcgacttccacattcaaaaggagagcacccttcacctggtgctccgcttgcgaggtggtatgcaaatct

SEQ ID NO: 15625 - DNA, 671 bp, Zea mays
  Clone ID: MRT4577_11424C.1
cccagcgtccggcgcacccagtacgatctgacgctcatcccacatcagtagtcgaccaagcacaagcagcagagccggccggaatatgtggacgatcaggaaggtggcgacgccgcaggtggccgtcctcctgctgctcctcatcgtcgttgcgcaggaggcggcgccgttggcggaggcgcgcgtgtgccggcgccggagcgcgggcttcaagggggtctgcatgtccgaccacaactgcgcgcaggtgtgcttgcaggaaggctacggcggcggcaactgcgacggcatcatgcgccagtgcaagtgcatcagggagtgctagctagctagcagctataccggcctttaattaaattaataaggatcgacgtcgcggtcggtcgctaaatatgtactactatacgtctacactacatgcaataatgcaccacatgtacgcgtacgcgcgccgagctgtgtggacgccgcagctagcacggccatcgttcctatacatcgtcgtctgtcgttcgagtactcatgagctgcgtcgtcgtcgtccacccatgcatcccatccgccaaactttgatgatggtcatatgacatcttgacaataaacacgtgcatgcagtattatatccaaaaaaaaaaaaaaaaaaaaaaaaaaaaaaacaaaaaaaccccccc

SEQ ID NO: 15626 - DNA, 184 bp, Zea mays
  Clone ID: MRT4577_114250C.1
gggggaacacacttgacaaacaaagggggggaattcccccagatgaaacaaaggtcaaacttgcttggaggaaccaaggggttcaataaaggaacaaaccctcaacaagggattcccaagacacccggtacggactaaaaagtacaaaggtgtggaaaagaaaaaggggttaaaaaacaaaaat

SEQ ID NO: 15627 - DNA, 368 bp, Zea mays
  Clone ID: MRT4577_114251C.1
cggacgcgtgggctttcgttggcaacccaggcctgtgtggaccatacctcggtccatgcagtgcaggcattcctggggcagaccatactgcccatggccatggtgagctgaccaattcggtcaagctgctcattgtgctcggcttgttgatttgctccattgcatttgctgctgcggcaattctgaaggctcggtcattgaagaaagctagtgaagcgcgagtatggaaactcactgcattccagcgcctggacttcaccagtgatgatgtgctggattgcttgaaagaggagaacattattggcaaaggtggtgctgggattgtgtataagggggcaatgccgaatggtgaacttgtggctgtgaag

SEQ ID NO: 15628 - DNA, 454 bp, Zea mays
  Clone ID: MRT4577_114252C.1
acaaaaaaagggggcttaaaattttttttggttcacacgacaaccctgataggaaaaattaaacaatggttcactcaaaaacaaaataaactgtaaagccaaacccacacaaacgataaaaccttttatgatggggcactccaatttcccccaaaaaaaagcaattacttaaacccaccaggatgttccttttgaattttaacaacctgtttcaaagtttagggcttaaaaagctttttgtaccacttggccaagttttttttgtaaagaaaaaacttcctttctttttgggggttaaaaatttaatgcaagttcgggaggggggaaaagtcccccaaggtaaactcttccccagccaagtactcgttcctaaaaaaattttgtcgaaaaataaaggacctgcttaaacttatccttgttttcgggaatcacgggagggtccttacaaaccccc

SEQ ID NO: 15629 - DNA, 335 bp, Zea mays
  Clone ID: MRT4577_114253C.1
gcagccgaccgtatttggtttacactcttctaagcgagcgaaagcttctttggttggtacaaaacaagaaggtcttagattggacagacacacgttttcccacctgaccaaagcatagtccgtcggtgctcctctgttgaagcgttgatacactttatactgcaacagggtgcttccaaaaatctgactctcatggaatggaatatactctggactatcccaagaagatattgctccagtggcgcaaggcgtactgctgcgctaaaacaccagcgtgtcatctttactcctactaatgggccataggagccatatactcgacctctaccaagaca

SEQ ID NO: 15630 - DNA, 165 bp, Zea mays
  unsure (1)..(165): unsure at all n locations
  Clone ID: MRT4577_114254C.1
ccgggccggaatttcaggggagacccaagcctccgcagacaaaggcgcgcaaccaggcaggcacagaggccacncagacggccgaaggcgccgcgacggcggcaccgaccgtctgtgcggncaaatctccggcgagcacaacgaccacaaggaaacacgattgca

SEQ ID NO: 15631 - DNA, 589 bp, Zea mays
  Clone ID: MRT4577_114255C.1
ccggccgggaaacatgcatgcgatctcggtcgcgacacgctatcttgcctgcttgcaccgaaggaggacccaccattggcttggagctgcagcatgatggccacgagcgctcgtcactactagcagcagccgacagtacagcctactgtgcggcgctgtgggcatacttggagtccacgggcgggggcatccagtctacatggcgcgctgctgaaagcacacttcctaccgtcgacaacctgacccaccggagcgaggcaagcgtgcgcggcacacgatacatgtctagttgctgcgttgccgaaccaccccgtgcaaaatgcgcggaaagatgacaagcatcttgaacaaacactggttcaagaatgagcgcgacccgaccatactgaacgactccttgccgaacgacacggtggagagggacactgccaccgacgaggccgtgggcatatacatacctgaacaacgccaaggaactcaagcacagaagtgcgtgagcacatcaagcgggagatgtgcacgattaagctgattaagcaccataacacgccgtcgcatatacagaggtggatcgggacctagaacaaag

SEQ ID NO: 15632 - DNA, 310 bp, Zea mays
  Clone ID: MRT4577_114256C.1
cccacgcgtccgctcaggagagtggggtaattcatgaagaagttcctaagcctactgtgtgaagctcccagagaaaatggtactcccatcgaactcgaaagcagggacacaaacattactggaatcaacaatgaggttaaaatgtggtattatcagactttacataactgctatgtttggatatgtccaaaaaaaaaataaggttctattgcttaagactcttctttctgctttaatagctatattttacctttagctatgcttaataatataaatttcaatttgttttggggggggcggttataaggat

SEQ ID NO: 15633 - DNA, 432 bp, Zea mays
  Clone ID: MRT4577_114257C.1
ccacgcgtacgatgacccttgttctttttcctactccatacgcacgcccggaagaggaagcccacgcttactggctactacaagcctaggactaacacatctagatgctatcatacacaacaatcaatgcatgtgagctgcgaaaaataattagcaatattagcatgaaactacacgataggccttaaggacaaaaatcaccattgcacctgggaccggtccagcaccctttcgtgaataattgcaccaaatacttgctgattacaaatgtagatccttgcttgtgcgatctgaggagccttctactatcacaaacacaaagatggactctatctataagatcgagcctaacaaatccgctgctgttaatacactggttcatccttttattgcataaacacctcaacaaactcgttatgcatctttacttga

SEQ ID NO: 15634 - DNA, 577 bp, Zea mays
  unsure (1)..(577): unsure at all n locations
  Clone ID: MRT4577_114258C.1
cgggggctacatagcaagctccttctctgctaaccgagcgagagcagctgtagcctacactctacagctagcgcanactaacgaccatccacctgaaanaggtaagttacaagtctgctgaatgatgcgtcgtctgtctctgaattttctgaaatgcatggtttctcatatacgcgggcatgggcatgggcttgcgcatgccatccctggcaatgcaacagccagcaatccatcaggatagcattgttcatagtgttcatttaggattctgtgcattgtttttctctcctttagaaatgtttgctttaagtatggtgggatgaagccgctccacttctaatttgttgttgtttagattgattccacatagaatagagtggctctaaaagggaaaaattatgttcaaatgttaaaaaatttagcttcccagaatcaccccgatgaagccgatccatcctaactagctccagaactaaacactactatagtgcggcaatgggaaggaagcacccccacagaatttgttgctgttgataccgttcatactcctaatatgcatatgggtatgggtttcaac

SEQ ID NO: 15635 - DNA, 648 bp, Zea mays
  Clone ID: MRT4577_114259C.1
atgttccttgaggagaggcaactgcacggcgatttcgtcaccaagatctctgacatggtctggaggaggaatggcggcaatgttgatgcggttgaggcgaccacagaccaaggcaatgctgtagatgttgctcagcctgaagacgtgcgggaagatgttgtggacgacggaatgttgagactagcggcaaccagaggttgggtgcccggtgacagcagccctcctttgagcaagaggctttcagctaagctcaaggatgaattgctgctcttgaccacagggattggagcagcatgtagtttatactgtctcctggttttctctctcgagactgctgtcagttatgctttgggggttggtttcagaattggcattacaagtgaagatttgaagaatacaatagagaagacattgggtggtggaagagtagctctttcatccccaaggcttgtgattcctgccgtgatttttggattgtcagctttatcagaccacttcaaaaatagttttttcagttttgaggttcttccagggatgatgggtttcctcgcatacaaggctgcagctttggttcaggtctacagagataacgaggatctccgcttgatacttcctgaggaagaggatgctgacagtgaaagcacttga

SEQ ID NO: 15636 - DNA, 600 bp, Zea mays
  Clone ID: MRT4577_11425C.1
taccctcgaggccggccgggagcatacgatctgacgctcatcccacatcagtagtcgaccaagcacaagcagcagagccggccggaatatgtggacgatcaggaaggtggcgacgccgcaggtggccgtcctcctgctgctcctcatcgtcgttgcgcaggaggcggcgccgttggcggaggcgcgcgtgtgccggcgccggagcgcgggcttcaagggggtctgcatgtccgaccacaactgcgcgcaggtgtgcttgcaggagggctacggcggcggcaactgtgacggcatcatgcgccagtgcaagtgcatcagggagtgctagctagctatatataccggcctttaattaaattaataaggatcgacgtcgcggtcgatctcggtcgctaaatatgtactactatacgtctacactacatgcaataatgcaccacatgtacgcgtacgcgcgccgagctagcacggccatcgttcctacgtcgtcgtctgtcgttcgagtactcatgagctgtgtcgtcgacgtccacccatgctccgccacgctttgatgatgatcatatgacatcttgacaataaacacgtgcatgcagtagg

SEQ ID NO: 15637 - DNA, 249 bp, Zea mays
  Clone ID: MRT4577_114260C.1
gatgtatccggcatatgcaaatggccctggatatgttatatcatctgatattgctgattttgtcatgtcaaaattcatgaagcaaaagctgacggtacaatcttatattttcctcttgagaaaatatcctccatagaatggtcacaacaaaaaggcattccatgcttcttttttttacatttcacaaaagtgccgtctgaatgtcagacacttgtcaaacagcactttgaataacaaattgccaaaatg

SEQ ID NO: 15638 - DNA, 576 bp, Zea mays
  Clone ID: MRT4577_114261C.1
ggataaaggcctaaattattattattaaaatgaaattcaattctaatgatccaaacggggggtaaaaaattttttttcaaaactgaagcatgactcagtaaatcagactgttctgtttttatcaacaggttaacataatctctaatttgtatgcatcaagggctttcacgggcagcatcctcttcctcatgaagtatcaagcggagatcctcgttatctttgtaaacctgaaccaaagctgcaaccttgtatgcgaggaaacccatcatccttggaaaaacttcttcactttcttttttaaaaaaacttggggaatatcttgctttgataggttatcagcatgttgacacaaaagttgaagatacaagcagctgaaaccaacccccaaagcataactcacatcggtctcaagagagaaaaccaggagacaatataaactacatgctgctccaatccctgtggtcaaaagcagcaattcatccttgagggcttcatatttcaaaagattcagctccttccttttggcgctctcattctgccaattcttagctgaaagcctcttgctcaaaggagggc

SEQ ID NO: 15639 - DNA, 857 bp, Zea mays
  Clone ID: MRT4577_114262C.1
cattgggtacctcgaggccggccgggagcttcaatccgccatggccatggggctccccggcctccgctgccaccgcctcctcgctcgcgggtcactccctccactcggtcccgccctctatcgcaggcccctggagcgaacctcggctctctgctactcctccctccaagctcaagctggggacggtattggggaggaggccctgcgcatgttccttgaggacaggcaactgcacggcgatttcatcaccaagatctttgacatggtctggaggaggaatggcgccaatgttggtgcggctgaggcgaccacaggccaagggagtgcaatagatgttgctcagcctgaagacgtgcgggaagatgttgtggacgagggaatgttgagactagcggcgattagtgattgggtgtccggtgacagcagccctcctttaagcaagaggctttctactgaggaaaggcagaacgagagcaacaaaaggaaggagctgaatcttttgaaatatgaagcagaactggagcagcatgtagtttatattgtctcctggttttctctctggagactgctgtcagttatgctttgggggttggttctagttgcttgtatcttcaacttctgtatcaacttgctgataacctatcaaaggaagatattccagaagtttttctaaagaagaaagtgaagaagtaggtttcaagattccacccgcagtctgtatcccattatttggttcctcgcattttgattgtttaaagtaatatgactatttatgcaaatgctagaattggcatttacaagtgagatttgagaaatacatagagaagacttttagtgtgcaggactagctctttcat

SEQ ID NO: 15640 - DNA, 604 bp, Zea mays
  Clone ID: MRT4577_114263C.1
cgctctcgcggcgtcgctttcgccggacaccaccacctgccgctttcccctcccaccaccgctcccatcctcgccccgcccggaccccagcgccccgattggggcatccatccgcctccgcctgattggccccgggcaccagctcgctcgcacgcacgcagcatttgattccctcccgcactgtctccctccctctctcccggacgagcgcggcgcacctgcgaggagacgacgccgggtcccggtcacgcggcggccctcttccgtgccgtactctcatgatgtaccatgctaagaagttttctgtgccctttgcaccacagagggctcagaatagtgagcatgtaagtaatattggagctttcagtgggtccaacataagcaaccctactaatcctgtagggagtgggaaacaacggctgagatggacctctgatctccatagtcgttttgtggatgcaatcgcccaacttggtggaccagatagagcaacacctaaaggagtactcactgtaatgggtgtgccagggattacaatttatcacgtgaagagccatttgcagaagtatcgccttgcaaagtacataccagaatcgcctgctga

SEQ ID NO: 15641 - DNA, 1204 bp, Zea mays
  Clone ID: MRT4577_114264C.1
ccgagtttggtggattgtgtcgagagagtcagagaggggcaccaaagccggctacgggcagtccccagtcagcctagcttcgctcgctgttcgttcgtcctgatagcttgaaaccgccatggccatggggctccccggccaccgctgctgccgccttcccgctctcgggtcggtcactccactctgtcccgccctcgctcgcaggcccctcccgcggacctcggctcttcgctactcctccctcgaagcccaagctggggacactattggggaggaggtcctgtgcatgttccttgagcagaggcaactgcacagcgatttcgtcaccaagatctctgacatggcctggaggaggaatggcggcaattgatgcggttgaggcgaccacggaccaaggcagtgctgtagatgttgcttagcctgaagacgtgcgggaagatgttgtggacgaggcaatgttgagactagcggcaaccagaggttgggtgcccggtgacagcagccctcctttgagcaagaggctttcagctaaggattggcaaaatgagagcgacaaaaggaaggagctgaatcttttgaaatatgaagtgctcaaggatgaattgctgctcttgaccacagggattggagcagcatgtagtttatattgtctcctggttttctctctcgagctgaagttttaacaagtgcttcaagtattctgaaacttgttgctccatgtggaatagctgcttgtatcttcaacttccgtgtcaacatgatgataacctatcaaagcaagatattccacaagtttttctaaagaagaaagtgaagaaaattggcattacaagtgaagatttgaagaatacaatagagaagacattgggtggtggaggagtagctctttcatacccaaggcttgtgattcctgccgtgatttttggattgtcagctttatcagaccacttcaaaaatagttttttcagtttggaggttcttccagggatgatgggtttcctcgcatacaaggctgcagctttggttcaggtctacagagataacgaggatctccgcttgatacttcctgaggaagaggatgctgacagtgaaagcacttgatgcatacaaattagagattatgttaacctgttgataaaaacagaacggtctgatttactgagtcatgcttcagttctgaaaaaaaatctcttaaggatatcct

SEQ ID NO: 15642 - DNA, 619 bp, Zea mays
  Clone ID: MRT4577_114265C.1
aagcgctccgctctcgcggcgtcgctttcgccggacaccaccacctgccgctttcccctcccattcccaccaccaccgctcccatcctcgccccgcccggaccccgccccgattgggccatccatccgcctccgcctgattggccccggccaccagctcgcagcctcgcacgcttgcacgcacgcagcatttgattccctccctctctccccgacgagcgcggcgcacctgcgaggagacgacgccgggtcccgctcgcggcggcgctcttccgtgccgtactctcatgatgtaccatgctaagaagttttctgtgccctttgcaccacagagggctcagaatagtgagcatgtgagtaatattggagctttcggtggatccaacataagcaaccctgccaatcctgtagggagtgggaaacaacgtctaagatggacctctgatcttcatagtcgttttgtggatgcaatcgcccaacttggtggaccagatagagcaacacctaaaggactactgactgtaatgggtgtaccggggattacaatttatcacgagaagagccatttgcagaagtatcgccttgtcaagtacataacacaatcgcctgctgaaggttcc

SEQ ID NO: 15643 - DNA, 1519 bp, Zea mays
  Clone ID: MRT4577_114266C.1
cccacgtggccgcacactgaacccgcagtgggtacgagaaggacggccggccagtttagcctagccacgctcgctctacgtcctcaatcctgattagcttcaaaccgccatggccatggggctccccggcctccgctgccaccgcctcctcgctcgcgggtcactccctccactcggtcccgccctctatcgcaggcccctggagcgaacctcggctctccgctactcctccctccaagctcaagctggggacagtattggggaggaggccctgcgcatgttccttgaggagaggcaactgcacggcgatttcgtcaccaagatctctgacatggtctggaggaggaatggcgccaatgttggtgcggctgaggcgaccacaggccaagggagtgcaatagatgttgctcagcctgaagacgtgcgggaagatgttgtggacgagggaatgttgagactagcggcgattagtgattgggtgtccggtgacagcagccctcctttaagcaagaggctttctgctgaggaaaggcagaacgagagcaacaaaaggaaggagctgaatcttttgaaatatgaagcactcaaggatgaattgctgctcttgaccgcaggaactggagcagcatgtagtttatattgtctcctggttttctctctggagactgctgtcagttatgctttgggggttggttttagttgcttgtatcttcaacttctgtatcaacatgctgataacctatcaaaggaagatattccagaagtttttctaaagaagaaagtgaagaaaattggcattacaagtgaagatttgaagaatacaatagagaagacattgggtggtgcaggactagctctttcatctccaaggcttatgattcctgccgtgatttatggattgtcagctttatcacatcacttccaaaatagctttttcagttttgaggttcttccagggatgatgggtttcctcgcgtacaaggctgcagctttggttcaagtctacagagataacgaggacctccgcttgatacttcctgatgaagaggccgctgacagtgacagcacttgatgtatacaaattagagattatgttaacctagtggttgttgacaaatacaaaacagatctgttcaccaccgagtcaagcttcacttttgaacttttttttgtctttaggagatcctgaaattcgtttgcttatcttcttggaaggggggaaacaggaagagttgaatgaaaaatcattatatgttagagacagctgaaactcaaaggaacacacattttttttgtccttgggtaactatttttccccaaaaaaaaaaaaaaaaaaaaaaaaaaaaaaaaaaaaaaaaaaaaaaaaaaaaaaaaaaaaaaaaaaaaagaggtacccaagtaagcaagctctcttcacagcttaggagatttttactcatgatttcagctgaagttttaacaagtgctttgagtattctgaaacttgtcgctctatattgaggaggtgcttgtatcttta

SEQ ID NO: 15644 - DNA, 335 bp, Zea mays
  Clone ID: MRT4577_114267C.1
ataaaccgaacgtactttttttatgatctatttttacatttgggacagggaaactacatttggtgcaacattaatccaatttacagctgataaatgtaaatggacaggaacagaaaaatattaattttattacggatagggagggtactgataaactatacataaggtggcacataaaacaacactgatggcaaaaataaaaaaccaatgctaggctgaataattgtcttcctaacagctacacattaaaagtcaggggctcttaaaaaacaaaaaatggggcgaaatgtgatcgttcacgaacgtaatcgatgaaatagtacgagtgggcatat

SEQ ID NO: 15645 - DNA, 1303 bp, Zea mays
  Clone ID: MRT4577_114268C.1
ccttttggggaataggttctcccacgctggaccggccggggcttatttccccgtctcagtgtctccttcttgtcgggcccccctccttttttttttttttttttgcagcatcatgtctagatttgtcgttgaagacttgaagtttaagagttcagaggtgcgctgaatgtaaacgcagggggagcgtactgtagcatctttcacataaataatatctatagaatacatatgagatgcagctgcatgttcaacatcacacgaacgacgactgttgaaaatcttcaaagaacgcgccggttggcccgcctcccggcagcagcgccaccatggccaccctgctgccaccttcctccggtgtcaacagccccgagtgtatggtcatgtcggtcctgacatagccggggtgcacgcagttgacgcgcagctcggggtgccgcctcgccaggatcctcgagtacgcgttcatggccgccttggccaccttgtacgccgagaaatacatcggccagccgttcgacgactccacctcgccggcctccaagtcatttaagaacatgtccagcaggccatccagcctctccggggtgaggttgtcaatgtcgttcagctcccgcttcagctcctcgtttcggaaaagccttagctggccgaagtgggaggagacgttaacgatcctcccatcggaggaggcttgcagtagaggcagtaaagtctcgattacttgctttgtgccgtagtagtttgttcgtaggcctgtctttgcatcgtcgtaggtctcccggcaattctcccacagccatccaagcctctgatccatgtccatgccgctcaactttgccttttcctcgctcgttactgagccacaatcttggtcatgaacatactcaaccccgccaatcgcggcattatttaccaggatgtctagcttcccgaaacgggtctcgaggaaaccagcgagtcgagcgatgctcggagcgtcggtaacgtccagtcggtggaagaggacatcggagagccccaggcctctgaggttctccacggccgccgcgcccctcgcgtcgtccctggctgtcaagacgacggtgacgccgctgcaggccagctgccggcacacctccagcccgatccccttgttgccgccggtgaccacggcaacaaccctagcgttcgcgggcgtggggagatcgccctccatcatgtagtagggcaacactaggagctctcgaacaacccaatgcggcacgcctcgcttcagcgctatggaagccgttccctgaaggaataccccggccggacgcgtggg

SEQ ID NO: 15646 - DNA, 149 bp, Zea mays
  Clone ID: MRT4577_114269C.1
aaaaacactggggtttttcaccccaccccttattcattcaagaaacagcgcagaccccgacgggacacttgcctgggctgcacctacctccggcagggagaaaacacgacgcgccttgaaaacgccccatcacaccataggtattagcc

SEQ ID NO: 15647 - DNA, 389 bp, Zea mays
  Clone ID: MRT4577_11426C.1
ggtcgagcccgcgtccgaaatcaacatcacagcaagctccgcgcactgaaatcttccaagccacaggacacagctctacttccacagttcgcagactcgcacgcaccgagcggctagctatcagcgataaatgtcgctggtgacgcgcaccagcgtgttcgacacagtctctgtggacctcttgaaccccttcgagaccatgtttcgctccatcatgccgccgtcgttgtcgtcctcggcggcctcctagaccgcctccttcgccaacgcccgcatcgactggaatgagacgccctacgcgcacgtgttcaatgccgacctcaccggcgtgtacactgaggaggtcacggtgaaggttgatgactgtaacgtgctgctcatcagcgggc

SEQ ID NO: 15648 - DNA, 1136 bp, Zea mays
  Clone ID: MRT4577_114270C.1
cgccccgcgggtcgtcatgcgcgccaaggcactggccgtcgtgccccctcagcagcagctcatggcgtccgtgttcccattctcgtcggcgccgtccctgctcccaccactaccaacagcaaagcaagccccaaaggtctccctgcaacgtcttgtctcaatgtgcgcgtgcagcatggtgttcttcttacctatcagatgctgaactatggttgactcttctttttcacggcgtgttggtttgtgtctagggatttgaagtcgaatggactctctggacagatccccgattagtttagtaattgcactgcgcgtgaacatgtgttcgttccgtgcagtcgggcacgtgctgttttctttgtccggaaacggctcgtcgccaagctactgctggttgggcggcttgctatgcttctccgtaaccttcggtgtccctccgggctccccatcttttctttcttttgatgttgcaatggttttcgttgttaaaagtgcgtttcgggtttccttgattactgtgaagacaaatctatactaatactccctcccagaatacatttttgattgtacctagcttgaatctttcaatctgtcatcaaacaaactattatccaacataccattcaccatgcccaagatgaagcatctgaagaacttgattttggtgaaaaacaaactggtgggagtgatcccatcgacactctctcaacttccaaatttgaagatattatgtgaagaccaagtaggagaacaactcatggggtgtaagcagattttctagaagaggagagcagcacttgatgactttgataggttcaaagtcatgctggcaaagaggggtggtgctatcaggcaagagctcgctaagttgaagaagacacccatgacttaatggttatcttttagtggatgtcatgttagagtttttggttctaagttggatcagcaattcgattgagtgtcgataaagacagaagtactaatatgttccctgtgaatacattttaaactttatcaagcatgggtgtgctctagatattttatcgtgaatgatatataatatataaggtagcttgcgtcaaatgcgtgatctgtaccatttttttgtttaaacattggcatactctattttccca

SEQ ID NO: 15649 - DNA, 166 bp, Zea mays
  Clone ID: MRT4577_114271C.1
aggggttgcaaaaaaaatttcgcgcggtttaaaccccagctacaatatttaaactacaaaatagaacagttttcatcagataggaacacaaaaccgtccatgtcaccatctttattcacaacctaccataaaaaacctagtccgatatctcatattttacccttat

SEQ ID NO: 15650 - DNA, 296 bp, Zea mays
  Clone ID: MRT4577_114272C.1
cggacgcgtggggcttaagtatatacccatgccaaaaccacacaacaagcagaggacccccaagtattttgctaaacatttaactcaactacagccttgactgagaaaagacttctcgcttaccatgaaaccttcaatacacgcaatattgagtctatgcatggcattgtctccattccagcgtcaactgcaagggctcttgtccaacatatatcccatgaatacccacgccaaacaaaagaaaacactaatgtacgccgaaacaggactgagacatacatacgggctttactacg

SEQ ID NO: 15651 - DNA, 251 bp, Zea mays
  Clone ID: MRT4577_114273C.1
agcatgcacaggactgagcaacttagcaacccattataactttcctccatatgccactactatgtgccaatgagacagctaacactacgatttttgcgcattgatcacaatctcctaaaacgtatcttcttacacagtaactactaccatcatagagactagcttgaaaaaaccaaactctaaaatcctacaaaatccaactaacattcgcacatgcaatcttacatgcttcaactatcgaactccaacaa

SEQ ID NO: 15652 - DNA, 252 bp, Zea mays
  unsure (1)..(252): unsure at all n locations
  Clone ID: MRT4577_114274C.1
ggaccaggtaagcagcagcaggaaccctagcaccgccgcatccccagccatggntatcgacctctttcccggtgggaggaacaagaagaccaagcgcacagcgncgaattccgacgatntttatttaaagctccttgtaaagctctaccgtttttnggtcaggaggaccaagagcaacttcaatgctgtaattttaaagaggctcttnatgagcaaaaccaatcgnccaccantttccatgcgnngccttgt

SEQ ID NO: 15653 - DNA, 798 bp, Zea mays
  unsure (1)..(798): unsure at all n locations
  Clone ID: MRT4577_114275C.1
acgcctgcaggttccggtccggaattcccgggtcgacccacgcgtccggggaagtcccgagacaaaggagcgccgccgcctctgccgccgcgacggtccgggccgcggtcgcccagggactttgaatatgtcggggatcgccctcagccgccttgcgcaggaaaggaaagcctggaggaaggaccacccttttggctttgtagctgtcccaacaaagaaccctgatggcacaatgaacctgatgaactgggagtgcgctatccctggaaagaaggggactccatgggaaggaggcttgttcaagctacggatgcttttcaaagatgactatccgtcctcaccaccaaaatgtaaatttgagcccccactgtttcatccaaacgtgtatccttctggcacagtgtgcctgtccatcctggaggaagacaaggactggaggccagctatcaccatcaaacagatcttattaggaatacaagaacttctaaatgaaccaaatattcaagacccagctcaagcagaggcctacacaatttactgccaaaacagagtggaatatgagaaaagggtccgagcacaagcgaagaagtttgccccctcataagcagcggccctgggctccatgacgaggaanggattggcttggcaagaacttgtttacaaccttttgcagatctaagtcgctccgtacagttactagtcgcctgggnagggttgagcgggcgccattttccatttccgccactggcatattcagnncttttgnatgtttgattattaagtaaaacttgcttttat

SEQ ID NO: 15654 - DNA, 227 bp, Zea mays
  Clone ID: MRT4577_114276C.1
gagctcactagtcggtggccgccctttttttttttttttattgtgaatttcttttaacaatgcagtctattcccttgctacattgggacgaatctggaggtgccggacatagtgggtcctttgtgtgcacgcagcctgaacccaattaggggaggctaggaaacactccagggtgaagctttggacgaactgctgaacacagcggtgcactggtccgcaaaggtcta

SEQ ID NO: 15655 - DNA, 111 bp, Zea mays
  Clone ID: MRT4577_114277C.1
aaacctctgaaatttttaaacaccaaaccaatagggaatgttaattttcttacacattctaccaacctctgatttacgcggaaaacttttaaaactgacacactttccata

SEQ ID NO: 15656 - DNA, 190 bp, Zea mays
  unsure (1)..(190): unsure at all n locations
  Clone ID: MRT4577_114278C.1
taatnatcgnngcccccgatatngcgtttccccgcataaacaacatnagcttctgagtcttacctaccctanncnncctcatcctgtacgcatctgttatatatggangccggnncnggaacaggttgaacagtnctagtcctncccttancagggnnatactnctcaccctggagcctccgtataacnt

SEQ ID NO: 15657 - DNA, 495 bp, Zea mays
  Clone ID: MRT4577_114279C.1
ccggcccgacccacgcgtttgcttacgcgtgggcgctcctcaggctactctcaggcgtgcggtggggtctggtccagctcgacagcccccggcgccgtggcctactcttacgactcctccggggacgactctgagggccgagacgggctaatctggtggtgcgagctactgcgctgtcacaccggcgacaaagggcaaaccaaaaggaaactgaagccggaggttgaggactattgacaacctggacgaccatgtgagcagagtctggatatgggtggccgtaggagctcgaataccagcggacgaactaggttactgctaataatatagggcaccatatgatggagaagggttgctcctgccgagcagctttcaataatagggcatagatgataaataagacgatcacagtagagggattatggaaacgcctgcgaactttcttatcggcctttgcaagaaccgagaaacgcatcacacgctgccgtgctgttc

SEQ ID NO: 15658 - DNA, 661 bp, Zea mays
  unsure (1)..(661): unsure at all n locations
  Clone ID: MRT4577_11427C.1
cggacgcgtgggcggacccgggggcatacgatttgacgctcatcccacatcagtagtcgaccaagcacaagcagcagagccggccggaatatgtggacgatcaggaaggtggcgacgccgcaggtggccgtcctcctgctgctcctcatcgtcgttgcgcaggaggcggcgccgttggcggaggcgcgcgtgtgccggcgccggagcgcgggcttcaagggggtctgcatgtccgaccacaactgcgcgcaggtgtgcttgcaggagggctacggcggcggcaactgcgacggcatcatgcgccagtgcaagtgcatcagggagtgctagctagctaggctctaggatctagcaagctagctatatcggcctttaattaaattaataaggatcgacgtcgtggccggtcgctaaatatgtactactatacgtctacactacatgcaataatgcaccacatgtacgcgtacgcgcgccgagctgtgtggacgccgcagctagcatgcacggccatcgttcctatacgtcgtcgtctgtcgttcgagtactcatgagctgtgtcgtcgacgtccacccatgcatccggccgccacgctttgatgatggtcatgacatcttgacaataaacacgtgcatgcagtattatatacaaaaaanaaaa

SEQ ID NO: 15659 - DNA, 213 bp, Zea mays
  Clone ID: MRT4577_114280C.1
cctgctgtcatgcatttaagttttggagaccaaaagggaaaattagactaaattataacaaccaaaaaaacttaaatataaaaaaaaaaaatataaaaaaaaaaaaaaaaaaatatcaaaatctaaaactaaaaaatatccgtataaaccttaaaaaggccaaatttaaatagtcaaatttcatatgttaactacaataatcatgctaataac

SEQ ID NO: 15660 - DNA, 629 bp, Zea mays
  Clone ID: MRT4577_114281C.1
tatttcgggaggcgagccgggattcgagacagagcccacaaggcaacaacaaagtgcgcgtgagaaacaagcggtgcttgccgagaagagagagagagagagatggcggcgtcggcggcgacggcaacggcgacggcggcggcggtaggggcgggggaggtgatctccgtccacaccctggagcagtggaccatgcagatcgaggaggccaacgccgccaagaagctggtggtggttgacttcactgcatcatggtgtggaccatgccgcatcatggctccagttttcgctgatctcgccaagaagttcccaaatgctgttttcctcaaggtcgatgtcgatgaactgaagcccattgcggagcaattcagcgttgaggccatgccaaccttcctgttcattaaggaaggagatgtcaaggacagggttgtgggagctatcaaggaggaactgacgaccaaggttgggctacacgcggcggcccagtaatcacctaccggagtagcattcgcctaaataaaattgccgctcaacaagtagtgcctctaatggcaccttatatcctgtgtactgcttgttacttgttggtttatggataatggtgaatcaagtgtgactttattcggtat

SEQ ID NO: 15661 - DNA, 465 bp, Zea mays
  unsure (1)..(465): unsure at all n locations
  Clone ID: MRT4577_114282C.1
tattcttgggacgacgagttcttagtcggcggccgccctnnnnnnnggggggttttttttaggntttcgccgttttccccccnntaaacgaagaatgaacgtntgttcgccactattcatattcattggacaacaacaaaacttttggaaggtacaggcgaaaacaaacattattttggggactcacttttcgggaggtttcaaaactacccagggacatagggtgaatgccgcaaaattcaaacatatttggcctttcagaccgggcggtctttttgggatttcaaggatgtacacgtgaacccggaatctggaaggtgggcctgcctctcctcggaagggagggcttcatcgatggaggggatgggaatctcttcggccctggtgatgggcctaagggcaattatcactggatgggcatccttggccccggctctcttaaatgctttagcatttggacgggat

SEQ ID NO: 15662 - DNA, 249 bp, Zea mays
  unsure (1)..(249): unsure at all n locations
  Clone ID: MRT4577_114283C.1
cataaatagggcatcttttatttaattatccattactcactgagcagaggtggtgtgtacaccctcaaagccaagcccatacaacacaccaccatatttctcagttaatccgttgaaaatgcctctttaagcttcttgaaagacagngctgtcagaagcgaaacaaaccctgcctgggggcaggatgcaacccttgctacatcaagcagcttaacaagcttgttcagcccttcctggaggctattggag

SEQ ID NO: 15663 - DNA, 527 bp, Zea mays
  Clone ID: MRT4577_114284C.1
gggtacctcgaggccggccgggagtacttatgagaatatcgcgcggtgatgtctcctcctccctccgcatagatatgtcaagagatgcccacgacagcttacacgtcttcttatcttccatgatcagaagaagaacgagatgtgatttcgacggagtgcatactcctgctgattcatgaactaagagaatagaccggtagtatgtctgggattgctcctgtgacccatgcgaagtcaagatttacagattacccggcgccaactgctatgatgattgagcaggaagttgctggtcttgcgagcaggactagaactcgatcacatacaagccgagcgtgagatcacaaccaaatcgacatggcatctctctttattatcagatgatatgatgattcactgaagaactacaagggcgagtgggatgttaagcaacacttgataaagcgtattgactcacccgggtacgtaaaattttcttctcaaacaacaactgctcgtctaaagaacgatggagctctgcttgcctc

SEQ ID NO: 15664 - DNA, 803 bp, Zea mays
  unsure (1)..(803): unsure at all n locations
  Clone ID: MRT4577_114285C.1
actggaacagcacgcatgaaggcaagcgaagacggtggcggcgacgcgagattccccccttcggcgtcgatctcttccggcggccaccttctccccggtatttttattcctcttgtctcttctatcgcacctagaacctaggatctcctccggcatcgatctgctcaagcatttagggttcttgattcttgcgtcgatgccgtcacggagttctatcaccaccgattcgaggcgcccgccgccgacgaagcgaccttgggcacgtatccaccctcctcctcaccatcgtcgttgtcgagcacttccgtctcgcaggcgtcagtgtcagtgcttgagctcgtgcgtgtggaggccagtaccagtgcttgaactgtgagcctatgatccgttgacgcgagctcggtccattctgttctgctgcagttcgtttcacgtgggacacggctttggatgattcaaagcaaaagtgtgttgaatcccagaagaggaggatcctgattcctaggaaattacaagttcagtgcctggacaataaacatttggcggttcagagcaactaaagcgtcggtggacctcacttgtttgttatcttcngcttgttgcgagtgcatctctcatatctgaatgtttaacattgtccatctatacaagcancaggattagttggcactagaatcatggtgatgaggaggagcacatgccatgtacgcaatgcagtttttagagttttgttttgaaatanagggcgcatggagaaatagaacatcatgctagctangtaacacttatgctagtaataaaca

SEQ ID NO: 15665 - DNA, 717 bp, Zea mays
  unsure (1)..(717): unsure at all n locations
  Clone ID: MRT4577_114286C.1
agcagtggtaacaacgcagagtactttttttttttctttttttttttttttcttttttttttttttttttttttttttttttaagggacaaaaaagtattcattattataatttaaaaacctgtgccatattaaaagcaccgcangactaaaacaganagccaccaaagcaaacccaaggacattgaggtgctgctctgctaccgtacgtgctacaccttgtcacgttcggtcccccacnacnaccaccccctttaacgtnttcccccttcactaattgatcactattccccccctgacctacttctttattatttccccntctcccctcctcctcttcttttcccccccccccccccnntttcctcccttttcttttcccttccccccccctctctttcttttttctttctccccccccctccctcttcccttcttctccccccccctcccnccctcctaggctncncttcccccccctctcnncncccccccccccccccccccccccccccnccctcccccctcctctcctctccccccctcccccccttctcccccttctttccccctttttcctttcttccccctccccctcctttccctcccctccccccctctccccccctctctcctctctctcctctccttttcttccccctctcccccccctcttcccccccccctttccttcttctttcctcttttttttccttct

SEQ ID NO: 15666 - DNA, 1120 bp, Zea mays
  Clone ID: MRT4577_114287C.1
atgaaggattgtccctctcgcctaaggaccaatttgtcatcactccttacctatacttttatcaagtacaaccactcgagactgtatgggcagtcacttgatctaaacttgtatggtccaaaccccagggttatgatggctggggagcaccgggaggataaggagatggaatgttttgtccggtttgggcatggtggtggcctgactccttccggtataatcattaagagaaggagatcgctgatcggtaattatatcatatttgagtcccagaggattgggacgcttaagctagtattccagttttacactctgcagaggttgacatctttacccacaagtcatgttacccatctgccaaggggtcatgaatcacatacacctctaccaaggaagcgaggaagggtaacaataagaggcctttacaaagttccactagctttagaaaacccgctacagtttctaggaatctctaatgcaaggatccctcgcctgaccgccatcgcagcaaaatcaacccaaggacctccctacactgaccactcccctactgcccttgcccctttcgggcaaggtagtcttccactagctttcctaattagtcagccaagggcatctcattccacccttgtggtggcacatgtttctcaagttaagctccatgttccaattaaaaatataatgatgttgacatgaacataaataaaataatagaatagctgtaacatgaagataatgtaatattaaacccaaaaccatataaagcaatagcaaaactacccaaatagtgcagggttaaacaaggtaatacgataatcagactagggtgacctattgggtcccatcaaaattaaacctatgcatgaattaatgattataaagaacattattgggtaataaaagtggtcaagggcacaacttgcataggacttgagattccaggtaacaggatgatcttcaggtgactcgtgacctcacactagtcatagaaatacaaccaaacatggtatagacaagattaacatcacaccaaatataagaatgaactgataaaatgatctacgcgcgtacgagatcgagggaacgagaactagtaaaatggagtcaaggttaaggagtt

SEQ ID NO: 15667 - DNA, 119 bp, Zea mays
  Clone ID: MRT4577_114288C.1
agaagaggggagagcgttaatcagggcaatgcacagtccttacagacccaatgggttccagacttaacgggtaatagtaattcaacctacccgagaagaccactggatcaaggaagcaa

SEQ ID NO: 15668 - DNA, 512 bp, Zea mays
  Clone ID: MRT4577_114289C.1
gccattggactaagcctgttctccccacctaggctgggcaagggaacaaaacaaagcatgtgctggacacattcaacttgcttaattgaaatcgttcagggggaaccattaacatgtgacaaaaaaatcaggggagctctaggaacccttgagattttgggtcaggctccactactacttcgcgctacaatgggctcatacaaactcaccagctagaaaaaagttcttaaaaaaacgaaaaaggaacgagtatattctacagtctttgcaacaaatcttctgagggtaccaatgtagagatgaaaggagcaagagccgagagcaacgccttggggcactcctcgtgcggcagatgtccacaccccgatataattactatcctagaatttacaaatttcgaagccatggcttgtgccgacttcagagaaacaagagcatcctcggagcccgctaccaccagaaccggaaggtcttccactgatcttagtagatccgccgctcgctttgatggc

SEQ ID NO: 15669 - DNA, 411 bp, Zea mays
  Clone ID: MRT4577_11428C.1
cttccggcatcccgtcccagccttcgccgcagctcgcgggcaggcaggcatccatccaggcgggcatgaggcagtggaagtccctagtcccggcgctgcacctgcacggccccgccgcgtcctgcttcccgcacccgccgtcgccgtcgccgcccaggggggacgactaggaggagacggacctgctgccggcggcaccgtcgcagctggccggcgcggctctggcggagcggctggtggggtgcgacgggcgcgtgctctcgtacaccccgcccgtgactgcgcgggagttgatgcatgagcacccgcgtgacctgttgtgccgcgccgacgctctgcttattggtgagaggatcccagccgtggcgcctgccgttgagctgcagcccgtaaaggcctactttctgctgc

SEQ ID NO: 15670 - DNA, 238 bp, Zea mays
  Clone ID: MRT4577_114290C.1
gtacgccgccgtggctggatcgcttaagcgggacaacgcagagactttttttttttttttttttttttttttttaaaactaaaccaaacctcctttaaatacaccgattcgtattgcgctacaaacccatttccctgtcagtctactctcgattctcgcagtcacctgcgtcgtccccggtctctgcgttgtccctgttagggcatttgggattgctcacactggcggcgtcggcctg

SEQ ID NO: 15671 - DNA, 614 bp, Zea mays
  unsure (1)..(614): unsure at all n locations
  Clone ID: MRT4577_114291C.1
ctaccgcacggcaacaacgtcagccccgacgccacacttacccctaacagtacaacaggcacacacaactaaccaacacccgctggtacgtcccccatgccacgcctctgcccgcggctccccccctctccgccgccaccagctcctccttcttagcctcttcgtgcccaggttgccattaaggttgcaaggattcgcattttgtaggttatctagataattttcttcatcttatccattcttgagttcgagatatttcttgtcgttgtttaggaggtggtgctatttatctaggttattaagattattatctaggagatcctcgtgatggtcgtccttctggacgtcgttcacgttaaggttcttctcgtaaccgtgattttgtacaagtaggtcttcaaggccctcgtgctcgaggtgcttgagatcatagaggaggataaggagngaggcaaaggaggtgatnnaataaagaagggtgattacatttcggggtataaaggcttgctggtgggtgaggaggggtttggtgggggggagttttttggggaggagttctaggttggtgacgccttccgagcggcccgtctgggagccctctcgtttgcccgaga

SEQ ID NO: 15672 - DNA, 559 bp, Zea mays
  Clone ID: MRT4577_114292C.1
acagaactgcaccgccgcgctgccgcttcgtctatccatgcgaagaggcaacgttacacctgaggtccctgacacctggtcctatcacagagccgctatcctgctactggttcctgactcgttgatctacctaagcagagcctgagaaccgggcgctccgggaagtggatggacaacggggcacttcaacgccctgcggatgcagacattggcacagatccatccccaaaggccaccgtggatgaacgcccaagtgacacacgcgcacccgtgcgtgctagcgtcgacaccctccgcctacaggagcatacttgctatgatatgaaaccatcgacgctcttacacataaacacaaatgaacaatccaacttacgtgctggagccagagacagctgatgactcaacaaagtacgtgccagcatacaccaacgttctccttaccactctgaacgaccttcaattctttgctgctgagagcctgaacgacgactccgccctagtatccaccctattacaaggtaggtgccactaacccgacattcatctatgtcttttatgg

SEQ ID NO: 15673 - DNA, 119 bp, Zea mays
  Clone ID: MRT4577_114293C.1
atctcctctactctcgacggcgcatcgaacgaatgtaagacagcatcagccatggaacgagaggaggagcacggcttcagcccgcatggacgagtcgtcactactcgcctacatcaagg

SEQ ID NO: 15674 - DNA, 1843 bp, Zea mays
  Clone ID: MRT4577_114294C.1
tcgaggccggccgggccgcaaaaacagccaaagtaccctgcattatcaagactcacttgcatttttggcacaccagaacagaagaagaaaaaaaaaacaggcactgagctgagatggcgaagcacttggctgccatgtgcaggtgcagcctcctagtgcttgtactgctctgcttgggctcccagctggcccaatcccaggtcctcttccagggtttcaactgggagtcgtggaagaagcaaggtgggtggtacaactacctcctggggcgggtggacgacatcgccgcgacgggggccacgcacgtctggctcccgccgccgtcgcactcggtggcgccgcaggggtacatgcccggccggctctacgacctggacgcgtccaagtacggcacccacgcggagctcaagtcgctcaccgcggcgttccacgccaagggcgtccagtgcgtcgccgacgtcgtgatcaaccaccgctgcgccgactacaaggacggccgcggcatctactgcgtcttcgagggcggcacgcccgacagccgcctcgactggggccccgacatgatctgcagcgacgacacgcagtactccaacgggcgcgggcaccgcgacacgggggccgacttcgccgccgcgcccgacatcgaccacctcaacccgcgcgtgcagcaggagctctcggactggctcaactggctcaagtccgacctcggcttcgacggctggcgcctcgacttcgccaagggctactccgccgccgtcgccaaggtgtacgtcgacagcaccgcccccaccttcgtcgtcgccgagatatggagctccctccactacgacggcaacggcgagccgtccagcaaccaggacgccgacaggcaggagctggtcaactgggcgcaggcggtgggcggccccgccgcggcgttcgacttcaccaccaagggcgtgctgcaggcggccgtccagggcgagctgtggcgcatgaaggacggcaacggcaaggcgcccgggatgatcggctggctgccggagaaggccgtcacgttcgtcgacaaccacgacaccggctccacgcagaactcgtggccattcccctccgacaaggtcatgcagggctacgcctatatcctcacgcacccaggaactccatgcatcttctacgaccacgttttcgactggaacctgaagcaggagatcagcgcgctgtctgcggtgaggtcaagaaacgggatccacccggggagcgagctgaacatcctcgccgccgacggggatctctacgtcgccaagattgacgacaaggtcatcgtgaagatcgggtcacggtacgacgtcgggaacctgatcccctcagacttccacgccgttgcccatggcaacaactaactgcgtttgggagaagcacggtctgagagttccagcggggcggcaccactagactagacccattccgcccagcaacccctacagataattctcttttcaggtccattttgaacctggaaaagaaatttaagagaggctaaataaccggaatacgattgtgtactgagcttctttcagctaattattgaaagaagattataatgtttggatgcactattaattatgttggcatggggatttttgtaacctcttaaaacgaggaaataaagactgttcttattaagataaaaaaaaaaaaaaaaaaaaaatctagaccagggacgcggaatccagcagagatagcacgcgtgtcacagtccccgccgcggaccatatgccgcagctcggcaatgtggtgaaggcatcgctgagcgacgaggacccggaggacgtcgacggccacctcgacaaaaacaaggcga

SEQ ID NO: 15675 - DNA, 424 bp, Zea mays
  Clone ID: MRT4577_114295C.1
aaaaaacacacagtttgtttagtttttgaaaagggggcccatttttttgggggaaaaaggaccctttctaagacgggtttaataaccgtccccccgggaggggggtgttctttaagggttttttttggcccgcaggctttttcaaaagtcccttccaaaactttggggaaaaaatgggggggcaaataaactcctaaactaattttttgaagggggagacgggatttttttccaattttggggggggggaacttgaaaataagggaaaccacagtttttgaaaaaattaggggcctccaaataaagggagatttccttattgggggggccaattcaaaaactttaaaaagccctttaaaagaggggaaggcaaccttaaactttgatggggggaccctggttgaaaagttccatgggcaatttt

SEQ ID NO: 15676 - DNA, 1762 bp, Zea mays
  Clone ID: MRT4577_114296C.1
ctcacttgcatttttggcacaccagaacagaagaagaaaaaaaaaacaggcactgagctgagatggcgaagcacttggctgccatgtgcaggtgcagcctcctagtgcttgtactgctctgcttgggctcccagctggcccaatcccaggtcctcttccaggtacctgcgcagcgtcctcgtctcttcccggccgatcgctcaaaaaatactcatcaatcaggcgtgctagaaagcacaagtctggatttaattttgatgctgatacatatatgctgcgtgtctgcgtgcagggtttcaactgggagtcgtggaagaagcaaggtgggtggtacaactacctcctggggcgggtggacgacatcgccgcgacgggggccacgcacgtctggctcccgccgccgtcgcactcggtggcgccgcaggggtacatgcccggccggctctacgacctggacgcgtccaagtacggcacccacgcggagctcaagtcgctcaccgcggcgttccacgccaagggcgtccagtgcgtcgccgacgtcgtgatcaaccaccgctgcgccgactacaaggacggccgcggcatctactgcgtcttcgagggcggcacgcccgacagccgcctcgactggggccccgacatgatctgcagcgacgacacgcagtactccaacgggcgcgggcaccgcgacacgggggccgacttcgccgccgcgcccgacatcgaccacctcaacccgcgcgtgcagcaggagctctcggactggctcaactggctcaagtccgacctcggcttcgacggctggcgcctcgacttcgccaagggctactccgccgccgtcgccaaggtgtacgtcgacagcaccgcccccaccttcgtcgtcgccgagatatggagctccctccactacgacggcaacggcgagccgtccagcaaccaggacgccgacaggcaggagctggtcaactgggcgcaggcggtgggcggccccgccgcggcgttcgacttcaccaccaagggcgtgctgcaggcggccgtccagggcgagctgtggcgcatgaaggacggcaacggcaaggcgcccgggatgatcggctggctgccggagaaggccgtcacgttcgtcgacaaccacgacaccggctccacgcagaactcgtggccattcccctccgacaaggtcatgcagggctacgcctatatcctcacgcacccaggaactccatgcatcgtaagtccccaaccgggtcggtccatcaccaaatccagaatcctggccgacacactgacactcttgtccttgcatctgtaattcagttctacgaccacgttttcgactggaacctgaagcaggagatcagcgcgctgtctgcggtgaggtcaagaaacgggatccacccggggagcgagctgaacatcctcgccgccgacggggatctctacgtcgccaagattgacgacaaggtcatcgtgaagatcgggtcacggtacgacgtcgggaacctgatcccctcagacttccacgccgttgcccatggcaacaactactgcgtttgggagaagcacggtctgagagttccagcggggcggcaccactagactagacccattccgcccagcaacccctacagataattctcttttcaggtccattttgaacctggaaaagaaatttaagagaggctaaataaccggaatacgattgtgtactgagcttctttcagctaattattgaaagaagattataatgtttggatgcact

SEQ ID NO: 15677 - DNA, 259 bp, Zea mays
  Clone ID: MRT4577_114297C.1
aggggaaccgggatgagcgacaccgccacttctataacttgggggtcggggcgatcgaggaggtccgcggccagcaggacacagggcctgaatccctgagagacaacacccacggggcaagagagactcgctattcccatgggcaatgcggcggcaacccgcggcaaaccaccccagtgatcatggggcggtgccccagctccaccgccggcaggatccaagaacctaccccctccccccgcaacgcaccacccgaatg

SEQ ID NO: 15678 - DNA, 621 bp, Zea mays
  Clone ID: MRT4577_114298C.1
catgctgcaggtcgactctagattacgaggataaaatggctccgatccgatctgtgtttgggaagtcaggttgatgggtgtaactaaataattacgagctattgtgttctttcaccctaaacacctaacaataaaactaaaaaaataccatgatgttctgttcgtcacacaattgagtaacatttgtcttcatcttccatcataaaaaaactatatttatcaatcaagttaaaatccctaacaatcgagtttaaggattgtacaacaaaagcaatgacattttttcgataaagagcgttttattaaaactcaataagtagcatcaagctaatacagacatacgagttttaaacgcccagcctctgcatgactaggatgcacacggcctagaaaaagttaaagttaaagaagaaggacatcccaaaagaaacataagtggactatgaaggactgatacaaagactatgccgccattcacgtcgggtaaaaatatctctcaccgcttgcttcaaccgagtagacacctccataaacaactcttttgtcttcacacacttgtaatgtagccacaaaccgagcaaagaattataccgttaaatacttgcaaagagaagaatttta

SEQ ID NO: 15679 - DNA, 280 bp, Zea mays
  Clone ID: MRT4577_114299C.1
tgggcattggcgccgtgagaacatgtgtgattttgtcaatgcgtttgactttggcaaccctgattacagcattccacaggttcctactgctgagacacctcacactgactccaacggcaactttgatggtaccagtctctgcgaatcaacctactcctcaaccagaccgccagtgccatacggcaagcagagccttgaggatgccttgtactttgaagatggctacaagcaagtgatcggttacttaaccgagggtcgttatctcacgtttgaatacaac

SEQ ID NO: 15680 - DNA, 436 bp, Zea mays
  unsure (1)..(436): unsure at all n locations
  Clone ID: MRT4577_11429C.1
ggcgccgcccgncgctgcggcagcggcgcnccccggctggcgggccgcgncggggccgccgcgcggggcggcnncccaagcggggcggnccgngccccgcgcggnnaagaccagaggggggggggggaaggccnccaaagaaacagaagnaaccncgaagcagaaggccgccacgacaaaacngcccccgagcaggaacagggagaaccagcgggncnaaagcgggaaaagaagaangncggggacaagccncccngcgcaagcggngaagcnaaaggngccnggcngggggcaacgngcgcggggncaggcngggacgncgacncgagaccagagagccagggaagcaacgggaaagncagaagccnagcgggcggnggaaccgggaacagcangngcnccaaaagnggaggccgngggcanacacgaacgcaaa

SEQ ID NO: 15681 - DNA, 588 bp, Zea mays
  Clone ID: MRT4577_1142C.1
aagaaaccaaaaacacattcattaaattagacacatgaaattaaaaagagggtttgaaagtgaaatgaccccaaaaatagcaaatgagaaacttattatgtaactggataaatgatgatactttttttgccttgtccatcctcaaagaaactcacccactctctctttttccctttgagagcttcatccatggcaaccaaaatctctctgattcaatagtttcttactcctttgatctttaaactctcgattctgtcgtgtcttgaaccgcaagacgttcagagatatcagctaaagatttaagattgcatttgattaaagcttcaacaaagtaacaagtctcatcctttgtgtttccttctggtacatcaaccacaaatgactcaatcacaagtgttcctattcttccttctatagtctcggggtgaagagagatgattgaagaatagttcttaagtctatgatcaccaccaacgattctgatactgagaatatgctcattgtcatcaagtaactccaatctctcagtgcttctagttgctgggagtccagatttcacatcaacttctcttactgtaccaatctcca

SEQ ID NO: 15682 - DNA, 416 bp, Zea mays
  Clone ID: MRT4577_114300C.1
ccgccaggcaggggccaaagcggatggacaagcacatccagaacaacgggggaggcgaagaccatcccagcgacggagccaccatcatgcgcctggacgacatcgagcaccccgccgacagaaagcttggcgacagccccaagccggaggactacgagcgacagagagagtacaactaccgaggagctaatagcggcccacttcttaaaggacgcaaaaccatatatagaggaccgggagcacccatacaaagtaatatcaagacatagaactgcacgcaatatggcaatccaaagggtaaaagagctggcagttagcataaaagcgaaaaacctcagaaaagaagaacatcactgctctccaagtggcgcagctacaacacttagatacaaaacttcagcagtggtgaaaaaaga

SEQ ID NO: 15683 - DNA, 731 bp, Zea mays
  Clone ID: MRT4577_114302C.1
ggtggtggtgtcgaccgcattcgtcgactcgccgtgctgcctggtgacgggcgagtacgggtggaccgccaacatggaccgggttcatgaaggcgcaggcgctacgtgacagcagcatgagcgcgtacatgtcctccaagaagaccatggagatcaacccggacaacggcatcatggaggagctccggaagcgcgccgaggccgaccggaacgacaagtccgtcaaggacctcgtgctgctgctcttcgagacggcgctgctcacctcggggttcagcctcgacgaccccaacacgttcgcggccaggatccacaggatgctcaagctcggcctcaacatcgacgaggatgcggccgccgatgaggacgccgacatgcccgcgcttgacgagggcgcccccgaggagagcaagatggaggaggtcgactgaggtgtccttccttcatatatatgcaagttctcggcgatgagggaggacggtcaatggcgatgcctgtttgtgtgtgtctgcgtgtgggtccaaaggggtcactgttggtacaggtcacagtagtgtctaatagtaccttgattgccaggaggcaggaccgtgtgtcttcttcgtgtcacatttcgggtctgctctgagtgtcgtggaatcctgtgaaacatatataatacatccgatccgagtccttaaaaaaaaaaaaaaaaaaaaaaaaaaaaaaaaaactcgaggaggggccggtac

SEQ ID NO: 15684 - DNA, 1783 bp, Zea mays
  Clone ID: MRT4577_114303C.1
tacctcgaagccggccggagcgtggttcgaaatcacttaccgccttctccgcagtgactcgaggggaactgggccagccagggactctggcccgacccgagaacctcaaccaaaacctcaccttgccaccgccgcgtcgctcggcgccccgtcgggaactctccgccgccacccagtgacccgccggccgccgcgccttgcagcggcgacggagggaccagccagccagccatgacgacccgcatagcgccgggcgtgggcgcgaacctactcgggcagcactcggcggagcgcaaccaggacgccaccacctacgtcggcaacctcgaccctcaggtttctgaggagcttctatgggaattgtttgtccaagcaggccctgttgtgaatgtgtatgtcccaaaagacagagttacaaacttacaccagggatatggatttgtagaattcaggagcgaggaagatgcagattatgctattaagactttgaacatgatcaaactatatgggaagcccataagagtaaacaaggcttcccaggataagaagagcttggacgttggagcaaatctgtttattggcaatcttgatccggatgttgatgagaagctcctctatgataccttcagtgcatttggagtgattgtaactaatcctaagataatgcgagatcctgaaacaggaaattctagaggctttggctttgtgagctatgagtcctttgaatcatctgatcaagcaatagaggccatgaacaaccaacatttgtgcaaccgcccaatcactgtctcttatgcttacaagaaagacacgaaaggagaacgccatggcacaccagcagagagactgctggcagcaaacaatccaggatctcaaaagaataggccacacacaatgtttgcaagtggtccgccgacccaaggtcatccaaatggtggtccgcctgtgccacggccttatggcaatggcacaattcctggacagattcaacacattcggcaaccacctccaccacctgttggacaattcccccctccaatgcagatgcacgggcaaccaacttggcccgctcaacattctatgccgcctcccatgccatcgcaactccagtacaggctcccaatgaggccaccaccaccaaatatgatgccccctccggttggcatggtaaggccgccacctcctcccactggtatgtcagcaccacctatgtggatgccacccccacccccaccacatcaaggtggtggaatgcctccgcctcccatgtctatgccaccaccgcctccaccaccatctagttaaacacatgcaaaggacagtaccgtctggtcaatgtgtaagctgtaactgtagactaaggatgctggttcctttcatgtctccatgtaacttcgtcaacactaggttaagaggaggtttgagagttaacctgacagatacactcaagattaacagctatttattcatgttctgttgaagataaatgaattttgtgcttgtctacccactaaaaaaaaaaaaaaaaaaaaaaaaaagtatgaataataaacgaaaaaaaaaaaaaaaaaaggcccctaattacaattaacctcggccgagttttacaacaaaaaaaaatgggacttcgttggcgccacccatatggaggattttggaaaatatccctattattgcagcagggttaaaattgaatataagggccccaattgccctttctaacagttgagtaacatttatggggccgggacgctccctgtaggggactgtaaaacccgggggg

SEQ ID NO: 15685 - DNA, 381 bp, Zea mays
  Clone ID: MRT4577_114304C.1
cataaaaagaaccaaaatgaaccaaaatttttcatttttaagatatcgcatccgccctcgcggagggggggcttcaagctgctctagaccaaccaacaacccacaacatagaccattctgctatagatcccctatgaaccgcatacctagcacgatcgacaacaagaacagtgagaaaactcattacgtgcaacccttcatgatccagacaaaaacagcacaatgacatgcacaacaaccacccttgagtctactacaacgaatcaccctaatacaggagttaccttatgtgcatcagagggcacaaaacatcctggcacaacagcgacagaagatgggactggaaaagcactcacattactctcagcaagatggcatata

SEQ ID NO: 15686 - DNA, 726 bp, Zea mays
  Clone ID: MRT4577_114305C.1
ctcgaggccggccgggtaaaaataaaaaaatcggcgcggggaacgtggagagggccaagaacgcggtgtcggtgacgatgaagctgtcggtgttgctggccgtcaccttcgtgctgctgctggcgttcggccacggcctgtgggcgcgcctcttcagcgggagcgccaccatcgcgtcggagttcgcggccatcacgccgctcatggtgatctccatcgtgctggactccgtgcagggcgtgctgtcgggagtggcgaggggctgcgggtggcagcacctggcggcggtcaccaacctggtggcgttctacatcgtcggcatgccgctggccatcctgttcgccttcaagctcgacctgcgcaccaggggcctgtgggcggggctcatctgcggcctcacgtgccaggcctgctcgctgctggtcatcaccgtccgcaccaagtggtccaagctcgccgatgccatgaaggaggagaaggccaactacgtcgcgtagcaaacgcactctacgtctgtactgccttttttttttggggagataaagagcacactacagtacgatcattttagacggcttgccgacgaaaatagatcatatgatgctaaaaatagtctatttttttggtatatagcttatttttggtggcctgatcttttgatccagaccgtcgaaaatagacagccaaaaattatatacgccgaaaaaaaaaaaaaaaaaagcggcc

SEQ ID NO: 15687 - DNA, 821 bp, Zea mays
  unsure (1)..(821): unsure at all n locations
  Clone ID: MRT4577_114306C.1
aggccggccgggccgggaattcccctcgattccatgcggcatccatgaacgccctcgcgatgcccctgtctgccttcaaatatatagctcagtcgccgcttggtccggtacggcttcatgtgtgcgtgcgtgattgaagacggaggcccggaggtgcgctgtcggcactggccatgtcgctggctcgttacgacgccaacgtcctgctggccgcggtgaccgcgctctcggcggctgtcgctttcgtcgcggcgcttcacctctacgcgcggtgcctcctgcagcggcgcgtcgccctcgcggaaggcagccctcgcgtggtcgcgctgcagcggcagcgcccgccggacggctacgtggtggaggtcgtccgcatcgtcgaagacgcaagcgtgtgcggccagcaggctgcggggctggacgccaaggcgctgcgcgcgctgccggtgttcacgttggagtccgagcaggccaatgaagaaggcggcgtcgctgccgagctgcacgggcagtgcgtggtgtgcctcggggagatggaggatggcgagctggggaggctgctcccggggtgccgccacgtgttccacgttgagtgcatcgacacgtggctcggggtgagctcgacctgcccggtgtgccggacggcagctacgcctgccgctccgtcggccgtcggcgtggaccacggtggcggggaagagtccatagctgttgagtgctagtgtgatgtacaaaaaaaggaaggttaatcataaataaatggatgcaaggctgaaatcttttgtgctaaaaaaaaaaaaaaaaagcccctagggccctcn

SEQ ID NO: 15688 - DNA, 209 bp, Zea mays
  Clone ID: MRT4577_114307C.1
accaaggcttcatgcttgggcccctttttattcaaacccgttccttttttacaagggcggggggggcaggattacccaccggttcaactggaccctgccttgccttcctgggggcgcgtactgacactggtacctgggactgactgggacacacgggccctccctttgttcccttgggcttgggccccatccccccacagcaaaacagg

SEQ ID NO: 15689 - DNA, 312 bp, Zea mays
  Clone ID: MRT4577_114308C.1
cggacgccagggacgcctcaaatggtaatgagatgcacccagcacttccattctgaaaacccgggagtgactacccatgcaccaaatcattgatacaaggatttctacctggaatagcttccaatatcacacatacagggcttgcaactatacgcatgcatatctgtaaattgggctgacagatgtcacaggcatctttggaccggcgctgatgcattaagtaaaacatattcggggactcaaggggattcttgtggacgcgaaaccagcagctactgactgtgtggcatgctatacctgatcgtcatacat

SEQ ID NO: 15690 - DNA, 177 bp, Zea mays
  Clone ID: MRT4577_114309C.1
ggcccaccgtttttttgtggttccatggaaacaaaccctcgggtcttttgattccaaggaatgattccgacggtggcttcactgttacacttgcttaaataacttaatctcagttcttaattgaagtggttaccaactatttaaacacctggaattacatggggcaaaggatcataa

SEQ ID NO: 15691 - DNA, 3482 bp, Zea mays
  Clone ID: MRT4577_11430C.1
ggcttctcgctcggatccggaccaacggaacaattccagttccatgcgaattcgaggctgctccatccattacgagctccgcgatttccctgaggcactcgttcccaacgaagcgcggtggggggaggccttcacccgtccaacaaagcgcgagttcgtcggcgcttcaaagccacgggattctttgccgtcgagttcactccatcccacccccccgcaccaagaaaggtccacctcccccaccgcgcacaagaaaaacctagcagctataacccctaatccccaccagtaatcccaccatggcctcgtctctgccgccgcgcagctcctaccagaagaaggagaacgcggtgccggcgcgccgggagatgggttacaacaaggcgacgccgcgccggaacgtgctatcggctctcaacaacgccgaggccaacggggggacgccgtccgtgccggcggatggcggcggcggcggcggcgcggcggaggcggcgcccgtgatcgagttcagtgggagggaggatgtggagcgcttgctcgccgagaaaatgaagggcaaaagcaagaacgatttcaaggggagagtcgatcagatgagcgactacatcaagaagctcagggcgtgcatccggtggtacatggagctggaggatggctatttggctgagcaggagaagctcctaggtgctatggattctgagaacacccgtcataccgagttggaggcccagctcagcactgctattgaagagctgaaagccactaacttggacttgacaaggcgttgtgagtctctagaggagagcttcaacaaggagaagtctgaaaaactgatcgctgtggagtcctacgagaaagaaaagcaggaaagggaatccgctgagagttcacgagatgtactaactgtggacctagaaagggtcactcatgatgctaagcggtttagcgagcagctaaaaatggtccaagacactaataaaaggcttcaagaatacaacaccagcctgcaacaatacaacagtaaccttcaggctgatgcctcgaagagtggtgagaccatctcaaaacttcagaaagagaagagtgccatgatggaaactatggctactctgagagagtgtaacagctcaatgggcaatcagcttgaatcttctagagtttctcaacaagaagctattagagtgaaggaagagctcaggaaagaagtggagtgccttagagttgagttgaagcaagttagagatgatcgtgatcattcagctattcaactgaacagtttgaacattgaacttggtaattacaaggaacagattggtaaaacttcaaaagaatgtgaaagattccgcaccaaagtatctgaacttgaggaaacatgcagtacacaacaagaacagattcggacatttcaaaagcagcttgcagttgcgactgagaagttgaagcttgctgatgtaactgcgatagaggcgatgactggttatgaagaacagaaggagaaaataaaataccttgaggagcgtttagcacaggcagagtctcaaattgttgaaggcgacgagttacggaaaaaactgcacaacactatattggaactgaaaggaaacattagggttttttgtagagttcgaccacttcttcgatttgagggtgattccaatggtccggaaggtgcctctatctcttttccaacatctgtagagtctactggacgtagcattgatttgataaaccaagggcaaaagctctccttctcatatgacaaggtttttgaccatggtgcgtcacaggaagatgtgtttgtggaaatatcgcaactagtccaaagtgcccttgatgggtacaaggtatgcatatttgcatatggtcaaactggatctggtaaaacttatacaatgatgggtaaaccaggaaatgatcaaaaagggataatacctcgttctttggagcaaattttcaagaccagtcggtttctagaatctcaaggatggaattattccatgcaagcatcaatgttggaaatatacaatgagaccattcgtgatttgttagcacctggtcggtctaacagttttgagtctagtaaacaatgcactataaagcatgaccctcatgggaatattgtgtcggaccttacaattattgatgtctttggtattgctgatgtgactagtctactagagaaagcatcccagagtaggtctgtgggtaagactcagatgaatgaacagtcgtccagaagtcattttgtattcacattaaagatatctggatctaacgagaacacaggccaaaatgtccaaggagtccttaacttgattgatttagctgggagtgagcgtcttgctaaaagtggctccacaggtgatcgcttgaaggaaactcagtcaatcaataaaagcttgtcggctttgagcgatgtaatcttcgcgatcgcaaaaggagatgaccacgttccgttcagaaattcaaaacttacatacctattgcagccttgccttggaggtgactcgaaagctctcatgtttgtcaacatttcaccggaggcatcctccgttggtgagacgatatgctcgttgaggtttgcttcaagggtgaatgcttgtgagattggaataccaagacgtcacacataagcccgtcccttcgttctaggctgaattatgggtgaaggtagctgtagggatcatggtaatgtgatatataatgtgttggtttgtgccgcatttggccacaaaggtgatgcccaacagaattcttgtaacttgtacagtgtaggtgatggtgttttgctgagagcagcatatgtacgagtgctgacatcttgtcatgctttccttactttttggtgtagcagacttgggtcatgttaattgtgatcgtgggttcgaatgtgaaactacgttttctctctctctctgccaactaaaaataatctgctggtttatggcgttgatattctgtagcttgcttaggtcatggttgctcgtattatctgcatagtagtctgtctatatttgattgacacagtaacgagctctattgctcaatgatgagcattctaataatcaaggatgtggtagaatagtcacagagattccttgcttcacacagtttggtcatatattagacatttgtgccttccgactgtacttttttttcagctgttgttgctcattgcctcacacacttagataagttgaaacttattgaccttacaatgtgtatctgaattttcttgcttgctccctgcctcacacttagattagttgaaagttgacatttgttgcccctacatgtgcatgattttcttggtccctctaaatatcatagctcatgacctctcctgtttacactgcagcagttgaagatagctaatcgacaatgcaaggtcaaggcctctaccggttgtaacggattgataattagcatgtatctgaaacctcgtttgcaaccaaagttcactgctattttagtttgtcagc

SEQ ID NO: 15692 - DNA, 768 bp, Zea mays
  Clone ID: MRT4577_114310C.1
gccggcgccggccggactatcacatcatcacttccttgagcttacaactcaacctagccagtcagacttcagtcccttcccctaatttatcacacacttcactcaataaactatcgtttttgcactttttcaatttcaatatctcgccgcccatcatgcaatcccccctttttattaccctcattatggctgccagcagtgtccttgctctgccccagccacaaggcggtgattacgactctgaatatgattctcagtctgcaccctcaccctacgactcgcacggggcgagcaaccatccctacacaatgaacccttctccaaggctccctggacaaggttccggtggtctcggtggcatgctaccctctatcggtggcctaatgccttctgccggcggcatgatgtcctctctcggcaatattggaggcatgatgcccttcttcggcgccatgcccggacttggtggcattggtggttttggcggaaatgtcggggttggtgctgatgtcggagctggcgttggtgccggagccgcggctggtgctaacgttggagttggggctggcgtcggtggtgctgttggtgctgacgcaggcgttggtgctggtggtggtgtaggagctaatgtaaatgctggcgctgatgtggctgtgtaacaccttattcaccttcaaattttactacaattgtatctccctctttatcacctcgcatattaattacgtcacttgtctaagataaaaaaaaacaaaacaccggccccta

SEQ ID NO: 15693 - DNA, 438 bp, Zea mays
  Clone ID: MRT4577_114311C.1
attcttagaggcctctttccatgcttgccgatccacgtcatccggctgaatctactagcactacaaatgaatcagtgttgaaggttgctcttgaccacggcaaagcatccggtgtgatcaagtcgcatgaccgcgttgtcgtgtgccagaaagtgggagattcctctgtcgtgaagatcattgagctggacgactaggcaaaattagtctttgctcagggcttgccagatttttgactaggccaaaacgttgcttggtggctatgtataattctatctatagttttgcaaaacgagcagtttttcctatggtgtcatcataggatccgcggttaccattcgaaaacctacgctagttattatggatatgtcctcagattttactgcagtgtagcgagtaaatgatctgatggaataatgatatcaaaactttgtgacg

SEQ ID NO: 15694 - DNA, 305 bp, Zea mays
  Clone ID: MRT4577_114312C.1
gtacgcctgcaggtatcggtccggaattcccgggtcgacccacgcgtccgcgcaaagtgggtctcattgctgcccgccggactggacggctgcgtggaaccaaaactgtacaggagaaggagcatccctttggaggtggtaaccaccagcacattggcaaaccctccaccatccgaagagatgcccctgctgggcgcaaagtgggtctcattgctgcccgccggactggacggctgcgtggaaccaaaactgtacaggagaaggagaactagagttcaggagctaataaagtacgtcctttggct

SEQ ID NO: 15695 - DNA, 214 bp, Zea mays
  Clone ID: MRT4577_114313C.1
gtaggttagctaagctcgggatcggaggagaggtgccccgcgaccctgacgatgacgatgcttcgcggggcccttctcttcgcggcggtgctcttcgcggcttcggcggcggcggtctccgggttcaacttcgccggggacgaaaccggcttcttaaggggcttcttcacagcggtccgcgagcgggccgaggccaaggccgagaacgccgcgc

SEQ ID NO: 15696 - DNA, 634 bp, Zea mays
  unsure (1)..(634): unsure at all n locations
  Clone ID: MRT4577_114314C.1
gccgactcgccgccaattaccattcgcctctgcagacccgacacggcgcgcggctcctcgccgatttgttcccggcggctcatcagaaaggctttggatctggccttcgtctcagttcagcgagccgcgaagaacagccttgatttggtgccccaagtgatgtagtgtgagaggctaacttcttgagagcgcgatgagcagccagggattcggtgcggggagccccaagtccttccgctaccccagaggcggcgacttcgatctcgagtccgggtccccacgcaagggccgcaagcccaagaaccctcacctcgagacctcgatcgtcatgaggatccgctacttctacgaggcgcaccccgtggccgtcgccctcatcctcctctccttcgggctcagcgtgctcatcctcctctccgtgtacgagacccggttcaggacgatgaggagcgtcagtgcgtggtccagtgacggtggggattatccattgccaatgctccggaaccttgtcatggtggctgggcattcgatctatacgagctcaagatgcggggagaccgagagtgagaattcctggttcttggagccgtaccagaagcacgctggacaggcggncaccttcctggctcacatc

SEQ ID NO: 15697 - DNA, 440 bp, Zea mays
  Clone ID: MRT4577_114315C.1
gatatctccacttgcccttcgcttgtcccgtcccttgtctgctcttaatgtccatatcgaagctatatcggataccgtacgacctcgaagatgccgccgcaagcccatgcggcctatagtgacccggattactggcgctcactgctcgaccttctactacctcatgactgactaaaaccctgacgttaccctgcttagtcaccttgcttcacatcacccctttactccactctgagcgtaatagacgaagacgaccgacaccgatcggcctctcccgacaatgctcagactgaatgtggaatgaaaattgacaactgtaatatttagtgaagaatcctcttacctgtttgataaatcacatcattttgttaaccaatatgccgatatcggctagatctctctatgatctcaagaatacaccgacatgaggttgagtgctg

SEQ ID NO: 15698 - DNA, 1886 bp, Zea mays
  Clone ID: MRT4577_114316C.1
cctcgagtcctggccgagcgtctcccctcccggtcgccagtcgcgtcgaccccgagtcccgaccggtgcgcgcgcaggcgcacagccaggacacgaccgagcacggagcaacgtcgccctcccccagtagcgcagcccgcccacgccctcctgccgggccgcgtcgccgactcgccgccaattaccattcgcctctgcagacccgacacggcgcgcggctcctcgccgatttgttcccggcggctcatcagaaaggtggggtctctagttccgagatcactggagcactctctcggttttaatccgtaatcgtgctgcttggcgccgatttctcatctccgcaggctgtctccttggggggatcgattactcgcgtggctcgcacgatactcgggggttctgacttggttctaaacagcatctgcatcttctcgaccccccaggctttggatctggccttcgtctcagttcagcgagccgcgaagaacagccttgatttggtgccccaagtgatgtagtgtgagaggctaacttcttgagagcgcgatgagcagccagggattcggtgcggggagccccaagtccttccgctaccccagaggcggcgacttcgatctcgagtccgggtccccacgcaagggccgcaagcccaagaaccctcacctcgagacctcgatcgtcatgaggatccgctacttctacgaggcgcaccccgtggccgtcgccctcatcctcctctccttcgggctcagcgtgctcatcctcctctccgtgtacgagacccggttcaggacgatgaggagcgtcagtgcgtggtccagtgacggtggggattatccattgccaatgctccggaaccttgtcatggtggctgggcattcgatctatacgagctcaagatgcggggagaccgagagtgagaattcctggttcttggagccgtaccagaagcacgctggacaggcggccaccttcctggctcacatcaaggagggggtggggatcgcggcgagggatgagggggcactcctgttgttcagcggcggggagacgaggagagatgctggcccgaggagtgaggcacagagctactgggctattgccgagtcgaaaggatggttcggaaatgatgagggtgtaagaagccgagcactcaccgaggagcatgcacgagatagttttgaaaacctcctatttagtgtgtgccgtttcagagagctaactggaagatacccacagaacataactgttgttagctacgatttcaaggaggaacgttttgcacaactgcacagaaccgcactcggattcccggaaggaaggttcttcttctcaggtacaccagctacgccttctgcaagggaggctgctctgaaaggcgaagcagctgtccgagctcagttccttgaagacccgtatggatgtctaggatctcttcatgtaaagaggctgaagcgggacccgttccaccgaaccattccataccctgccggttgcccagagctgaagggtctgttctcctattgtggcccggtgccttactctgggcacctcccttggactgagtagtagtgtaatgtacatcagccttggatggagctccccactgccacttcacgatgtccagcagccttgcactgaccttgttctgaattgagggagagtatatgttacactatcaacatatggatttttaacctttttgtttcttctcgacgacttggctactgtctttactcacaattcaaacttgtgattttgtttttacacgcacaccttattctgtggtgcaatgcaaacagtgaagaacttccccttcgcagctgaagttaatgaaccttccctgtcagcagaacctgaacagaatgatatcctgctgttcttct

SEQ ID NO: 15699 - DNA, 129 bp, Zea mays
  Clone ID: MRT4577_114317C.1
ggtcgggcgaaaggcgcggcctaaggtgaccgttgtctgggggcagttatactgagtttcacctgggaactttacacactgtagatcgcgcactccggtctcctattctaagctctgatggctacatgc

SEQ ID NO: 15700 - DNA, 430 bp, Zea mays
  Clone ID: MRT4577_114318C.1
cccacgcgttcgccaactccatcgctagcgcatatgccaatacaatctgaagtccaggggtgccttcttagaaacgaacggataactgacacttgcatataatcatctaggaaacttggtgctgacactatatacatcagggatcacgcctgaaaccaacatcgtaccttcatacatggcacctgaattgactctcatatcgctcacatctaccaacaagtgataattatacacattccgagcaatagcacttgatatgctgtcatgcacaagcccagacatgccagtccgaaaaactgtcgtcttgctgtgatatcttgtcatctatccactcctagattatatgccgaatgatattcatcatccattcatgacaggtgctcactgctacgccgatctgataaccgaaacaagaactctgcctattcct

SEQ ID NO: 15701 - DNA, 232 bp, Zea mays
  Clone ID: MRT4577_114319C.1
attcgcaatggcaacagtagttgccttactatgcaggaagaacatttacaggcagaatgtggaggatatcctcatccagattatatatctgttgatatgattgatgaaagatcactgcatgatttgccacatgggttatcacaaaacaatgagcagtatgagatggagcagctcccacagaatatatgtgaaagtggttctatgcagatggcctctccggaccaatattgtt

SEQ ID NO: 15702 - DNA, 640 bp, Zea mays
  unsure (1)..(640): unsure at all n locations
  Clone ID: MRT4577_11431C.1
gccggccgggtcgggccttaacttgattgatttagctgggagtgagcgtcttgctaaaagtggctccacaggtgatcgcttgaaggaaactcaggtgggtgtttgcttaccatagatttccaatattccaagcattctataatgttatattcaaattacttttaatgctccagtcaatcaataaaagcttgtcggctttgagcgatgtaatcttcgcgatcgcaaaaggagatgaccacgttccgttcagaaattcaaaacttacatacctattgcaggttagtgatccgtgcatgtctatgcagagttgaatgttgtagtccattttagacaatctcagctatatcttcactttgcagccttgccttggaggtgactcgaaagctctcatgtttgtcaacatttcaccggaggcatcctccgttggtgagacgatatgctcgttgaggtttgcttcaagggtgaatgcttgtgagattggaataccaagacgtcacacataagcccgtcccttcgttctaggctgaattatgggtgaaggtagctgtagggatcatgataatgtgatatataatgtgntggtttgtgccgcatttgcncacaaaggtgatgcccaacaaaaattcttgtaacttgtaca

SEQ ID NO: 15703 - DNA, 302 bp, Zea mays
  unsure (1)..(302): unsure at all n locations
  Clone ID: MRT4577_114320C.1
ggtgtgtgggtgtttttttttttttttttttttttttttttttttttttataaaaaaaaagattgagataggatatgctggagcgggtcttttcacctaattccccttatatatggggggttttaggaaaaagggagggttctctcaaacgggggggggggggttaatagagtttgngaaagaagcctaaaccttcaatagctccctccaaaatcgaatgtgaaactgacttactggcacaggtgacaaacaaaacaccattttcaggagagtgggttgccaacttccctttttaaccacaa

SEQ ID NO: 15704 - DNA, 1069 bp, Zea mays
  Clone ID: MRT4577_114321C.1
atcggaaagtgccaagaattcatgtcgggctgtgacagtgattgctaagaactgtgagcagataagcagcctgtgtctgcggaactgcctcctcataaccgattcatctctcgaggtgctaggttctatgggatgcgagtggggtaaatgccccctgagaatgcttgatcttgcctactgcagcaaactgtctcgaaacttcctgagacactttgagccgccgctgttccgaggactgcggtggcttggcatcggtaagaatgtagctcaacgtcgtggctgcagcctgacaattgcggaggttctggagcgaaagccaggattaaccatctgctgcaacgcctgcgacatgggctgcaggaacaagtgccatccagacattcgttttcttcagtagatgtgctgcaaaggctgcaacatgggctgcaggaaccagtgtcatccagagtccagacatttgtttccttaagtagatatgcaggattaagggtctgtttgtttcagtttatagatttatatgagattaaaggatctggattatataatctagattagattatttgggtgtagctgtttggcaacctagtttattgaaaaattcaattattgattttagtcatatgttgcgtggtgggagcaagaaaaaaatagatgaaacatttttttaggtaaggagtgacaatggtgagtaatatcttctgaagttgctataggtagtgagtctagattatttaagccagattgtataatctggacagattataagctaagacaaacagaccctaacccatctgtggcatgggttgcaatagaagtgtcaacccaacattcgttttcttcagtacatgtgtttgatattgttgtgaaacgacacctcttcactaacagatgccttttcaggagatgatctcatctattcaagcataagattagtggattggattagacggttagaattactttcaaagggcatgttcttcaggaatgttcttcaggagagatatttggaataatgcacacaccatgatcttataatttattttttatataattgattattttagtttaa

SEQ ID NO: 15705 - DNA, 337 bp, Zea mays
  Clone ID: MRT4577_114322C.1
aagcgggtattgttttcttcatacttaggttgggaaatatgaaccaaattttttaacctttatcccctgggggtttccttaaaaatctacgcaagcacacctgttttttaatttgtatacaagctggataccttgcggggtccaagacactttttttttcatttatatttcaattttttttccaaacccgggacttggacaccctttttccaaccccttgtaaaccctttgggtgttttttccccaacccttaagcttaattcagaaacaagggtttttttaagggggggcttaaagttttttttgggggggtggaaaagccttttcaagggcccaa

SEQ ID NO: 15706 - DNA, 221 bp, Zea mays
  unsure (1)..(221): unsure at all n locations
  Clone ID: MRT4577_114323C.1
ggcaggcgcaggcgtgaccaggcataagcttccgcatccgtantcccagtggggcacccggggtcgctgacctgccacctcatcgtcgaggcgaggaccagacataccacaccgtacccgttaccagcgcggcgcacgaaccggccaattttattcggctgtcgtctcgtgctacggaattaagccagctaagtttttggggacccgggacaaaaatattc

SEQ ID NO: 15707 - DNA, 153 bp, Zea mays
  Clone ID: MRT4577_114324C.1
gccattacgatgcatggtcttagggttaactgatggggccatgacaagagcctaaaatgcatattgatgatagggcttttaactcagctgaaataacctatgtcattgatttgataaacgcttcacgtaggaatcaaaagatgttgaagagcc

SEQ ID NO: 15708 - DNA, 802 bp, Zea mays
  Clone ID: MRT4577_114325C.1
aacgcctcgggcggcgcggccaccgccgcggcgctggcggcgaacggcacggcccccgcagggaccgccgcctccgccgccgacagtcctccgtatagccgcctcctcatccgcggctggccctccggccgcgcacaaaagccgcggccacggccacgggcccgccccccgccacggccccagacctccggccaagcacccgccgccgccgccgccgagtacccgcaggtgtgccgcacgctgttccgccgccagaggcccggacagtacccggccgagctcgccgccagggaggagacgctcggccagctctgctccgtctcgctcgacatcatcgcgctgctctccagctgaggcacacacgctactggccttccccatgcatcctcgacgcgacgacgatgaagccccgcgcgcctacgccgacgatgtcaccaccatcttcttggcttgacaattctttttttttcccacgtcccttgataatatgcatatatattaaatgtatattacaacgtgtaagcgtacgtaacagctaataacgttgtcctacgtgtaatgacacgtacgtatgtgctttgttcccctctacccacaagtcacaactgactcatgttttgacttttgatacatgaatgttttattgttttatagacatccacgaagtgtctgaaacacaactgtcttctacttatatatgtatgcacttagttgctagtatatatgttatatgtttataacacagaaaatataaagttctatatatgagactgttttttacacaaatatacaccattacacc

SEQ ID NO: 15709 - DNA, 316 bp, Zea mays
  Clone ID: MRT4577_114326C.1
tgtgtttttttgttgaagcgcgactatgcattcattgtatgttctacgacacgcaggctatctccaaccattccccctaccaatccctccatttggacttactattcattattgaaatacattcccctcaactattcttccccctaatttttcttctctccacccattccccctattcaactccccctttactctttaactgagcttattgccttatatatatatatatatatcactttttggattttttaaataatactaccatatttgtagtaccgtaattcacattggtattctaggaattttaccctaaaag

SEQ ID NO: 15710 - DNA, 577 bp, Zea mays
  unsure (1)..(577): unsure at all n locations
  Clone ID: MRT4577_114327C.1
ttttttttttttnnnnnnnnnnagacataccttcgtgatcttaagatagaaaacagatagagtatgttatactctatatccaagcataaataaaaaccatagagatgtacgaacacgtcactagtgacttttatacattagtttttgaagttttaaaaaattatgcaatatttatagtaacatactatacatttttatcatatattaaaactttaaaaagattggttttgtagttaaaactactaattcacggaaggaggagattgaaactcctctgtccgaagggtgcgtaggcgagctcggtcttgaactcgtgagggggcaccgttggacgagtggagggacgtggagactggagaaggcggctagaggaagggtgagagtgaagcgccggagagtgtcataactatgaaacttttctcatcaccttagttgaatattattaacaaagtacctaatcgccttcagttagcagtgacagctactttcagagacccattagactgctcctgctgaggccttccacagccagttgccatccaatttgggctccagaacaagaacagctaggattggg

SEQ ID NO: 15711 - DNA, 502 bp, Zea mays
  Clone ID: MRT4577_114328C.1
tcgtcggctgcgagaagacgacagaagggggaatattatatcagttactgtagcttggatcaaaggagaaggggggttttactactagatattgaggcaacaaacacagtagggctgttgtttacataaatttgtcttaccttgtaggtctttcaatctggtttctatctatcatatactttatttccggtgttccagcatcctatgtgatgtggtatcgtcctctttatcgtgcgacaaggtagttttcaatttgattgaattcaattcttatggtatggcatggataattgatattcaagatgatttcagccttttcctaaactataaaaaattgttaatgtcatccacattggctttattgccattgtgaagcattaaacattttctgtagcaacagtatgtacatctggggactctgtgagcagaatgtaagtcaattaatgacaacgttgtcattttgaaactgaaaagcttgtgggtgcaaagtttacattattaa

SEQ ID NO: 15712 - DNA, 197 bp, Zea mays
  Clone ID: MRT4577_114329C.1
aagatgaaggttcaggcacacgacttgccgtgaaatttatagacagtttacaaccccaggcaggacgggtagcccgccacaaagaaaaaaaaatgcgcacaaaggattacacgggggacaaacatgaaacgacaacaacagttggtcacgattcagacataaaacgcttctgctggggaggataactgtggtgagcg

SEQ ID NO: 15713 - DNA, 346 bp, Zea mays
  Clone ID: MRT4577_11432C.1
tcgatatcctctggtatcttagttaaactagtacgagcatatcaatgcggctcgcccggactagtggagtttcaccagaagggatttgatggatccttgtgctacacggtgtgctcttgcaatactctgacgaatttgaactgaacgcccttgccggccatgacatgtgcgacatcaagtgccataatcacaaggaccccaccagaaggcagctacacgaggatcaaagccataatcgcgagcaccatgacccttgcagagagtcatgcaagatgaagtgccgagaccatcacgaccgtgcaaggaaagagatctgccaacagcatagcatgagctatggtctcag

SEQ ID NO: 15714 - DNA, 2475 bp, Zea mays
  Clone ID: MRT4577_114330C.1
taccctcgagctggtctcggagatcgacctgaattctgaaccccgacttcacttgtgacctccgcatctccgtccggccggcgggcgaccatggctcttcccccaccccaaaccctaattctcttcttcctcctggcctcgctggcccccgcggtcaccgcggtggcgttctcgggcctcgacgcttttttcgcgtcggcagccgcgcgcgacccgtctgccggcaacgacaccttcgccgctctaccggccgccctccggcgcgcgctctccgcacgtacctccctcctcccttccttctttctcaacctctctgccacggtccccgtccacgtccgccttgccggttcctccttcccggcctcatccgggcggtcccttccttccctcgtcaacgccgccgtctcctcagcccagttcctctccagccgccgcccacaccgtctcgcggtctcccacacccttcaccttgacgtcaccggccccgtcgcggcgtccaagctcgcctctaaagctggcgccgccgtccgcgcgcatctcgacaagtcccccgcgccgttccacaataacgcgctctcaggcgttccctactcgcttgtggacgatctcgtcgctgaggactaccgcgcgctagccggctccggccccgctgaggccgtctacatctacttgctcgaccttggcaagcagtcgcgccagtatgcctacaccgcggcctcctccggcactgatgcctcctcgcctgggtactcccgctgcctcggccccgtctgggctggtaagaatcggtacatttggatcgacctgggtgccggtccagtgaactacggtccagcgctctctggcgatggcgtgctcccccgtggtgagttccaccctcttgccacccttcacggcaggcccaagtcggagaaagctctcctcgcggatcttgcgtcgctggttcttagtgcatacaagtctttgctagtgccttcgctcagaattccagtgcattatgagaactcgttgcttattcggttcattcacatccatggggaccggaaggaagaagaagggcttgattttcgtgtgatagaacagtcaattcgtgacggggatctaccttatggtggacaaagcttgaagtttgatctgcatacggtcaagtactctgaatgcccaatttgctcattcgcagttgctaggtcgacaaactcgtttacatcgaggttcctgtttgagaactacacattgatagtgaatgagtacttggactccaagcggttgaggcaggtgctgtcagactcgtcggatgagatacatcgtttggctggggtccatgaaaattatgagcatgacaaggtggtgccagtttatgttttcgatttggattatgataaacttttgcctctggatagataccaccaggcagtggcatttgggggtacgggccttgctgtgaggacgcggagctcacaaacagtaagtgactacacctgtaatggtcgacatgtgcttacaatgactagaaatcttgagcgcgcaatcattggctcacttctgcagagcatgtggggggtttcacccacacatctgtcatggagtcctgagcatcatgccacagttgttgattacacttggagcactggacatacaccatttggtcctttttcagagaccaaatcactgtcttttgtgcagaaagatgcagctcgtaggaatgttcttctcacaaccctgaactacacaatcaccagcacaatagatgttttggagtcgatggtggcacatggtggggagaaaatacttagaaagaaaaggcatgttgaattcattcagaggtggaacctgctcacgtataaactggagaaggtgatctcagccatgtcacgcttggactacgacaaggcaatgtactatttgaggtcttcagaccacgatctgtatgaaattcactcattggtgtatcaggcatcacaggagcttgaagcttcactggtttgcttcaaagatccaccattcccgtgggtatctgtttccatgtctgggttgtttgtttttggtttcttttatatgtgctcaaaaagagacaagttgtttaggagcaaaaggaaacaattttgagtttgggcagcattttagttcatggatactgtccaaatgtttgatcctggtcataccatagctagacagcaccaaggatattgcaaccctgcatattacatggatctgtaagcgtacacgggctgcatcttgtttcaaccagatgaatttacatgtatgagatatacttccactagtcttattagttctattgcttgaatttttctttgatacatagtactttcgatctagatattttagagtttattttgcactgtgggttgtcctatttccttcgtgttctccgaatggattgccttccagatgttgtgctcatgtctggcttcggaatgtcagttcatagtaatttactaatgttggatgttatag

SEQ ID NO: 15715 - DNA, 1706 bp, Zea mays
  Clone ID: MRT4577_114331C.1
ccacgcgtccgaaaaagatggtcgttgcgcttgttgatatggaacgtgcttttgttcctccccaacatttcatccgcttagtacaaagaagaatggaaagacagcgtcgggaggatgaattgagaaatcgatcttctaagaaaacacaagaagctgaacagccaacatctaagagggcctcaagtccccaaacagatgctgagcaaggtggtggcagcttaaaatcaatgaaagacaaatctggccagcaagataaagacacaaaagagggatcaaatttgcaagttgctggtcctgctggtgaaattactgcaggttaccttttaaagaaaagcgcaaaaactaatgggtggagcaaaagatggtttgttcttaatgagaagagtggaaagcttgggtacacaaagaaacaagaggagagacattttcgtggtgtcatcactcttgaggagtgcaaccttgaggaggtagaggaggaagagccttctaaaagttcaaaggactcaaaaaaggcaaatggatcagaaaaaatctcaagtcttgtatttaagattactaatagggttgcatacaaaacggtcctcaaagctcacagtgctgttgtgttaaaggctgagagcatggccgacaaggttgagtgggtaaataagatcaaagctgttattcagagcaaagggggttctttcaagggtccaagtactgagggtggttcaatgaagcaaagcaattcggatggcgctttagatactatggcacgtagacctgctgatcctgaagaagaacttagatggatgtctcaagaagttcgtggttatgtcgaggctgttttgaatagtctggcagcaaatgttccaaaggctattgtgctttgtcaagtggagaaagcaaaggaagacatgcttaaccagctatacagctcgataagcgggcaaagcaacgctaagattgaagagcttcttcaagaggatcataatgctaagcgcagaagggagaagtaccaaaaacaatcatctctcctgtcaaaacttactcgtcaactcagtatccatgacaacagggcatctgtttcctcgtattctaatgacagcactgaagttgagagccctcgaacaccaagccgctcaggtgaggactggaggtctgcctttgattcatcttcaaatgggcctgttgctacaagcacaaacagtgaatcaaggtcgagaagtgctgatggtcgcagccggcgctatgagaacggggatgtgagctcaggtgccaactctggcagccggcgcacaccgaaccggttgccaccagcaccgccaaaatactaatcgtgctgattggtattcatgaacattatgtattcttgcctggcacacgccccttgcttgtcatatgggttattggagcgtattccagatcggccgctagagattgtgttgtagtggagtctggtgattgcgtgaacattgtgttcgcaggtcgctgcgactcaggtgagttgtttatagaaatatataggtaaccatggtctctatctttactgtttattatcaaaaaaaaaaaaaaactcgctcgtgcccgcacatttcctggccctggtgccgtccctgccataggattttgttggggcaatcgatcttgctttcgcacttggtcgttctgggacggcggctgtcagacaaagatttatgttgcccctcccgcgcatattgttcggt

SEQ ID NO: 15716 - DNA, 1455 bp, Zea mays
  Clone ID: MRT4577_114332C.1
atgcctgaggtcgactcagaggatccttgctataaccttgacatgttcactaaagcaggggctgtttttaagataatcaaacaaaaaatcaaaatcttgaattgcagcgattttatattgtttacctatcaacagtaaattatcgttgtaaatattgaaaatttgtccacgttccttcccttccgtatttgggtgacgttggcctaatgtaaaaagagctttttgtaaaagtaatttaatttcgctagaaataattttgtttgtaatctcactgactatttcattgcttgaatttgtagaaacatgttgtaaggcatcatttttcaaaaaagataagtagttgcttctaacaatactttgtattttcgataacttcagatctgtccgtagttttatattttttgaagactgcttaatataagcatgtaaagctttggctatctcgtctaatccgtgtgaaaaatcacttataaattttaaatttaaacataaattagtagtcgcattattttcttttgtttttctaccctcaataatattttgaataggaataaatcctaatttaatttcagggcgatcccgataagcgtagccggaacttacaccgtattcaaaattccgtgaaaaatatggtacagctcctggatgatattttaatcattaaccgtgccgaagcgggcaaattggaatttaatcctaattggttagatttgaaattattgttccagcaatttatcgaagaaattcaattaagtgtcagtgaccaatattattttgactttatttgtagcgctcaagatacgaaggcattggtggatgaaaggttagtgcggtctattttatctaatctgttatctaatgcgattaaatactctcccgggggagggcagattaaaattgccctaagcctagattcggaacagattatttttgaagtcaccgaccagggcattggcatttcgccagaggaccaaaagcaaatttttgaaccctttcatcggggcaaaaatgtcagaaatattacgggaacaggactcggtttaatggttgccaagaaatgtgttgacttacacagtggcagtatcttgctaaaaagtgcagttgaccagggaacaacagttactatctgtttaaaacgctataaccatttgcctcgagcttaggcgtagaaacatgtcacggcaattcccaagctctaattttaggttcggcgtgggtattttactttccacagttttgaccggcaggggagtcaacaccttacggtaaaacaaactattccagctcccttgctttacaggggactatcagcgggaatttcctggtaactcacgctatcgggggttatggcaagggccctagactagttgtagttgggcggttttgcgctttttgcggccacctttgggggcatctgctaggcaatatttgaccacattggccaattcttccaat

SEQ ID NO: 15717 - DNA, 146 bp, Zea mays
  Clone ID: MRT4577_114333C.1
aaaaaccaggaaaggggagcatccaatcatgttttgtgacccaaaacacaaccctgggaaagggtaattccccgacctgacaagcgacaaccggaactggcaggaagatcaaaccatttcaaccactcactaacgaaaggggtaga

SEQ ID NO: 15718 - DNA, 269 bp, Zea mays
  Clone ID: MRT4577_114334C.1
ggcaaggtaaaaactagaatggatgcagctaaattgtccttgaagcagatgcaagagctaattgctgatattcagaatgaatctgcaaagtttgagaaagtcgttgagttttcccaggataaggaagggaccattgaagctgttggatgtgataatgaccatctgtcatatcaaactggtgcgcagacagaagatcaacacagaaatgttttacatatgttagaacaatccatagcaagtgagatagatcttgaaaagaaactctctga

SEQ ID NO: 15719 - DNA, 491 bp, Zea mays
  Clone ID: MRT4577_114335C.1
gcgaagcaaacaaaccacacgagcgcggcgcggcgcggctgccacctagaaaacgcccgcgggcgcacgatgaagaaggcggcggcggcggcggcagtcctggctacccttctcctctcctcggcggtgtcgcccaccgccgtgtccgggcagcagccgtggacgaaccagcagacggcggccaacaacccgcggctgcacaaggcgtacgtggcgctgcaggcgctgaagcgcgcgatcacggaggaccccaggaacctgacgcggggctggtgcgggcccgacgtgtgcgcctacttcggcgtctactgcgcggcggcgcccgacggcgacgcggacacggacacgcagaccgtggccgggctcgacctcaaccacggcgacctggcagggacgctcccggaggagctgggcctgctggccgacctcgcgctgctccacctcaactccaaccgcttcgcgggcacactcccggactcgctgcccgcgct

SEQ ID NO: 15720 - DNA, 277 bp, Zea mays
  Clone ID: MRT4577_114336C.1
cggacgcgtgggttcttctcccccatgtctggtctatttttgggcatgctaagatggacctgaccagcatgcagctagcacgatatggttgagctgagcttgagccactataaataaaaaaaaaaaaataattgaacatataagcaataaaagaatgggaaaatactgatgcttataggaaaacacatttaaaaagaacttgcctaaaatttaaggttatgaaaaattgggttgtacatctaaaaaataaaacctcagttacttctattctgattat

SEQ ID NO: 15721 - DNA, 693 bp, Zea mays
  Clone ID: MRT4577_114337C.1
gccggccgggccggggcgcaacatcgaatcgtctcgctcgtggctgccctgctcatactgcttgccctcgccgtatcgtccacccgcaacgcacaggaggattccatggccgacaacaccgggacgttggcgggcggcatcaaggacgtgccggggaacgagaacgaccttcacctccaggagctcgcccgcttcgccgtcgatgagcacaacaagaaggccaatgctcttctggggttcgagaagcttgtgaaggccaagacacaagtggttgctggcacgatgtactatctcactattgaagtgaaggatggcgaagtcaagaagctctacgaagctaaggtctgggagaagccatgggagaacttcaaggagctgcaggaattcaagcctgttgaagagtgtgctagcgcctaaggatctctccttcaccatgtgcgagcctgaagctcaaagcaaagttgcagaataaggagccgctcataagactacaacccttttagggcttgttcggttgtgtctgtatctaagggaattgaaggtgattaaatttccttctatacaaatagaggggctttaatcccctccaatactcttcaatccactcctaatcgaacaagcacttaatatgatatcttagattgccgtacctgtgtaatatcatgaataaaatttgctattatggattctaag

SEQ ID NO: 15722 - DNA, 448 bp, Zea mays
  Clone ID: MRT4577_114338C.1
cccactcgtgcgggaatcatatcgttcttggctgtcctgctcatactgcttgccctcgccgaatcgtccacccgcatcgcgcaggtggattccatggccgacaacaccggtacgttggcgggcggcatcaaggacgtgccggggaacgagaacgaccttcaccttcaggaactcgcccgtttcgccgtctatgagcacatcaagaaggccaattgctcttcttggggtacgagaagcttgtgaaggccaagacacaagtggttgctggcacgatgtactatctcactattgaagtgaaggatggcgatatgaataagctctacgaagctaagggctgggagaagccatgggagaaccttaaggtgctgcaggaattcaagacctgttgaagagggtgcctatcccctaaggatctctcctctccatgggcgagcctggagctcaaagg

SEQ ID NO: 15723 - DNA, 337 bp, Zea mays
  Clone ID: MRT4577_114339C.1
gcgggtcgacccaagcctctatagagactcgtagtatcgctcgtggctgccctgctcatactgcttgccctcgccgtatcgtccacccgcaatgcacaagaggattccatggccgacaacacctggacgttggcgggcggcatcaaggacgtgccggggaacgacaacgaccttcacctccaagaactcgcccgcttcgccgtcgatgagcaccacaacaacgccaatgctcctcaggggttccagaagcttgtgaacgccaacacacaactggttgctggcacgatgtactatctcactattgaactgaaggatcgcgaactgaacaagctctacc

SEQ ID NO: 15724 - DNA, 907 bp, Zea mays
  Clone ID: MRT4577_11433C.1
gcttgagggcggtaccccacccccaccatcacttgcgctgtcatctctgatcttttgacttttagtgaagttattgcagaattctcccttagtcatggagtgccagacaagcatatctggagatgcctcgtccggccaatactcttcaaagtcgacttatgatatgctattcctaggatccacttcttttggagcctttgagcgtgtttggaagtcttgggcaccttcaaagtgcagtttcttcctttggcttgccatgcacagtagatgttggaccgcagatcgtcttgctaaaagaggactaccccaccccattgcgtgtcccctttgcgaccaagaagaggaaacaatacaacatcttctcatctcttgcgtttttgcaagacagttctggtacctcttgctgcgcaggtccgggttgcctaatctttcaccggacaatgctctttgcagcttaaaagactggtggagcagggctgtggagaaggttccccgagatctccaatcaggcttcaattctctagtaattcttggcgcttggagcctttggcgtcatcgcaacgactgtgtgttcaatgggaggtcgccgagcctagcaagtgttctcaccctcgctggtgatgagcttaggatgtggtgtcttgccggagctaaaaggttgaacctgctttcagctgtagtgtttgtgtttgaccccgggtgataatcttgtgccttgttcagagtgtttgtgtgtggtggctgtgctgtgtcttgttgtgtcgtgtggattgagttgtgtgtgttgtgttgtgaccttcttctatctattaatggaaagatacgcagatttcctgcgtgttcgataaaaaaaaaaaaaaaaaggcgccgtctaaggatccaagttagtagcgtgcaggacgtcata

SEQ ID NO: 15725 - DNA, 434 bp, Zea mays
  Clone ID: MRT4577_114340C.1
ttttttttttttttttttcgagatcggtaattcgaagctttttttttgccacctcatgatctgtgagtgatacacgacacagcaaacctaattaattgggattgagcactgctaaccactagcggtgagtattatgtaagcaagctcacacacagcggtcacagaagtcacgacaagtacacacactgtccggccgggccggactgatacagtacagctcagaagcaccagaaagttggcgccggcgccggccgcgccttcttggccggcggcggctgccggagctccggcaccgcgaacacgtcgctgtcgctgttccaagtcctctccgtcacgcacccctgcgtcgggacgaccacaacggaggccggggccttgtcgaagcccagcgctgtgccgccgacgcgcttgcctggccggccgttggccaccac

SEQ ID NO: 15726 - DNA, 268 bp, Zea mays
  unsure (1)..(268): unsure at all n locations
  Clone ID: MRT4577_114341C.1
ccacnacccnacgcaaccgccccggccccagccacanccccagccacacccangcccgngccaacagccgcanccaagcccgngccagcngcagggaaccagcggcganggcagcaccccgaaccggggccagggcgacgagaaacagaggcaacagagcagaccgacggcgacgcccaaccgcacgacagagagccagacgaagcggcagcagcgaagcacagaagcacaggcaggaggagccaaaagaccgggaccaggcgaacaa

SEQ ID NO: 15727 - DNA, 279 bp, Zea mays
  Clone ID: MRT4577_114342C.1
ggaggaggctgagacccgagcagagtttgctgaaagatctgtggcaaagttggagaaaaccatcgatgacctggaagatgaagtctatgcgcaggggggggagtgcgaggccatcagcgaggagctggacaacgcgctcaatgacatcacttccctctgagttcccactgtggccatcgcaggcccctttcttgtttgtccattctctctgaggggagggggcagccagggggagcacaaactggccatgttgcacagccagtctgagggcagcctgag

SEQ ID NO: 15728 - DNA, 261 bp, Zea mays
  Clone ID: MRT4577_114343C.1
cccactcgtccgaaaaaaaaaaaaaaaaaaaccaacttatcattttaaaaaaaaccaaaaattatggcgttgttttacttaaataaggggggggggcgcccattttaaaaacactccttttttcttacacgtccttactttgccttaccttttatatcactcaacttaaattcaatggacttgcctaagtttaacaacattttgcttaaaaaaaccctattgtctcccaattaatttaactttcacaaaattctaattttc

SEQ ID NO: 15729 - DNA, 185 bp, Zea mays
  Clone ID: MRT4577_114344C.1
cacggggctgctgtaaggccgaggttgcggcggaagcggagaccatgttccgagcggcggctccggggcagctccggcgggcggcctcattgctacgatttcagagtaccctggtaatagctgagcatgcaaatgtttccctagcacccattactttaaataccattactgcagccacacgcctt

SEQ ID NO: 15730 - DNA, 396 bp, Zea mays
  Clone ID: MRT4577_114345C.1
gggttgggtttttttttttttttttttttttttttttggaaaagaaagggggccctaaattggatttacaaaaatggggaaattggttgaaaaaaaatttggggggggggggaaaaaccgttcaaaaaaaaaaagattgttggcacgtgcaggcttggggccggaaaaattttttttgggggtacaacaactggaaaaggaggacacggggaacgaacagaagccaaaccctgggaacacacacatgatggttatccaaaaaaaatgaggagagccaacaaacaaaaaccacaagggcaaatttaccacaactgaaaaaaccccccggcaaaaaagcaacaaccccaagggccttttaacgcttgaagaggtgcctgaccttggtccacgcctttt

SEQ ID NO: 15731 - DNA, 263 bp, Zea mays
  Clone ID: MRT4577_114346C.1
ggcgtctccgtcccgagtcaccaccgacccaagcaaaactgcacgcaccctgtcagcggtcccccaactcccaactcaacccctactccagctagctcgcggcggcggccagcggccatggtcttccggctgagcaacaacctgatcggggtcctaaacttcgtcaccttcctgctctccgtcccgatctcgggcgtgggcatctggctgggccacgtgctgacggcaccgagtgcgagcgctacttctcggcgccgttatcg

SEQ ID NO: 15732 - DNA, 679 bp, Zea mays
  Clone ID: MRT4577_114347C.1
ccggccgggatttttgttgagctttgctgcgcagaagcgtgaggccaggaccgggcgtgatgccggtgattctgccgtcgatcagcctgatacttcttagatgatggctgctattgtgtgaacagcagtaataggagccttatgctgaaagtgcgggagatggagaatgtatctgtgggtttcctctcataagtggggaggcgaacaaccagtagggcttccatttgatggtgcatccagctgatgctatggtgctgatatcttgatgacaaggcattattggcaccagtgctcatggtttcgagaagataggatgcctggtgttgctggcacaatccgatggctaaggcaagacacgacgcgtcggaaacatgctgtgagtcttaccattacaagatacgttcctttcgacacaaggtttcatgactgctcaccgagggaactgttccctgaactacctcaccgaagtccccatgttgctgtacaataaggtatcacgttaccaatgcccacgaatgcatttgatgattagagttactacgatgtgcttgcatgtgggcagacggctccactaatatcgaggaatttgaagctgggtctaactagcaaacttcatctggtgcgttagccctatcatatgttttaaaatggccatggttgaagagttcgatgcaccacg

SEQ ID NO: 15733 - DNA, 249 bp, Zea mays
  Clone ID: MRT4577_114348C.1
ggctgttcttgcttttatacctgatagacaaagccatgggcgcacatttaacggttgcgggaactgaaacagccttaacacgactacttgtaatacaccaaacgctacccgttgccagcactggtcaagcgcgtcatatttaatatggccactctaagctagatcggatccgtcctggcattagttggaacaaagttaaaacagattgtatatgcagatgcaaactgttgtatgtggtgatgcttatat

SEQ ID NO: 15734 - DNA, 293 bp, Zea mays
  Clone ID: MRT4577_114349C.1
cccacgcgttcgaggactcgtgggcggacgcgtggggagctgaactgtacgctggctaaattgtcacgccgaatatgcacccagtgccctgctcaccggcgatcggtttcaatggccgcaagcacagaggcgccatgctacgaatcgcgcgatggcgtggacgtccgctgacggttcaaccggtagttggcgggcatgctcacccacgactcgctggacttcgtggccgggctgcagcgcgagttccaagccgtcgttcgatacgccattgagcaacggttgtaggcccagcg

SEQ ID NO: 15735 - DNA, 1458 bp, Zea mays
  Clone ID: MRT4577_11434C.1
cattgggtacctcgaggccggccggattggacatgaagcttcaaacatggcctttcgttcctacataaaccgatcaccaaggcaagccgcggcaaccaatcagcaccatagcaagttatcgacgcgcgcgcaacttggaacaaagacgtggtgatggcacctgcgggcaatggcgcggacgaccatgagctgccactcttccatccgtccccgtgcgctcactactacgtgcagagcccctccgcggcgtcgcacacgctgagccacccggcgtccgactccatggcgctcatcctctccccgttcccgaacctccaccacgacgcggacgcccgccactccagcgacggccgcgaccacgagcacgaccacgaggaggcctcgcgcctgaccctgtcccgctactcctcctcgcgcggatccaacagctccttcccggtcggtgacaagaagcccggccgccggcggcatgcgctgtcggggcggtcgtcaggccgccacgacgatggcgacgacgacgcggacggcgaggcccagaggagcggggcgtggaggtacgtgaagctggacccggaggccccctgctgctgcatcgcgttccaggtggcgtggagggtggcggccagcgcggcgttggcgctgctcgtcttcgtcctggccaccaggccgcggcacccccgggtgtccttcagggtgggcaaggtccagcggttcgcgctgggggaagggctggacggctccggcgtggagaccagcttcctcaactgcaactcctccgtggacatggcggtcgagaaccactccaaggtcttcacgctgcgcgtcggcccgccgcggctcgagatgtccttcggccggttcgtcttcgcgacctcacagggagacggctggtcacacgacgtcggaccgcgcggcacctcgacggtgaggctctttgtggcggcgcaggacaagcccatgtacgcggcggggcggggcatgcaggacctgctcgagtccagccacggcctgccactcaccgtcacggtcagggcgcggtcccggtaccgagtggtggggagcctggtccggctgacgtaccgccacgactccgagtgcgtcgtgctcctcagaaggacgcccgacaggagcaacggcatccgtgccgctgccggcagcagggccacgaccacctgctccgccttaagctagagtgcccgatagctgccgatgtcgcttctgcccttcgcgtttttttcacttgattctctaccctgaagggttgaagtttgttggcatgcagtgtagcgtgcattggccagttctcggtattggctcgttgaaaccgcgtgtgatctagaaacatggatgttgaggtattcatgttaggctcgttcggttgcataaaaatccatataaattagagaagatcgggtgtgtttcaattcatagcaagtcaagatacttcatattgttctt

SEQ ID NO: 15736 - DNA, 315 bp, Zea mays
  Clone ID: MRT4577_114350C.1
cccactcttcctaaaaaaaaattatatttaaaaaaaaaaaaaaaaaaaaaaaaagaaaagttttatattaaaaagaaggaaataacaaaaaaaaaaaaaaggtcggtcaatctaaaaatatcctaacttacatacacatacatcaaaccccataactctcctataaacccccccaaacttcaatcatatccccccattttatcatcctgctcccttgctaaacctacccttttccccacttaatctacttgcaccacatcccctattccccatccttcctaataccaaaaagccccttacttattcccccttccc

SEQ ID NO: 15737 - DNA, 430 bp, Zea mays
  unsure (1)..(430): unsure at all n locations
  Clone ID: MRT4577_114351C.1
gggggggggggggggtgccngccggcgccctgcgctggctgtccaccgacggcgtcgcgccgcttgtggcggtctacgtctctcgccgtgtaaccacaacatctaccagctcgagccgtccatttttttaattcttgctgcctcctttcttgttttggctgggccccactgggccgggaactctcctcgggcatcgacgcccggttcctgcgcgaagccctgggcgtttgcctgcgcgtcgccgacaagctgcggagccggtgtgacatgcgaggctagatcgtccgcgtggagccggtgcactgctttcaccagctgaatccgtcgccgtcttcgtcgtcgttttctttcccgtcgtctcttggccatttccaatcgtgccatcgcgacgttgtcatgctcttcgttctgcgccatggaggtgaggcac

SEQ ID NO: 15738 - DNA, 131 bp, Zea mays
  Clone ID: MRT4577_114352C.1
gtagaagacgacgccgcgaacagagcctgcttctacgagagcatggacgccgacacccgcctcgtcatgcaggccgtgatccgcaagtgccctgccgtcttcgacgacggcctcacgtcgctcgtcgacgt

SEQ ID NO: 15739 - DNA, 1054 bp, Zea mays
  Clone ID: MRT4577_114353C.1
cattgggtacctcgaagccggccgggatcccaaatgtgcccggcccggtccctctgcactgcgcccatccatccttaaaccctcctgcgcgcgtaggcctctcgctcgtctcgtctcgtctcgtccttccccagcacaccacaacctctcctcctccttcgccaggtgcctcttcgttctcctctccgttccctgcgtggcgcgcgcggcgctccaggctatcaggacgaaataactggccgcgctgcacgccggccgccgcgagaagaagcgctcgccccgcgcgctctgccgctggttcggccgtagtccgtcgccgctgattgatcctgaggtggttacgccttatatcctgggacggaggtagtagtacgcagtcaatggggcgcgccgcctgctttgtctgaagcactcaatcaaagcccccccctggaatgacgcccaaatggaagaacgctagctagctagctaggctagggcagttgcaccagcagcgtcgctagccgctagcctagcctgaccgacagctggcgcctgcctgttgtcttccgcatgcgccagaggccagaggatagatgcatggggccccgccgcctcctaactggactctgctgtgtgatgacgagaataaatacgcgtttgttaattagtcactgatcgtaataataataaagctcctataatgtgttcttacatgcatctgttttctaatgccgacggataaggatcaccttagttttttttttttttttttgctctgaccaatcattcaatcctgcaattgttttaaaagcctgactgggaacgaagataaggtcctcgagctctcgctaaagctgtagcttaaaactccgcggtgcctcgcagtgcctgcatatgagatgatgagacctcttgtcttctccagtctgatcactcccaaccaatttgttttgtgctggcaaagggaaccttcggggtaattacggtccaaatggcagcgcccagtgcatttggatttttggtagcaaaacaaagtctccaattaaacaaaaatcgtcgtttcggatgtgaa

SEQ ID NO: 15740 - DNA, 594 bp, Zea mays
  Clone ID: MRT4577_114354C.1
cggctggccagtggccaccgcctcctcctccccgggtcctcccaaatcggtgccacctgatctgggtcaaatgctgacgcgtgctcctcctccaccttctgtgttcctccagccgccccgccccgtgatggtcgccgccgcgtcgccctccgccaccccgctcgcgctcccggcctcctcggcgctccccctccgcggcatcgcgcccgtcgccgcgcgccctatctcccaccgccccgcgcccgcgttcgctctcctgttgcccccgcgggccgccgcggcctcgcgatccccggccgacgacgttcccgacgggaattcctcgcacctcctcgccgtccccgtccctgtccccatggaccccgccgccgctgaagacgtccccgttgccaagcagctgcaggtgcccgatgtgtcgccgcgcccgcctgagcgggacttcgccggcacgccctacgtgccggtctacgtcatgctccctcttggggtagtgaatggtaacggtgaggtggtggacgctgacgagttggtcgggcagctgcgggtgctcaaggcatctggagtggatggtgtcatggtcgattgctggtgggg

SEQ ID NO: 15741 - DNA, 160 bp, Zea mays
  Clone ID: MRT4577_114355C.1
catgaagactggcttgtctcagtgtttcaacctcaccagggctgtctcttggtccacacctcgctccctgttagtgccgtatgacagcccccatcaaatgaccttggccaagtcacggtttctctgtggtcaaggttggttggctgattggtggaaagta

SEQ ID NO: 15742 - DNA, 470 bp, Zea mays
  Clone ID: MRT4577_114356C.1
atatgaattgcagatccaactatcaccacttggcaatttctcccccgaaacaacattttgcctaccgcaagagaccatggtgctctctatgaagtcatggcgctctcacttctcacgttgcttcttcgcatgcccccgaggttgacgtgtgtcttatcatactgatcctcacttcagagaatgtcagacacacctggctcacatgctgtgccgttcctggtaactgcgacacaaggaaacgcatctgagtgctgaaggaactgcgggattactactatatctgatctcgccgcgagatcacttgcgcgcagatgatctcatgagattcgctagtccgcatccataagagggtgatcgacgggatcagctacccatacgaggagaagcagatcacgctctatcatcattgatgcgtgtgatgaggtcgaagtcaccattgcagacgcgtcatgaccatctatatattcggg

SEQ ID NO: 15743 - DNA, 543 bp, Zea mays
  Clone ID: MRT4577_114357C.1
tttttttttttttttttttttttaaaataaagagcttttgtcatctctcaaggaaaaatatattgttatctagtgggtgctctccatacaaagatgctaacactgaaatcaagttcgccgtactgttacgaagtttaattcagtaatggagtacataaaggccaaaggtactatgcttgtccgagaagatgccctgaatccagccattacttcctcacggcaccgaccttcttctgtcctatagagaatcaaaccatgaatcaaaatcttccgatgcagatgcatttgatggaccataacggatgggtacgctatcaagcggggtgctgttcgatgcttgtgcagttgtagtttgtttcggctcatttaagcatggtgaagtgtcttcgagcaaatcatccaccgaatcatgaattgatggtgtcacatcaattttcttagtgtatctgaagtcggtgttctggccagaatcaaccgtcggttgagaagttatacattgcgtagcaaagccttcgttctgtgcagcaatatgagaagtctctg

SEQ ID NO: 15744 - DNA, 118 bp, Zea mays
  Clone ID: MRT4577_114358C.1
gcacgcggacgtaagctcgaaatccggctcgagtccacaaatatcaagacgacatgatagatctatctgacgacatgagggtagtggagcatgtgaaactagaaaaacggcgcaatac

SEQ ID NO: 15745 - DNA, 441 bp, Zea mays
  unsure (1)..(441): unsure at all n locations
  Clone ID: MRT4577_114359C.1
gtctcccagcgtccttcattactagcacgagggagaaagcgatcaccgccaccaggaggaagaggccagaggggagtgtcatggcttgcactgtccttccaggaggccgtcccgcttgtccggcgctggagaagctcttgccgcgtcgtccgcgcccggggctggctccaccctcagccggggcagtcgccggcggtctccgcgggtacaacaccggcgctcagcttcgacgttacgaggggcgcgagtcggaagacgatagcgtccgcgagtacgagagccggcgcggcagccgggactacgccgcgcccagcctgttctcagatgttttccgtgatccgttcattgcgccgcatagcctcggccgcctgctgagcctgatggacgacttcncggtggcggcgccaggccttgccggtgcggtgcgccgtggctggaacg

SEQ ID NO: 15746 - DNA, 588 bp, Zea mays
  unsure (1)..(588): unsure at all n locations
  Clone ID: MRT4577_11435C.1
caggccggccgggttagcctactccgaanngccgccgntggagtgtttacccacgcaggagatgagaggggggtttgtcaagacccacaagagaatgcatacctcagcgttccaggtgacgttcaagagaaggcgcgcttggcaagacagacttcagggccaggacaaggctggtttaccaagatcaaaacaagcacaactcccccaaaataccgcattgtttgtgcgctttaccntccaggactataccgnnacaaatctctcccctagcatatccggcgatatggttcctgcttctgcttactcccaccagctggcccgatatggtccttgaacttgttctgacccactatgcagctgcctactgcactggtcctctttcggcttcccgtgcgctcaagacccgnggtccagataaggaatatgagggcaaatgtcgaggccactggtgagggatttctttttttgagccactcgatgagaaggaggccctctccgtgctttccttggatgttggcccttattagggacttcgacttgggaaaccgttgtcttttggtgcccctcaagggaagcttttggatggtg

SEQ ID NO: 15747 - DNA, 268 bp, Zea mays
  Clone ID: MRT4577_114360C.1
atagagtttcatcgcctcgctcgcgtcgccaactacatccgctcgaaccgcgtccttacatgccatgcccaccatcctcgctcgctccaaccatgtatctacatgtcgcctccgacatccacgcccatgcttcgtgtagtgcttgacgcgcccgctccaaccgcgtctatgcatgccgtgactgccatcctcgccacccgcatgcctcatctgcatcctccgtttatcgtacttatccgcgatgatatgctagagcgtcacaaggcgg

SEQ ID NO: 15748 - DNA, 768 bp, Zea mays
  Clone ID: MRT4577_114361C.1
tattggttgaggcaaggcaggccggggtggtatacatcccgaatccgacgctccatcgagtgtgtgcggcggcgggaggagacggaagagaacgatgcaggcggtggcacgggcgcgtgggcttgcggctgcggctgtggctgcgcggccgtcggcgatggaggcagggcaccgcgggcaggtgcagcaagcccggggcattgtggtgcaggtgagggacgggaacctggagcgggcgctggcggtcatggagcgcaagatgaggtccagcggcatggagcgccttatccgagcgcgcacccactaccacgtgaaagactcggagaagcgcgtgctcgcgcgtaaggcgcttatgcagcgcgtccggtcccaggagctcggcaagaagctccgcgagatcctcatcaagaaaatcaggggccagtgaggacatcagcgcattggccatttacgggcagcatctgtgtgggtgctccctttttgagcgtgtggagaataaactcaactgcgaccttgagcaagagaacttttgctatattgcatgaaggacagattgagaataaaactagtttttggcgaacgaactattgtattttattgtacaatttagtatctatatatggatttaactgctgtttgtgctggacttagagcctttttgtttgggattataatatgttcagattatataataaaaaaaaaaaaaaagcggcctttgctaaaaatgttgaacatgccacgtttttcgcaagtaacgtttacaaccgt

SEQ ID NO: 15749 - DNA, 220 bp, Zea mays
  Clone ID: MRT4577_114362C.1
gccacataaattattttgtttacactcaaaagttgtgatttgaattatccaatcagccaaaaggacatgacccgggctagatcgagcctgtctttttaattttgggtcccaggctcacacgtaaaacacacttccttgggccacgttttacatacatgcttccatgcacatgcaagcgtacgtgcacacactgttagattgtattaagccaaacataaaa

SEQ ID NO: 15750 - DNA, 1267 bp, Zea mays
  Clone ID: MRT4577_114363C.1
cacgcactcgcctcttgtgtctttctttgtgagctgtggtgtggtggtcgagacacacacagcagcagcaacaacaacatacatacatgcacgctagcctcgcctcctacgccgcggcagctatgccggcgctggacctccgccccgagatagcgcacgcgcaccagcccgtcatgtcgccctctcaccacggctgggacggcaatggcgccacagccgtgcccacaccgatgcccaagaggctggacgggaaggtggccattgtgacgggcggcgcgcgcgggatcggcgaggccatcgtgcggctgttcgccaagcacggggcccgggtggtgatcgcggacatcgacgacgccgcgggggaggcgctggcgtcggcgctgggcccgcaggtcagcttcgtgcgctgcgacgtgtccgtggaggacgacgtccggcgcgccgtggactgggcgctgtcgcgccacggcggccgcctcgacgtctactgcaacaacgccggggtgctgggccgccagacgcgcgccgccaggagcatcctgtccttcgacgcggccgagttcgaccgcgtgctccgcgtcaacgcgctgggcgccgcgctcgggatgaagcacgcggcgcgcgccatggcgccgcgccgcgcggggagcatcgtctccgtcgccagcgtcgcggccgtgctgggcggcctcggcccgcacgcctacaccgcctccaagcacgccatcgtcgggctcaccaagaacgccgcctgcgagctgggcgcgcacggggtccgggtcaactgcgtctcgcccttcggcgtcgccacgcccatgctcatcaacgcctggcgccagggccacgacgacgccaccgccgacgccgaccgagacctcgacctcgacctcgacgtcaccgtgcccagcgaccaggaggtggagaagatggaggaggtggtcaggggcctggccacgctcaagggccccacgctcaggcccagggacatcgccgaggcggtgctcttcctggccagcgacgaggccaggtatatatcgggccacaaccttgtcgtggacggcggcgtcaccacatccaggaacctcatcggcttgtgaatcaatgtcaatccgttccaaatatcccattcccatggctaggctaattagagaaggagagagagaaaactgctattagttgtacttgaagtgatcgattttcatttggttgattgattcatcaacaaaagtgttccagcaacaagaaagagtaaaccctcgagccgaat

SEQ ID NO: 15751 - DNA, 919 bp, Zea mays
  Clone ID: MRT4577_114364C.1
cgacgctccatcgagtgtgtgcggcggcggcggcgggaggagacgaaagagaacgatgcaggcggtggcacgggcgcgtgggcttgcggctgcggctgtggctgcgcggccgtcggcgatggaggcagggcaccgcgggcaggtgcagcaagcccggggcattgtggtgcaggtgagggacgggaacctggagcgggcgctggcggtcatggagcgcaagatgaggtccagcggcatggagcgccttatccgagcgcgcacccactaccacgtgaaagactcggagaagcgcgtgctcgcgcgtaaggcgcttatgcagcgcgtccggtcccaggagctcggcaagaagctccgcgagatcctcatcaagaagatcaggggccagtgaggacatcagcgcattggccatttacgggcagcatctgtgtgggtgctcccgttttgagcgtgtggcgcagcttgagaataaactcaactcgaccttgagcaagagaacttttgctatattgcatgaaggacagattgagaataaaactattttttttggcgaacgaactattggatttaactgttgtttgggctgaacttaggccctgtttgtttgggattataatatgttcagattatataatttaacttattttgaactaacatttagtttaaaataagtgagattatataatctagccagattataatttcaaacaaacaccctttaggtcttgtttggatactcttatatccaactcaatctacatatattaaaatggattggaatgtaaattagtttaagttacattacagtccatctcaatacacgtggattgagttgaatacgagagtatccaaacaagcaattgtgtaaatgttgtctatgcaatgacacgaagaaaacggaaatgaaaaatctcgtttactg

SEQ ID NO: 15752 - DNA, 526 bp, Zea mays
  Clone ID: MRT4577_114365C.1
ggccgcttttttttttttttttttaaacaggtttccgataaacattaagaatggtgtaaactgacaagattaaagccacatgacatttagtcttaacgtttgcatacctaacttatgatcatgctggattttgattatacaatgcacatattgaatttagcagcatacctgcactttctgaacattctccggaactgaatttaaccattaaagtcctccgacagctagggctaacctcaattcctccgattcctgatagagcaaagggcgctctacaacagctagggtttgatcctggcagggacaattgcctcaataaacccatcatgcactttgaacattctccggaactgaatttaaccattaaggtcccagttgagaggatccctcggggatgcagacccaaaacaccactgtgttagctcaaaatacttgagtgcattgtatgttcacttaagaatatgaagtaccaccctggcattttgatggttggggccaagtgccagtctgataaccagttcacaag

SEQ ID NO: 15753 - DNA, 289 bp, Zea mays
  Clone ID: MRT4577_114366C.1
gtccagaaagcacccgtgtctatatatgtatagttccatgcgacactcaaacacacgtgtgggcacaccatttgaaccgacagcaccgacaaaacacatgtttacataaccaggggctaactgctaagcctgtaaacagatggcatgcctagctgtaagacagaagcgatacagacacgaattaaacctaggccggtctcaggacttaagccctaactatcctagtccctgatggggttgggcctggtggacctgctagcccacggagggacgaaccaggtgggagaga

SEQ ID NO: 15754 - DNA, 363 bp, Zea mays
  Clone ID: MRT4577_114367C.1
tcctgaggaagtgttggacatttttcaaccacctgaggacactctatcatttaacgctcaatgaatctacaggcgaagagattggtaattggactacaaactacccgagtactctcgcatagaaagcaggagtaagatagtcccaccggagctactgattttcaataccctgagatggccatcaacgaaacataccccacaaaaatattatatacccgcggggcctcacaaagcttatagaactaattcaatgtggctaccgtacactgaccaaacctgattcaccgtagaatgctcccactttatttagaacacacgcttatactgccgcaagactacactgagagtcactgattcatgcca

SEQ ID NO: 15755 - DNA, 388 bp, Zea mays
  Clone ID: MRT4577_114368C.1
aacaggggaacccccccttggtttataggggccaaaaaaacccgactacgggggctcactaaggaaaagggccgggaaacagctaggccacactagaagctagctagctagctagggggaaaaaaggcccccggggggggccagggcaagcccggttttgggctccaggggccccgggaccctgaaccccaccccggacgggggggggggggaccccacccacaagccccacaccttggccacggccccaaaattcctcctattttccccggggcccccccccatgtcctcgccgggggccccccgcttaaactttttggggaactggtccgtcaccaaaaacgggaggggtgccatatatcccccctttttcccacttttttggttt

SEQ ID NO: 15756 - DNA, 587 bp, Zea mays
  unsure (1)..(587): unsure at all n locations
  Clone ID: MRT4577_114369C.1
ggagctgggaatgaaattttgtacagggnaagagagagagagagggtagttgatgggaagggtttgatgtgactgccctttcttttcgctttgcttcctggatccaactgccgccgccgcatctgtcttcgttgattcggtgttcttcgatcggatgcctttatctgcctaggtacgtgcgccgattcttgcgtcgggggattcaattctcggatgggtggagggggattcgtcattcgtgttactgagctatgagtgggtggatgggttcgtgagatcggagcaagagcaaagcgcggggtgtaaatcctgagaggaggaagagaaggaggagaggagatcgagaccggctccccccgtcttgcttgtgcttgtcgcgtacggttcttgtaagaacccgcagctgccgcgtccggttctttcaagaacccgcggcggggatggatctgtacgacaagcgagaggacatggcgttgcaagacggggactcctgcctggcttcccgggcttcgcggggcggatgcgacgtcgatttacagtgggtggatggcctcctcgaaggcgccggacggaagcggcgtgcgccg

SEQ ID NO: 15757 - DNA, 207 bp, Zea mays
  Clone ID: MRT4577_11436C.1
gtaacacgggagtggtttatactaaggaggagatgcgaacaacgcacctgccgtagagaaggcggacaacacaactccaaaaccatagcggaaagtcaatacctccaaacacatagaacagaaaggattcaagcctacctcgggccaagagtacccgaaaatacctacgagctaatgagcaaacgcatctcattatgaaaggcacca

SEQ ID NO: 15758 - DNA, 1576 bp, Zea mays
  Clone ID: MRT4577_114370C.1
gcagtgaaacagatggcttgaccggttcctatgcggcggcggcacacgccatacagcagggaaagcattcgccgcagacccgtggtagaagaagagggtgagaccagtccatctatttctagctatccatcttctatatatatacgcagttatattatatggccaattagatagagattagagagggagttgggaatgaaattttgtacagggaagagagagagagagggtagttgatgggaagggtttgatgtgactgccctttcttttcgctttgcttcctggatccaactgccgccgccgcatcctgtcttcgttgattcggtgttcttcgatcggatgcctttatctgcctaggtacgtgcgccgattcttgcgtcgggggattcaattctcggatgggtggagggggattcgtcattcgtgttactgagctatgagtgggtggatgggttcgtgaggtgcttaccagatctcagcttctcgatctgtccttcgcgatttgtcgcccaattcgtttacctcctcctatttctgctcgcagatcggagcaagagcaaagcgcggggtgtaaatcctgagaggaggaagagaaggaggagaggagatcgagaccggctccccccgtcttgcttgtgcttgtcgcgtacggttcttgtaagaacccgcagctgccgcgtccggttctttcaagaacccgcggcggggatggatctgtacgacaagcgagaggacatggcgttgcaagacggggactcctgcctggcttcccgggcttcgcggggcggatgcgacgtcgatttacagtgggtggatggcctcctcgaaggcgccggacggaagcggcgtgcgccggaagacttcgaagacgaggtccagaaaatggacgaggtggatggcggtggcaagcgcagcaagccgccgtcaccgcagccacacacgccagatattcatgaagctcatgtccctggccgccgcaccaccgtggtggctggtggtggggagcacagcggtggtgggggtgacctcataggagaaatcggtcgggacctgtccatcaactgcctcctccggctgtctcggtcagagtatggctcagtggcatcgttgaatcatgatttccggtctctggtgagaggaggggggatctacaggctgcggcggcagaataacatagcggagcattgggtgtacttctcctgtaatgttttggagtgggatgcctatgacccctaccgcaagcgttggatctcggtgcccaagatgccgcctgacgagtgcttcatgtgctcggacaaggagtctttggctgtgggcaccgaactacttgtttgggatggcacatattgtcttcagatacagtatactgacaaactcttggtcacgaggtgaggtgatgaactctcctcggtgtttatttgggtcggcaagcgttggtgagaaggcatatgttgctggtggcactgattctcttggcaggatccttagctcagcagagctatacaactctgagacacatacttggacacctcttcctagcatgaataaggcacggaaaaattgctctgggttgttc

SEQ ID NO: 15759 - DNA, 281 bp, Zea mays
  Clone ID: MRT4577_114371C.1
acaagtaagagcagtgtccatccggtgggtcggacggaactagctcctctgtcgccaaataccctaggccctgacttgctttggccatggtcgaagcagcgctagccaggcgagcctcctgctccagaagcagatcaaggatcttgcgaagaaccccgtggatgggttctccgccgggcttgtaggcgacagcaacatcttcgagtggcaggtcaccatcatctgaccgcctgacaccctatatgatggaggctacttcaatgcaataatgaccttccccc

SEQ ID NO: 15760 - DNA, 670 bp, Zea mays
  unsure (1)..(670): unsure at all n locations
  Clone ID: MRT4577_114372C.1
cgcagnacgcgncagcgaaggaaacgccccgtgctccacctcgcagccaggcctgtgccaccacgcgtcgtcgcgccacggcggccggagcgacgaggccacctcgtcccggagcggcggccgggtcctcgcctcccgccacaggaagagatcgccctcggatttcttcagctctgatgggtcgccgcagcccgggaatggcacaccggcggcgaggaattgctccgacgccggcattgccaggaatgactttacctgaggcaggcaacctgcgatgactggtgtagatgctgatgctaacattagaaggccagcttttagtgcatccaagctccggggaagatgcggatcacgacggcacggcgagatcagttcccaccgaggcatacatctttcttcgatcatcagttcgtcttcggtcctcaagcaaccttgcacgccgcagagtttaccagagcagcagtcctagaaccatagtagtgttcctaaacgtcgatggcttcgctgagattgtatatgtccccattacttcgttgtgttcgattccgtcctcttctgcttgttttctaaccttagagaaacggtatagggcaggctcgcagttgcaccggcattgttcgatggcctcactgtctgctttcttgaattgtgccctgagtggctgagccct

SEQ ID NO: 15761 - DNA, 356 bp, Zea mays
  Clone ID: MRT4577_114373C.1
gaatgatgtaacaattaaaaatagatgaaaactggcccattattcaacttcctctatcaattccaactagaacaaacaatgactctgttttttatataaatttacatgtagatatttacaagtttgtggatcctttttataataataattgttatagaacagtcattgtgaggttctgtttagtgtttaccaccccacatctctgctattgcaatcccacaccttggacaggacatatacagtgcaaaattgaaatttaaactgaagtttgcttacataaagcacactcgaattgaaaccaaaacaaatattgcactctaataacatgaaattaccaggaattgccttataattta

SEQ ID NO: 15762 - DNA, 134 bp, Zea mays
  Clone ID: MRT4577_114374C.1
ggtcgttgtcttaaagatttgagcttattttaggtcaaaacgaaacaagagggaatcataacacgggtacaggggaattgttggcgatcctcccagcaacatgaggtaccccttagaagaaaatttacgatgtt

SEQ ID NO: 15763 - DNA, 322 bp, Zea mays
  Clone ID: MRT4577_114375C.1
cgctccccagatccagcatgcagatcagatgtttacattcacggaccggaaggaaaggaaagggttgaactatgagcgccgtggcagtttcgtcgtaactgaacccggacgcgccgctcttcatgccgacggcgctgctgtgggtggaggacttctcgccgcactggtggaacctcatcaccaccactggctggttacgtgaccactggctccgcgagcgcgcacatctggacgagatggccgagcagatcgactcggaacgatctcctttcatacgacgaggacctcttgtactacgaccagctcgagcagggccccgtcg

SEQ ID NO: 15764 - DNA, 888 bp, Zea mays
  Clone ID: MRT4577_114376C.1
ctactatggctgcaaaaatgctctactaatgtgtttactgaggacatattctgcgcagtcgcttatgagcaagcatgggatctaacaatctgtagcatcccaactagatctaaggatgactgtgatcttgtttttgctttcttccagctaataatcggttcgattttactttaaacggcttacataacaacaccgttgaattctgatcaaattcggcgtcagggtcgaaggccacctctttatctaagtatcttctgttagatgtttatgggaatctaaccattttataggaactgcaaatataaactcgctagtaacacgtatatgggacttaaaccctgaaccacctcagaatattatttgctactttaatacgtatatttttttaatatgtatatatgtgtttcagtgaaataactgagcaatttccttcattacttcagttgacgcagttattggttatgttgttacagagaacatggtgttgttggtgatatgagagatgcttggccaaatgctcgagtgcgaaaaaatgtgtcaataatacacacatatcatggatttaaaggtgcccctgacacttcatttaggtcttattttccagtttccgttgtaaaaactgctagggaatttttgcgtttattatgccaaagtaaaacttggaattgaggaactgacaatgttatttgatcctttattcaattcatgtcgggataaatcaattttttagtcttttggcttttacttgaaaaaaagtgccataggtcacagttttgcattatttattttatggtccttgatgacttgtactaatatgctccctgggcgaatattgagatccatccactataactagctgccttttttttagctataactaagtcttta

SEQ ID NO: 15765 - DNA, 373 bp, Zea mays
  unsure (1)..(373): unsure at all n locations
  Clone ID: MRT4577_114377C.1
gcggcgcgactcgtccganaatgcgagaccctcgagaggcgttccgtgtatngactaggtgccggataggaaggggcgagggaatgagggggggggggatggcctggatctggccgatcaggcaggactgggagccggtggttgtgctgaataagggacccaccggcggtggcaataaggatgagaagggcgtcaacggcgggcgccggtccggcgcggaaatcgagaccatgaaaaatgttaacgctgggatgaacaagggggggggcatcgggacattccttaacatcaaatggctggacgacgactacatagaaccttggcgatgagcgaggtccaagggatctgaagaaaaatcttatgcaaggaaggg

SEQ ID NO: 15766 - DNA, 648 bp, Zea mays
  Clone ID: MRT4577_114378C.1
taggggccttttttttttttttttttctttttttttttttttttttttttttttttttttttttttttttttttttttttttttttttttttttttttttttttttttaacaggaaaacccccttttttttattactttaaaaaagggggaattaaaaaaaaaggggggggggggaaaaaaacaaaaaaaaaagggggggaccaacccaaaaagggtctcttggggcccccctttaaaggggggacccttccgggggggggaaaaaaatccccggcccggccatgggggggggattcagttccggggggaaattatccccggcccgggttcggggagggggggaaaggggatcgttgagggggcccgggaaagggcaaaaaagttcgggggggggggcaccgggggaattcgggggttttaggggggggcggggggccccatcgaaacgggttgggggaaaaaaaagtcctccggcttttgggccccctcccaaaggtcggggagggcttcccgggggggggggggggcccccggggggggggccgggcctttcccccggggggattggcccaccagaaccggggggaggccaatctgtttcccggccgggaggttgcgaacggtggcgacaaaaaaaaccccttggg

SEQ ID NO: 15767 - DNA, 401 bp, Zea mays
  Clone ID: MRT4577_114379C.1
acacccttccgcgacacccttggcccggggcccaccttggctaaaataaagccgaaggctttgttcgggcaaggcaagttaaaaaaggtcccgggccaaataaccttggccacaatcgtaacttacatgatcttgggcttcctggtcgggtcctccgtttaccttgcttacaggtcctgttggccaggcacaggaccaccggaggcattggccccccaggggaactgatcccccgccgactgcttggttgatctcgctgtggtggattaatccggttggggtaaaatttttggttgttgctgcttaccaattggggtttttggaccttgattaggttgtttgttgatccggttccaccgtacccgttgttttttatgtgaaattttttccttttatttaat

SEQ ID NO: 15768 - DNA, 210 bp, Zea mays
  Clone ID: MRT4577_11437C.1
gcgcggacgcgtgggcaaggctgattatccttctattttcttccatgtttcctcacactttagctcgtttgggggtgtgtacgtgcaggttgacgtagttataatgttaaaggactaatgttcttattaccaatttattataacaagtgtgtgcatataaatttttctgagctcttaagctgtgagcctctcattttaaaagtgtttata

SEQ ID NO: 15769 - DNA, 261 bp, Zea mays
  Clone ID: MRT4577_114380C.1
gcgttggatgcctaaatccacaggtttggacttttgaagtggattatccaattctgtccaaatctggacagcattattgacacgtactgccagaccttcctaagagtctaatctcatggagatagaaacaccgaagtattagacacatttctaaggcgtccgcatagagtctctatcagattgatccggggacgaatactcatgagagtgataagctatgccgcgaactgcttaatgccatactgaaaatacagccatggg

SEQ ID NO: 15770 - DNA, 452 bp, Zea mays
  Clone ID: MRT4577_114381C.1
gggggaaaaaaaaattcgaggccttacccccaaaattaaccgggaaaacaacaaaaaagcaagccaaaagaaataaaggccaggggcgaaaaaacagggtttgggaaccggagcaacttcttggagcccctgaaagggccccaaaacgggggcaccctgccttccgacaccacccaaaggtcggccacccttccagggaaaaaaagcccaacgggacccaccaaaaacacccccccctgaaaaaagagaaaaccccggaggagccccccaacaggggccaaaacaaaaagggtaaaaggccccccaaggaaaaagaagggcggcttcttgaagggtattttcgggaaagcaaccccacctttttgaccccccgaaaaaggggccaaaaatgggagggcaagggttcccgaaacaccaaacgaaccccgaggggcccccaacttttggtccgg

SEQ ID NO: 15771 - DNA, 855 bp, Zea mays
  unsure (1)..(855): unsure at all n locations
  Clone ID: MRT4577_114382C.1
ccggccgggatcgctcctctcctccaacatcgctcacgcggtctcctctccccgctcagctccgctcccggagacacgcaagcttcccgttcccgggaacacgcactaaagatgcctccagccttcgccgccgcaccttcctcctcgatatgtggcgttcgcatcccaactgtgcgccgtttcgaagcgcaaagcacggtttccacgcccagatttctgcgtaatcgggtggcaggtaaggcaccgctccccgcgttgcagtgcaccacattatcagaattgccaacggttaattgttgtagtgcagcctacaagtttcagttagtttattttctggatagtgggtatacaaccacaattttaagctaacagttgggccaaatacatgagtgccctttttcggttctcgcattttctgttgatatctggaagcctgcattggatctgtcagcgccattgccactataccaccacacctttacctcttaaataaaatcgcgccatttgtgaattattttgtacacgtcaacctgtgcagaaaacaaaatcatgatagtaataggtcaaaatctgtagattctcaagctcaatggaaagttaaacatgcaaactgctgattgcgcataggcctatttatattcattattatgttttctattactttttgtggactgttcataaagcgtagctgtttatttgataattagtagcccaacaccaacatccacactattgttgcagcaaaaacacggtctacatcagcttggtccttgaaggctggcttgtgngattctctcagatctgggtaaagtacattgtctgcacttgcaaacacttcatttctatgatttcttt

SEQ ID NO: 15772 - DNA, 299 bp, Zea mays
  Clone ID: MRT4577_114383C.1
gggggcaaagggacctagttactgccaccactaaggtattttttaaaggggcaaaagccatgttctttttaggggagagtatattttggtgaagtaacggatacaaactaaacacacgcaccgacaggagttcatattattttgggggaaattttaccatccaccactcccaaaatcactacccgggtggccgttccatgaaaaaattggccttttatcccaggaaatgaaacaaacttttttttgggtggggttaccctaaccaaatttgggattttttttgggagaaggttttgaaa

SEQ ID NO: 15773 - DNA, 402 bp, Zea mays
  Clone ID: MRT4577_114384C.1
ggacagaggaaaatgaacaaaaaacaggggcgaaaaaaccaaaccaccaaaaaaaaaaaaccaaggaaaaaacaagggctaaaagaactttaaaagggaaaggagggccccaaaaaaatgaggggccaaaaaaggggaaaaaccaaaaaaccaaggaatagtaggaggaatatgccaaaaaaaaagcttaaaaaaggggcaaggaaaaaattggaaaatgcaggcaagaactaaaggggtttggagggcaaaaaactttttaggccaagcatggggaaacagttcccctcccaaagggtttaaaaaaaaacaactgccctccctgacttggtaacccagacctccgggtggccggggagggtcccgaaaagccgaaaaccgaaaatgcccacggccaacccc

SEQ ID NO: 15774 - DNA, 360 bp, Zea mays
  unsure (1)..(360): unsure at all n locations
  Clone ID: MRT4577_114385C.1
gaattgcgcccgacgaagcatgacgccaggccggaagcccgaaaaacgacccgccctaaataaaaagctaaggccgaccccactttttttccctctgaattcctttctagggccaatatataaaaggggcccagcgcaaaaattaagggaccacccttctatgccgattcccaaaaaaagcagggcacagaaggggggcaaaacgcaggcccccccccaaaaagggcaaaccccacccgacggccgccaaagggaaaaacaaacaagcgatccccacccaggnaaagcccaagccacatggcatggacctccgcgattaaagggaaccaaccaaccggtccgtcccaaggcatcaaaagg

SEQ ID NO: 15775 - DNA, 657 bp, Zea mays
  Clone ID: MRT4577_114386C.1
atgaccgcgaccgcgtgggtaacacacgctcacaggagacccccaggtgattctcaccaccacgcaagcacgtcggacctccaaaagaacttctttgaggcccatgatgctatgaaggcagacgaggaggcaaagaaggcggcggaggatgaagtgtgcaacctttcgattgcctttgacgatgccattacgatgcaagttcaggcgcaaacttcgttgaaggagcacagcgccgaactgcagaagctccacctagccacaagcgaggtgtgtgaccacctctctcctacaccaccaacccatgcgcctttgatagaccgactgttggcgctgctcgagcacgtggagcatgtggtcttggaaggggcattcaacatgggtagtctagctttagggcagatggtttccaacttcgacgagatcgatgttggtgtgatcgcggtgggctttgctgcatgccgaagcaacgaggaactagatagtatcgaagagcagggtcttgcgaccgaccccctaaccgtaccacagtcgcgaccgtttaggatggagatacgccttggggtagaccgtgagcctgggtacatgtcctctagcccccgagcaggacatatgcaccggacagtccagtggcacatcggacagtccggtgcattctga

SEQ ID NO: 15776 - DNA, 124 bp, Zea mays
  Clone ID: MRT4577_114387C.1
tctctaccaacataacgcgtgaatagaagcgagatggtacgcgcttgggtgcctggctggcggcaccgccacagggggcaaaaaagcggagcggagcgcgggcaaaacaacattgtacctggca

SEQ ID NO: 15777 - DNA, 450 bp, Zea mays
  Clone ID: MRT4577_114388C.1
aaacgggggccctaaatcaaggcaacactacatatataaaaagaataaagggttctttacttaacaaaacaatgctgaaaggaatcttggggtacaccacagtagggccaattttttttaaacatcaccgctaaccaaaatcttaataaaagcgtaataacaacacttgctagcttacaaaaaaactgacccattgataaaacaaaaggaaaatagcttttaaaccctagccttccaacgaaaaagccggccaatcccaacctaaaaacccaacttggggcggccccagtgcctgcccttgggttacctgaggtattgaagggcccatgcggatccatagggatggggcggttctggcccatttttttcgccagtttttttttgaccgaaagtcttgtgcaacggcatttttgcggttgcggcggcggcggcggcggcggcccaaaaacc

SEQ ID NO: 15778 - DNA, 304 bp, Zea mays
  Clone ID: MRT4577_114389C.1
ccgacgcgtgcgcagacgcctcggtctatacctaacaaggcaacccggagacatcggcgagctctatgtcatgaatcagtctaaatagtgagctgctcactggccgacctactgaacaatacaatatgacgactgatacagaatgaacattggcgtgcttgcacacttagctacgatccagttcactcagcgtgctccctgaaccactagactctgattatgtgctatagactatgtacatcatactgacagtacgctagctgcatacagtgctgaccactgtatatgactacagcgcatattc

SEQ ID NO: 15779 - DNA, 176 bp, Zea mays
  Clone ID: MRT4577_11438C.1
agcgtccgaacaacactctcccaatattatcaccaagttcaagcgccagggcctaatgttgttgatgttgtcgccctctcaggtggtcacaccataggtatgtatcggagcactagtaaaccggcagaggctatacaaccagacaggcaatggcatggatgacagaacactggatg

SEQ ID NO: 15780 - DNA, 689 bp, Zea mays
  Clone ID: MRT4577_114390C.1
ttttttttttttttttcgcaaccacgaaatcgacgacgcatttatacttgacgagcgttgcactggcgctttcctttcatcttccggcgtgaacgcaaggtgcaacaagctgctgaaatgacgacgatgctagggatgcagacattgatgccatggatttggacacgaccgccacacaccacgtgaagacattggatgccagagcgacaagggcgcagcgacttcgacgctaagcaccggagcttgacgatgtcgcggcgcagcaggaaataatgacgccacgatggctaatgtgatagttgcgggcagcagggaggctcgacgtcgtagtggagtggacgcacggccagagcaccacaccgggtcgagcagagagaggctcccagcgcgcggcaaggtgaagaggctggctcacccatggatttgaagttgctggccacagcgaggctggggagaatgaaggggcgctcgcagcagccgtcaccggcaagggtgggtgcaggggcgcggctgagaccgagcacgtccgctgatggaggaaggaggctgaacacaggggcacaacggagctgaggtgagctcgggcgtcgggaacagggatgggcgagtggggtcaagcagggcagggcggaggttgaagccaggcgagctctgccgaccagcaacgtgaggaagacgccgactgaacc

SEQ ID NO: 15781 - DNA, 588 bp, Zea mays
  Clone ID: MRT4577_114391C.1
aaacgagataaaaaaactgaatggtttagctcacgatacggtgcaatacgctgtgccgatgcatgccagcccaatagtacctcattttacagcccaatgcaagcccaacatcattagcccatcaccatccattctcaagcctcacccaagaacaaacggtgcctcgtctccaactcccacctcttgcttcttggcgccaccatggacagggagtcagggagtgtcaccacctcacatggagcacatgccacccggatctagcgctgccaactactagtagcgcatgccgtaagaagctagtgccactgcctcgctgggaggcacgtcaccactgggtgtgctgatgtcctcaatcctcatgattgagtgctaccgcttggatctgaactctgggacttgggagatcatcttgcgcagctgctgaaggttctgagataggtgcactctagctatgctgaccggtcagttcctggctgcttggtcatttagatcgtcgctttccttatgttttgttgaaattgattcgatcattttggttctctctctaaggacatgtaaatgcaatcattttaactatacattttatat

SEQ ID NO: 15782 - DNA, 406 bp, Zea mays
  unsure (1)..(406): unsure at all n locations
  Clone ID: MRT4577_114392C.1
gtgcgcataaaataaaaaacggnggtgtatatctttaggattggagggagttgtgatgggaagtcgaagtccggtggccggtgtaggtagtggcggcggggccttccctctacttccgcgtagagatagatcggatctcactagtctgtgtatgcatgaggatgtgcaatgaatgttggttcgtgtgccggccttgatccctatttatttacacggtatgaaagggggccaccaccaacacggtcaggatgcgagtgtgaggtccggctcgatcctcaaacagagtccggatgagatcaacccaacaaaactgacctgtgtcctgttcagtttccaactctttccatgaccaaactactatctttagtagaggttatttggatgtcctctgtatatccaactgcat

SEQ ID NO: 15783 - DNA, 318 bp, Zea mays
  Clone ID: MRT4577_114393C.1
aacaaggccccaaagtttgcaagcccaaaacaatgaagattcaaggcccggtcctaatttaacaagggaccttaaagggggggggctaaaggaaatgggcccacgccacccctcctaacgggacaaagaacaaaacggtacagccacaaaatttgggaacatggacaatggggcccaaacaactaaactgccccttaggaataaaaaatggaattggttaaaaagcgaaaggccttggaaggaaaacaaaaaggttttttcaccaaaaatgcatgtccccacattggtaaagccctgtattaggcccccaaagccccc

SEQ ID NO: 15784 - DNA, 339 bp, Zea mays
  Clone ID: MRT4577_114394C.1
gaataaaagacggcaatggttgctcaacaagaccatgttgtggtgcaacctaacacagacgccaaatgtttaagggctttgcgtgctaaacacatgattgatacgaatatgcacatataattatggagtattatataaggtagctagaccaaacctccgacttgggtaataaagtatgagtgcatcctactatacatttcaatatggtgcgcgtggatctggacatctacctggatgaccagaggcatgtgctgggccacgatggctcggatcttcgagttcatggtcctccggatcctggacttggacaccgcctaccctgcaatttctgctgccacg

SEQ ID NO: 15785 - DNA, 834 bp, Zea mays
  Clone ID: MRT4577_114395C.1
attgggacctcgagccggccgggaaatggtcaccatctctcttagacttggctgctggtgcggcgctatccatggcgaagtgggcgtcggccgcgagggctacgacgacgacaggccgacttgacgctctcaacagagctgccttgccatgagatacgaggcactgttgcttagagatgctaaatactgcaacgaccttcacttgcaagtgtcccgtcaggagtggttaacttttgcaatggattgtcttgataatggcttctacaccattgcctccaaggcacttggactctgctaattccattgaggagaaggacaagatcattgagataacaggactccagaacttggccaagtcattatctacacaacattgtgacacgcgcagcgatagatcatcagcgcgcggttctagacttcactggcatgagttcattgcgaccaaccagcctcttcgtgagtattgcgacgcttccagaggctgtcgagcgataaacagagaaaaggctatatatctctctcagacttggctgctggggcggcgctatccatggcgaagtgggcgtcggccgcgagggctacgacgatgacgatagaccgacttgacgctctcaacagttatatgaagagccatatagcatctagtgattttgagggtatagtgcaggtttgggatgttactaggagtcaagtttttgttgagatgagggagcatgagcgacgtgtgtggtcggtggacttctcaattatggacccaacaaaattggtcagtgggagtgatgatggatctgtgaagctgcgggatatgaaatcaggctgggagtattggcacta

SEQ ID NO: 15786 - DNA, 493 bp, Zea mays
  unsure (1)..(493): unsure at all n locations
  Clone ID: MRT4577_114396C.1
tccgaaaaaaaaaaaaaaaaaaaaaaaaaaggggggggggggggggaaaaaaaaaaaaaaaaaaaaaaaaaaaaaaaaaaaaaaaaaaaaaaaaaaaaaaaaaaaaaaaaaaaaaaaaaaaagggggggggggtttgggtggttaagaggttaaagtttcccgggcgtggggatggaaaagttttttttttttgggggggggggggttaaattaaatggccgggggttttaattttaaaaggattgggaaaaaccaaaaccttggccataactaaattttattggggataagaatcccttttctctctttttggggtttatataaaaagaggaaggggccgaatcccttttcccattcttaaactttccctaattgggaaggggaaggggccttcccttggggctttaatttagggggggggggggggtggtgtcaggtaacggtacctttccatggccttaccccacgccccttncctttntttcctttcct

SEQ ID NO: 15787 - DNA, 321 bp, Zea mays
  Clone ID: MRT4577_114397C.1
ggaggaaaacacattctgtatactgtatcaccaaaaagaaactcctggaattcaggggctctggtacaacttctgaactacagtctcatagtcacacgtctacacagctaagttactcgattttattgactaggcagcattgcgttttcaggggctatgctaaaatttataacctaaggcaacgaatacttaccaaagccccgctgttgattttcccccccataaggcaacagaaacttttgccgttagaacagtttaacgatggggtcgcggagctctttgggagctcgacgccctcactgccagccttgggggcttcca

SEQ ID NO: 15788 - DNA, 595 bp, Zea mays
  unsure (1)..(595): unsure at all n locations
  Clone ID: MRT4577_114399C.1
gaagtacgaacgtcaactactctccacccagacttgcacccggcccggaccagtttccccagcactaccacaaagcagctgcgcccccgggaccgacgggttgaaatgggaatgtcacagtttgtcctggtgcaaacgaacgtgaactcttcacgacccccctcccggcacttaaaatcgacttcatacttagtcacccatagactttactacttggacggcgaactccccgtcagcacctgtgacaccgtacgagacgacaaggtagtcaacctaagagatattcctgtgccacttgtagcccggcttactaccacctcgacttgtgggagtaagaccagtccctaccttgctgcgtacaagggaaccaaacttacgaacttattaatataccctaaggccaagtgttccggaacctacagagtttagttcaaacatcccacgtccagtgcagtgaacaggacgaccggcggaaagaccgcctcgtccaatcacttagaggacgccttctcgcagaacacgacagtcggtccctaggcagagtagacnaccgccacaggccgttccgctggagcgaggactcgttaatcagccc

SEQ ID NO: 15789 - DNA, 457 bp, Zea mays
  Clone ID: MRT4577_11439C.1
gcacaagctttttttttttttttttttttttttttttagattttttttatttttttttatcttatttgctttccaaaaaagccaccaaaaaaaacgggtaaggcgcgggaacccccctgcgtccgccaaaacacgttggttgcaaaggcaccactagtagccgacctaaaagggggcccccgcaaggcgcagcgcgcgggaagaacggcaacaaccgggccgacccccgaaggggccgggctcacaccagctagccggctgaatggggggagccggcgctgctcccaataagcacgagagcacaaggctgccagtcggcccgacatggaagaaattgccgggggtaggcaacaggcacctggctgaacggaacctgtgggggatgcccataggaagccaaggcaaggccgccagccggttgaatggaagaaactgctggcgctgctagcaggccgca

SEQ ID NO: 15790 - DNA, 321 bp, Zea mays
  unsure (1)..(321): unsure at all n locations
  Clone ID: MRT4577_1143C.1
ctgagttggtaatatcctagattgcctgttttacatcanaaaaaaaaaaaaaaaaaaaaaaaaaagtgaaaattaaaaaaaaaaaaaaaaaaaaaaaaaaaaaaaaaaaaaataaaaaaaaaaaaaaaaaaaggggcggcccttttaaaaaatcaaagtttacttacccgtgaattcaacgccataacttttctataaagtaaccaaaattaaataaactggccgccatttaaaaactgtttaactgaaaaaaccctggcttaaccaaactaaattgatttttaaaaaatccccattttaacaatttgcttaaaaccaaaa

SEQ ID NO: 15791 - DNA, 3339 bp, Zea mays
  Clone ID: MRT4577_114400C.1
ctcaactggtacaccagtcccgaggaggcggacgacagcgccgctaccttcgcctctgatgtctatagactgggtgtgctcttgtagtcttgttcgagctgttctgcacattcgaaacgatggaggacaagatgcgggcaatggcgaccgcgaatctgaggcaccgggtgttgccgccacagttgctgctcaaatggcccaaggaagcatctttctgccagttgctaatgcaccctgtgccagaaaccagaccgaagatgaggtgcgtcgtgtgctgtgtactatttttgtttctgccagttgctaatgcgtctcctcaaagctgggaactgatttgtttgttagtatatgtgttgtggtcgtacactccataagacagaacgtggattgacagacacgagcatgcagttgtttgaagatcaagctagcctgggaaattggctgaatcttgcagataggaaaaccaatattcatggggcagtaagaaacactagaattaaaacaaacacttagtatgctccgtagggtttgaccgagatagagagtttttttgcaactgctggtgtaaataagaagataaaagtgtttgagtataatatgattgtaaatgaacaccgtgatattcactatcctgtggtagagatgtctaatagatcaaaactgagttgtatttcctggaacagttatatgaagagccatatagcatctagtgattttgagggtatagtgcaggtttgggatgttactaggagtcaagtttttgttgagatgagggagcatgagcgacgtgtgtggtcggtggacttctcaattgtggacccaacaaaattggtcagtgggagtgatgatggatctgggaagctgtgggatatgaatcaggctgggagtattggcactattaaaacaagggcaaatgtgtgttctgtgcaatttcaacctgatactgctcgctccattgccatcggctctgcagaccacaaaatttactgctatgatctacgtcacatacgagctccttattgtacactagttgggcacacaaagactgtaagctatgttaagtatctggatgcatcgacaatagtatctgcatctactgacaactcattgaagctttgggacttatcgatgagtccaggaaggataattgacagtccagttcaaacatttaaggggcatacaaatacaaaggttggataaaacttccacatgtacttgttctcttttcataatattcgtctacaagtggttagtgtctggttttatcttttgtaagtgtaactagtagaatgtctgatgaaaagaatatggtagtttaattttgaaagttgtactgttgcaatgaaacactagggtacggttggttacttcacttgctttgctcaccttgtctcgtccagcaaggtgagctttgccagcatgggcgagccaatcttgctctcctccaccaacaagcaaaaatcttgccagcacaagccccaaagcgaactcaccaaggaaacaaacgctagttctatcttgatttatgtctgagcaaggaaatgaagtctggctggagaaccaaacacactctactctaatactgtatatgtatggattatcctactgtgacaattatcggtgctatcctttatacaactatagtgccttttacaactgtatctgatcgatttgtgaggttatgaacaaatcatcaacattggtgatccagatgttcttttcctttttttctcatcaacatcagtgtgcaaaggaagtgttttaaatcccactgcaccacttattttttagatatttagttgcttgacaaccataaattggttcacttggtgtgtttcctgcgatcctatagcatatttacatcatggtttgtagttcgttcagtcaattgatttcatgaaatattttagtgtctcagttgttcatagttgaagggtaggcttggtgcagtggtgagagttgtctcactgagccaccacgtcgcaaattcaaagcatttgcgggggaaggcttgtctcgttttatgtgggagcctccgacactgagtctgtccttcattttatgtgggagcctccggcactgagcctgcccttttattagttgagttcataattaactctcacgaaggacacggctagggctttttttaggtgagttcataaacccttttatcagtttagttcataattaactcccacaaacgacagggctgtggcttttttagttgagttcataattatctctcacagaagttgagttcataaacccttttatcagtttagttcataattaactcccacaaactacgtggctgggtttttgtagttgagttcataatttactctcacaaaggacatgtttgagacagtgatgagaaacctttccactggaaaaaagttcataattaactctcacaaaagataggtttaggacaattgtgagaagcctttccactgagccaaagcttctgggttcaactaggtccaccctttttttcgttgagttcataattaactctcacgaagaacaggcctgggcagtggtgagaagtctttccacggagccaaaggtcctgggttagatgtagcttctaagaaaaaatgcacgggtaagagttgcctcggttattccttcattttccatcatgtgggagccatcaacactgggtcttttccataattagtctcacgtgtatacagtggttacccttcagctgttactttctgcgctgaaaggcacacgttttcattgagtggctgatttacttatttggtaaacatcttccagaacttcgttggcctttccatatctgatggttacattgctactggctctgaaacaaatgaggtttttgtgtaccacaaagaatttcccatgccagtgttggcctataaattcagcgtgacggaccctatatcagggcaggagattgatgaccagtcacagttcatttcatgcgtctgttggagagggcagtcttcaaccctactttctgcaaactccagcggcaacattaagatcttagaaatggactgaggattggagttaggcatctgctgagtctcagctataaatggactgacttcttaccaagttttgtgcgtgtgtggcttcaaaatttgtggcgacggagttgccaacggtgcgtggtgcagagttgggagaggtaggagtagctgtaacaggtttagcatggtttgatatgattaaattagcgtggtagcaaaagtagcataaataggaaacaaaattgaggtgtggggtagtactgcaaggaaaggttttgtacatcattggttcgaggtatacttgtacagccaatcaatccagtttttactt

SEQ ID NO: 15792 - DNA, 2868 bp, Zea mays
  Clone ID: MRT4577_114401C.1
cggccgggtcagattcttatccccttctgctttagatgggcctcgcggagcagtgcatggaggtggaggaggtgcgggactcggcgaatcggaggtgatcccggtcatgggatagagtggagtggagggggttgagtgtgtggtatggagccgtcccgtggcggtgttggcggcggcgggcggcggtggggggaggcggagggtgatgcggcggaggaagggagacgaggggaggacgggggcgaggtgagcctgcgggagtggctggaccggccgggccgagcggtggaggcggcagagtgcgtgcacgtgttcaggcaggtggcggaggcggtggccgtcgcgcacgcgcagggggtggccgtgggcagcgcgcggccgtcgtgcttcgtcgtgtcgccgcccttcgcgcgcgtcgccttcatcgagtccgcctccggctccgacgcctcgggctcgtgctcgggctctgacgcctccgaggacgccgacggcgacccggacccggacccggacgcctcgcctccgctgcggcgacgcgacagcgccgtccccggcgaggagcgcgcggggaggtcgttcccgctcaagagcgtgctggccatggagctcaactggtacaccagtcccgaggaggcggacgacagcgccgctaccttcgcctctgacgtctatagactgggtgtgctcttgttcgagctgttctgcacattcgaaacgatggaggacaagatgcgggcaatggcgaatctgaggcaccgggtgttgccgccacagttgctgctcaaatggcccaaggaagcatctttctgccagttgctaatgcaccctgtgccagaaaccagaccgaagatgagtgaggtgctgcagagtgaattccttaatcagtcaaggaatagcctggaagaacgtgaagcggcacttaggttacgcgaagagatagaagaacaagaattattgctggattttcttcagcagttgcagaaaagaaagcaagatatggcagacagtttgcaggacactgttgcttttctctcttctgacatcaatgaggtactccaccagcagtctgcacttggccactgtgtgaacttttcaccagatttggataaagaggtgtgctctggaactgttgaagatcagagtgattgtggatccaggaagcgttttagacctgagctgcaaggcgttgatatggaggaaaataatcgtagtgtggaagaatgttcaagaacagtgccgtcctctgagttaatccaggaaaatgttctgtcaaaaagctccaggttgatgaagaacttaaaaaaacttgaaacagcttattttctaacaaggtccaagttggcgaagcaagttggcaaccagataaatagttgtaatcgagttgttaagaggactactggttcagctgttgggacagaagcaagttcaatagatgatttttctttggaaaggcaatatggtagaaggcaaagaggttgggtgaactcttttcttgagggattgtgcaagtacttgtcattcagtaagttgaaagttcgggcagaattgaagcattgtgattcactgaactcatcaaacttagtatgctccgtagggtttgaccgagatagagagttttttgcaactgctggtgtaaataagaagataaaagtgtttgagtataatatgattgtaaatgaacaccgtgatattcactatcctgtggtagagatgtctaatagatcaaaactgagttgtatttcctggaacagttatatgaagagccatatagcatctagtgattttgagggtatagtgcaggtttgggatgttactaggagtcaagtttttgttgagatgagggagcatgagcgacgtgtgtggtcggtggacttctcaattgtggacccaacaaaattggtcagtgggagtgatgatggatctgtgaagctgtgggatatgaatcaggcaattttattcttgcacctactgctgggagtattggcactattaaaacaagggcaaatgtgtgttctgtgcaatttcaacctgatactgctcgctccattgccatcggctctgcagaccacaaaatttactgctatgatctacgtcacatacgagctccttattgtacactagttgggcacacaaagactgtaagctatgttaagtatctggatgcatcgacaatagtatctgcatctactgacaactcattgaagctttgggacttatcgatgagtccaggaaggataattgacagtccagttcaaacatttaaggggcatacaaatacaaagaacttcgttggcctttccatatctgatggttacattgctactggctctgaaacaaatgaggtttttgtgtaccacaaagaatttcccatgccagtgttggcctataaattcagcgtgacggaccctatatcagggcaggagattgatgaccagtcacagttcatttcatgcgtctgttggagagggcagtcttcaaccctactttctgcaaactccagcggcaacattaagatcttagaaatggactgaggattggagttaggcatctgctgagtctcagctataaatggactgacttcttaccaagttttgtgcgtgtgtggcttcaaaatttgtggcgacggagttgccaacggtgcgtggtgcagagttgggagaggtaggagtagctgtaacaggtttagcatggtttgatatgattaaattagcgtggtagcaaaagtagcataaataggaaacaaaattgaggtgtggggtagtactgcaaggaaaggttttgtacatcattggttcgaggtatacttgtacagccaatcaatccagtttttacttagcaaaaaaaaaaaaaaaaaaacaacaaccc

SEQ ID NO: 15793 - DNA, 4411 bp, Zea mays
  Clone ID: MRT4577_114402C.1
tttgtcaaggtgaggcgtcgcttccctctcgtagatcccccacacgttactttgtctgccacagtatcgctcccctctatagccacgttctcgtcagatccttcctcccctttgtgtttgaaaattgcatctggtatatttctagccctattttaggttccacccagaatttctgtactaggtctgttatttccgtactaggtctgttgagctgtcagcaatgcgatcctttgagcgttatcaaatgttatttggttaaatgtcttaccaaatactgttacccttcatgtgcactgacagagctgccttgccatgagatacgaggcactgttgcttagagatgctaaatactgcaacgaccttcacttgcaagtgtcccgtcaggagtggttaacttttgcaatggattgtcttgataatggcttctacaccattgcctccaaggtacttttatccagctttaactttgttgtaggtattacccctttactgttcttatcaattagcatgttggcacttaagcgagttttatccacccaaggcacttggactctgctaattccattgaggagaaggacaagatcattgagataacaggactccagaacttggccaagtcattatctacacaacattgtggtaagttttcagtgctatggattgcttaaattgcaggcagagaaactgagtttgctttaacttttcaagtaaaataagttcagagaaactaaacttgtcttcatcttctaaagttgagtaaatgaaagagtgatacttgtttaatcaacagagatccaacctgactgaatgcatgtcttcctctatgtttgagtaactactaatgccttttttctgtatatcaaacatgacgtctgttatgtgggagatttggagacgtattgtgacaccaaatcttctcttgtatgttccaactgtttgaacatatttttgatatagctttctaatgacatttacttgtacagacacgcgcagcgatagatcatcagcgcgcggttctagacttcactggcatgagttcattgcgaccaaccagcctcttcgtgagtattgcgacgcttccagaggctgtcgagcgataaacagagaaaaggctatatatctctcttagacttggctgctggggcggcgctatccatggcgaagtgggcgtcggccgcgagggctacgacgacgacgatagaccgacttgacgctctcaacaggtacgagccactctcctccctgggtccttggacctgaaagttactagatagcaagcctttactccttgagtcgtgattcgtcaggatccctaatctccctgggtttgaccgagatagagagttttttgcaactgctggtgtaaataaaaagataaaagtgtttgagtataatatgattgtaaatgaacaccgtgatattcactatcctgtggtagagatgtctaatagatcaaaactgagttgtatttcctggaacagttatatgaagagccatatagcatctagtgattttgagggtatagtgcaggtttgggatgttactaggagtcaagtttttgttgagatgagggagcatgagcgacgtgtgtggtcggtggacttctcaattgtggacccaacaaaattggtcagtgggagtgatgatggatctgtgaagctgtgggatatgaatcaggctgggagtattggcactattaaaacaagggcaaatgtgtgttctgtgcaatttcaacctgatactgctcgctccattgccatcggctctgcagaccacaaaatttactgctatgatctacgtcacatacgagctccttattgtacactagttgggcacacaaagactgtaagctatgttaagtatctggatgcatcgacaatagtatctgcatctactgacaactcattgaagctttgggacttatcgatgagtccaggaaggataattgacagtccagttcaaacatttaaggggcatacaaatacaaaggttggataaaacttccacatgtacttgttctcttttcataatattcgtctacaagtgattaatgtctggttttatcttttgtaagtgtaactagtagaatgtctgatgaaaagaatatgctagtttaattttggaagttatactgttgcaatgaaacactagggtacggttggttacttcacttgctttgctcaccttgtctcgtccagcaaggtgagctttgccagcatgggcgagccaatcttgctctcctccaccagcaagcaaaaatcttgccagcacaagccccaaagcgaactcaccaaggaaacaaacgctagttctatcttgatttatgtctgagcaaggaaatgaagtctggctggagaaccaaacacactctactccaatactgtatccgtatgtttggttacccgcaccgtctcatcttgaaccaccgtatgcgttgactctgtctgagctcctgtttggttgcctgtacaagggagacgcaggctgcatgagcggatgcaaaataaaccattttatagttatttggttgcatccactcatacgcagaaaaataccgtatcaggtcagccagggccatccgagcctgcgcgtccagatacaggcatccaatcaggcgatatatgtatggattatcctactgtgacaattatcggtgctatcctttatacaactatagcgccttttacaactgtatctgattgatttgtgaggttatgaacaagtcatcaacattggtgatccagatgttcttttcctttttttctcatcaacatcagtgtgcaaaggaagtgttttaaatcccactgcaccacttattttttagatatttagttgcttgacaaccataaattggttcacttggtgtgtttcctgcgatttagttacctgcttttcctatagcatatttacatcatggtttgtagttcgttcagtcaattgatttcatgaaatattttagtgtctcagttgttcatagttgaagggtaggcttggtgcagtggtgagagttgtctcactgagcaaccacatcgcaaattcaaagcatttgcgggggaaggcttgtctcgttttatgtgggagcctccgacactgagtctgtccttcattttatgtggcagcctctggcactgaggctgcccttttattagttgagttcataattaactctcacgaaggacacggctagggctttttttaggtgagttcataaacccttttatcagtttagttcataattaactcccacaaacgacagggctggggctttttttagttgagttcataattatctctcacagaagttgtgttcataaacccttttatcagtttagttcataattaactcccacaaactacatggctgggtttttgtagttgagttcataatttactctcacaaaggacatgtttgagacagttgtgagaaacctttccactggaaaaaagttcataattaactctcacaaaagataggtttaggacaattgtgagaagcctttccactgagccaaagcttctgggttcaactaggtccactctttttttagttgagttcataattaactctcacgaagaacaggcctgggcagtggtgagaagtctttccacggagccaaaggtcctgggttcgatgtagcttctaagaaaaaatgcacgggtaatagttgccttggttattccttcattttccatcatgtgggagccatcaacactgggtcttttccataattagtctcacgtgtatacagtggttacccttcagctgttgctttctgcgctgaaaggcacatgttttcattgagtggctgatttacttatttggtaaacatcttccagaacttcgttggcctttccatatctgacggttacattgctactggctctgaaacaaatgaggtttttgtgtaccacaaagaatttcccatgccagtgttggcctataaattcagcgtgacggaccctatatcagggcaggagattgatgaccagtcacagttcatttcatgcgtctgttggagagggcagtcttcaaccctactttctgcaaactccagcggcaacattaagatcttagaaatggactgaggattggagttgggcatctgctgagtctcagctataaatggactgacttcttaccaagttgtgtgcgtgtgaatttgtggcaacggagttgccaacggtgcgtggtgcagagttgggagaggtaggagtagctgtaacaggtttagcatggtttgataggattaaactagcgtggtagcaaaagtagcataaataggaaacagaattgaggtgtggggtagtactgcaaggaaaggttttgtacatcattggttcgaggtatacttgtacagccaatcaatccagtttttacctagcaaaaaaaaaaaaaaaaaaaaaactcgag

SEQ ID NO: 15794 - DNA, 559 bp, Zea mays
  Clone ID: MRT4577_114403C.1
tgcccgcaggtcgtctctagaggatcgccaggataaccgcggtaaccatggttttgcccaactctaaccaggtattttccggggggctttcttttttcttgctggtttcgcggacaatattttcggtcatagtggggccgggaaaaataggggaatttattttaatctgttccagtttagtcgcagtcttcctcttcttcttcctggtgggactttggcgatcgggctagtaactgttccgcctctggacaatcttcagaaattagcagttcatgaccaaggcgggaaacggaggccaacttacggttaacggagccaatgctttccaggcgcaccatttcttcccaggcacagacctcatcctcttcttcggtctcatagcggaaagtgaccaaatccccctccagtgtcagaattttggcattttctacccacctttgttggtccctcaggtaaagactgacttcgtggccatcggtacaaagttgatagattttccggggtagcatgggcaagctcctagatagcagtgggaggacgggacggggcgaaacaggcc

SEQ ID NO: 15795 - DNA, 441 bp, Zea mays
  Clone ID: MRT4577_114404C.1
atggagaatgagcaattaaagcaagaggtggctcgccttggcaatgctttgtatgacaagaaaggcaaaggcaaacaaatccaacctccacatgataacaccactgcgggagtgaacaagcctatggagggcaaaactgtgatttgtaggctattgcacaaggaaggccacaaagtctttccaatgcaaggtttggtcaaggactacatagtctggactttccatggtgagagaagagatgctagtgtagatgaatcatcatgtggtggaggaaactcatcgatgacaaattcaggtgggccactagctggcaccaccgttgctagcaacaataacaatgctgatcataatgattacatcatagtgcatgatttgtttagtgacgatgctggcgacaagggtggcaatgaggatgttggtgctacatcgcaagagccttag

SEQ ID NO: 15796 - DNA, 427 bp, Zea mays
  Clone ID: MRT4577_114405C.1
ggatactcttaaagagggcgccctctttttttttttttttttttttttttttttaactttttttctttattttggccctaacaagaacccagacaatttgttgagcaagggcctcaaaggcacatttatccaggaaaatgtactcgcaaataataatctaggaacataagcgggatcaaccagtattgttagctgccaaagttttgattgaaagatgttagggtaccacaactagcaccagggccgcgatccgattataagaaattggatacggagtgtacctgccaaaaacggctttgacgaatctcaggtagatattttttgaaaatacgtggaacgcttatacaaagggttttaatacacaatctttttgtttaggtaaggaagctcgactccaccaaaacatggggggccagcctcctgagaa

SEQ ID NO: 15797 - DNA, 635 bp, Zea mays
  Clone ID: MRT4577_114406C.1
cgggctacggccgccgccagcagcaagctccctgctccccgaccaaaccctacctgtacccgccgccgccgcagcagcagccatgccgcccaaattggacccctctcaggtggtggaggtcttcgtccgcgtgacagaggcgaggtcggcgcggcgtcgtcgctggcccccaagatcggcccgctcggtctctccccgaagaagattggtgaggacatcgccaaggagaccgccaaggactggaagggcctccgcgtcaccgtcaagctcaccgtgcggaaccggcaggccaaggtctccgtcgtcccctccgccgcggcgctcgtcatcaaggcgctcaaggaacccgagagggacaggaagaaggtcaagaacatcaagcacagcgtcgggtgcaccgtcgatgggaaggaccccaaggacttgcagcaggagatcgatgatggtgaggtcgagatcccctcagcttaaaggctatacaactagaaatcatcggacactattaaagtgtggtgttttgttccaagtgcagttcctgcacctcaatcgcctattattgtctgctttagttccttcaagtcttgtgagagacctaatcagtaccttgtgccttataaaattacatcttccgatac

SEQ ID NO: 15798 - DNA, 570 bp, Zea mays
  Clone ID: MRT4577_114407C.1
cttcggccgccgccagcatcaagctccctgctccccgaccaaccctacctgtacccgccgccgccgccgcagcagccatgccgcccaaattggacccctctcaggtggtggaggtcttcgtccgcgtgacgggaggcgaggtcggcgcggcgtcgtcgctggcccccaagatcggcccgctcggtctctccccgaagaagatcggcgaggacatcgccaaggagaccgccaaggactggaagggcctccgcgtcaccgtcaagctcaccgtgcagaaccggcaggccaaggtctccgtcgtcccctccgccgcggcgctcgtcatcaaggcgctcaaggaacccgagagggacaggaagaaggtcaagaacatcaagcacagcggcaacatcgagatcccctcagcttaaaggctatacaactagaaatcatcggacactattaaagtggtgttttgttccaaatgcagttcctgcacctcgatcgcctattattgtctgctttagttccttcaagacttgtgagacctaatcagtaccttgtgccttataaaattacatcttccgattc

SEQ ID NO: 15799 - DNA, 808 bp, Zea mays
  Clone ID: MRT4577_114408C.1
acggccgccgccagcatcaagctccctgctccccgaccaaaccctacctgtacccgccgccgccgcagcagcagcagcagccatgccgcccaaattggacccctctcaggtggtggaggtcttcgtccgcgtgacgggaggcgaggtcggcgcggcgtcgtcgctggcccccaagatcggcccgctcggtctctccccgaagaagatcggtgaggactggaagggcctccgcgtcaccgtcaagctcaccgtgcagaaccggcaggccaaggtctccgtcgtcccctccgccgcggcgctcgtcatcaaggcgctcaaggaacccgagagggacaggaagaaggtcaagaacatcaagcacagcggcaacatcagcctcgacgacgtcatcgagatcgccaagaccatgcggaacaggtccatggccaaggagttggccgggaccgtcaaggagatcctggggacctgcgtcagcgtcgggtgcaccgtcgatgggaaggaccccaaggacttgcagcaggagatcgatgatggtgaggtcgagatcccatcagcttaaaggctatacaactagaaatcatcggacactatcaaagtggtgttttgttccaaatgcagttcctgcacctcaatcgcctattattgtctgctttagttcccttaagtcttgtgagagacctaatcagtaccttctgcctgataaaattacatcttccggttaaaaaaaaaaaaaaaaaaaaaaaaaaaaaaaccaaaaaaaaaaaaaaaaaaaaaaaaaaaagtactctgcgttgttaccactgctcaa

SEQ ID NO: 15800 - DNA, 546 bp, Zea mays
  Clone ID: MRT4577_114409C.1
cccacgcgtccggcctccgcgtcaccgtcaagctcaccgtgcagaaccggcaggccaaggtctccgtcgtgccctccgccgcggcgctcgtcatcaaggcgctcaaggagcccgagagggacaggaagaaggtcaagaacatcaagcacagtggcaacatcagcctcgacgacattgtcgagatcgccaagaccatgcggcccaggtccatggccaaggagatggccggcaccgtcaaggagatcctcgggacctgcgtcagcgttgggtgcaccgttgatggcaaggaccccaaggacctgcagcaggagatcgatgatggtgaggtcgagatcccctccgcttaaaggctattcaactaaggagatcatcagacactgttgaagtctttgttccaaatgctatttttgtacctttggatcccgcctatatttgtgtgcactagtagttaatcttgtgataagacttcgatgtttctatcctgcatctaggttatgttgtgagttcggaatggagttttaagcatcaaaatgcaacttgatcagt

SEQ ID NO: 15801 - DNA, 208 bp, Zea mays
  Clone ID: MRT4577_11440C.1
cgacatggtgcctgatgatgagccgacattagctggactctgcgcacattgcgcatatgatggagcagaggctctgaccttgggcatgcagtatgccaacgtccactcgtactaagagctagctcctgacgtaagcgaactgattgaggatcatgactcgggtcactatacttcatgactggaatagcgtggcatgctgaaagcaaac

SEQ ID NO: 15802 - DNA, 877 bp, Zea mays
  Clone ID: MRT4577_114410C.1
ggcccgggctaacggccgccgccagcatcaagctccctgctccccgaccaaaccctacctgtacccgccgccgccgcagcagcagcagcagccatgccgcccaaattggacccctctcaggtggtggaggtcttcgtccgcgtgacgggaggcgaggtcggcgcggcgtcgtcgctggcccccaagatcggcccgctcggtctctccccgaagaagatcggtgaggacatcgccaaggagaccgccaaggactggaagggcctccgcgtcaccgtcaagctcaccgtgcagaaccggcaggccaaggtctccgtcgtcccctccgccgcggcgctcgtcatcaaggcgctcaaggaacccgagagggacaggaagaaggtcaagaacatcaagcacagcggcaacatcagcctcgacgacgtcatcgagatcgccaagaccatgcggaacaggtccatggccaaggagttggccgggaccgtcaaggagatcctggggacctgcgtcagcgtcgggtgcaccgtcgatgggaaggaccccaaggacttgcagcaggagatcgatgatggtgaggtcgagatcccatcagcttaaaggctatacaactagaaatcatcggacactatcaaagtggtgttttgttccaaatgcagttcctgcacctcaatcgcctattattgtctgctttagttcccttaagtcttgtgagagacctaatcagtaccttctgcctgataaaattacatcttccgattttctgtcttgtgatttggatggatgcgatcatcacttgcgttcgtaccgtgtactcccttcgaacttctataattttagtaaggtttaaactgtccgcaaaaaaaaaaaaaaaaaagcggcc

SEQ ID NO: 15803 - DNA, 896 bp, Zea mays
  Clone ID: MRT4577_114411C.1
cctcgagggcctggcccgggaaaaaaaaaaaaaaaaaaaaaaaaaaaaaaaaatacggccgccgccagcagcaagctccctgctccccgaccaaaccctacctgtacccgccgccgccgcagcagcagccatgccgcccaaattggacccctctcaggtggtggaggtcttcgtccgcgtgacgggaggcgaggtcggcgcggcgtcgtcgctggcccccaagatcggcccgctcggtctctccccgaagaagatcggcgaggacatcgccaaggagaccgccaaggactggaagggcctccgcgtcaccgtcaagctcaccgtgcagaaccggcaggccaaggtctccgtcgtcccctccgcggcggcgctcgtcatcaaggcgctcaaggaacccgagagggacaggaagaaggtcaagaacatcaagcacagcggcaacatcagcctcgacgacgtcatcgagatcgccaagaccatgcggaacaggtccatggccaaggagttggccgggaccgtcaaggagatcctggggacctgcgtcagcgtcgggtgcaccgtcgatgggaaggaccccaaggacttgcagcaggagatcgatgatggtgaggtcgagatcccctcagcttaaaggctatacaactagaaatcatcggacactattaaagtggtgttttgctccaagtgcagttcctgcacctcaatcgcctattattgtctgctttagttccttcaagtcttgtgagagacctaatcagtaccttgtgccttataaaattacatcttccgattctctgtcttgtgatttggatggatgcgatcatcactggcgttcgtacaaaaaaaaaaaaaaaaaaaaaaaaaaaaaagaaaaaaaaaaaaaaaaatttgcggcc

SEQ ID NO: 15804 - DNA, 1185 bp, Zea mays
  Clone ID: MRT4577_114412C.1
aggccggccgggccgggtacaaaacggccgccgccagcatcaagctccctgctccccgaccaaaccctacctgtacccgccgccgccgccgcagcagccatgccgcccaaattggacccctctcaggtggtggaggtcttcgtccgcgtgacgggaggcgaggtcggcgcggcgtcgtcgctggcccccaagatcggcccgctcggtctctccccgaagaagatcggcgaggacatcgccaaggcccaaggagaccgccaaggactggaagggcctccgcgtcaccgtcaagctcaccgtgcagaaccggcaggccaaggtctccgtcgtcccctccgccgcggcgctcgtcatcaaggcgctcaaggaacccgagagggacaggaagaaggtcaagaacatcaagcacagcggcaacatcagcctcgacgacgtcatcgagatcgccaagaccatgcggaacaggtccatggccaaggagttggccgggaccgtcaaggagatcctggggacctgcgtcagcgtcgggtgcaccgtcgatgggaaggacccccaaggacttgcagcaggagatcgatgatggtgaggtcgagatcccctcagcttaaaggcgaagggccgtcttcacaggtgggacttcgagactgaagaggagtgggccaagtacaacgatcagaaagaagccatgccgaaggctgccttccagttcggggtgaagatgcaggacgacaggaagacgaggaagcagaacaaggaccagaagctgactaatgacctccacaagatcaacaagatcctggctaggaagaagggcgagaaagatggggcggaagatggcggtcactacgacgatgatttacctagctcgaagaaacagcgtggctgaagctgtcatttttcgtttctcctgctggttatgtcattctacgggagagttacgttggtgtttagctggcagctgtatcatgctgctttcatttaaggtggcatcaggacataatacatgtcaaaaaactttacaaccgctggtcgatattttaacaggaacagaatgatccttggtgattttgtttgtcttgtaagatatatcgaaattgtataaaatgtcaaaacgagtacactagcacaatagatttctgaaaactatagatttctctagtttaattcagaatcatattctacctt

SEQ ID NO: 15805 - DNA, 234 bp, Zea mays
  Clone ID: MRT4577_114413C.1
cttagacaggggcaacaaggttcttactgatcaccatcgttactgctacatcgtaataacaatccttaaatcaaaaacagagaccatcatagcagagcggaattactccttgagagtcaccacattattacatttgatgggaactaaacccaaccaaatcttacccactcccccaacctatcacctgtttaaacaaaaaaaaggtgatccgaaccaaccaccggcacccaaatc

SEQ ID NO: 15806 - DNA, 950 bp, Zea mays
  Clone ID: MRT4577_114414C.1
gcacgagccagccaccgccaagccgcattacaaagaacgcgaaccgctgccagtccaaaccctacggccgccgccagcatcaagctccccgaccaaaccctactcgtaccccgccgccgccgcagccgcagccgcggccacaccagcaagcagaactagcagccatgccgcccaaattggacccctctcaggtggtggaggtcttcgtccgcgtgacgggaggcgaggtcggcgcggcgtcgtcgctggcccccaagatcggcccgctcggtctctccccgaagaagatcggcgaggacatcgccaaggagaccgccaaggactggaagggcctccgcgtcaccgtcaagctcaccgtgcagaaccggcaggccaaggtctccgtcgtcccctccgccgcggcgctcgtcatcaaggcgctcaaggaacccgagagggacaggaagaaggtcaagaacatcaagcacagcggcaacatcagcctcgacgacgtcatcgagatcgccaagaccatgcggaacaggtccatggccaaggagttggccgggaccgtcaaggagatcctggggacctgcgtcagcgtcgggtgcaccgtcgatgggaaggaccccaaggacttgcagcaggagatcgatgatggtgaggtcgagatcccctcagcttaaaggctatacaactagaaatcatcggacactattaaagtgtggtgttttgttccaaatgcagttcctgcacctcgatcgcctattattgtctgctttagttccttcaagtcttgtgagagacctaatcagtaccttgtgccttataaaattacatcttccgattctctgtcttgtgatttggatggatgcgatcatcactggcgttcgtaccgtgtactcccttcgaacttatatatattttagtaaggtttaaactgtcccaaaaaaaaaaaaaaaaaagcggcc

SEQ ID NO: 15807 - DNA, 950 bp, Zea mays
  Clone ID: MRT4577_114415C.1
tgccagcatggaggacgagcggatggcggccagggacggcggcgccgtcacgtcgaggcggtggtgccatggcgagaacagcaaggggggacgcagcagcagccggcgtgcgctgcaggacggcacggacacgaaagcggttgccgcctcctgggcggccctgcttcagcagccaccgcaagagcgggaggggggatcccaggcaccttgcaaggcctctctcttccgaccacaatgatttatcccagaagaagatcactcgtggagatgctctgctagcacctggacactcatcagtctcagagactgaggagtgaagtagctaccatctcgcctcgtttctcccagtctgccgttgctgctgctgccagatcccagagttcgtggtaggtggcaatggcctcgtcaccgcttgcaatctcggggacgcagcctacctgggtcccctatgaaccaaccaaagattgctctcagggcctgtgcagcatgtactgcccccagtggtgctacttcatcttccctccgcctccgccgttcgacgtgggcgggcccagcccggatcatccgatgtgaggaggctcagagctgtttcagattttacctaggattttactgggcgggttcttgtccgctcgcaacatggagaatgtggacggggaaaagcagggaccgacatgccgcctcgtgagacgtgagtcgtgacaatgttcatccctacactacgtacaatgtggtgatgccagggtccaatagttcgtctgcattgctcggtgaggcctctgcagctggttcttttctcttgtcatattttttttggttggctcttccacctctcatgtattaccaagacccacgacattccattattccaaaaaacatgtctaatagctgtgcaatgaaatgggtgacggaaccctttcttttgccctaaacacacagcagtttgcgtt

SEQ ID NO: 15808 - DNA, 408 bp, Zea mays
  Clone ID: MRT4577_114416C.1
aaaaaaaaaaagaagcactcaagctaatagaaaccataaagttgaaacatcaaagagaaactactcttaacgttaccaaaactgtatgaaagccaaaataacattattgcctaaaccaacaaacaacatcaaatcttcaccggggagatttaagattcaagaatcaacaacacaccaaactagagcttgaggaaaacgaactcctcaaccgctggaatttccccaatctttttcaagggctctttgcttgggatggcatctactccaaacgccataaacgtttgctttctcggtgcaatttttccaacgctcatgaagttaaaattgacattaaactctccaaagatgcttccgaaagtcccgaaaataacaagttgaaccacctggctgcacaggatgaaactacct

SEQ ID NO: 15809 - DNA, 155 bp, Zea mays
  Clone ID: MRT4577_114417C.1
ggtaatccgagcgagcacgcacgctgcctgtactactactcgtctgtctagtccctccgcagtccgcccacgccccccgctgcctcttccattcccgaaacaagcgacgacgcgccagcatggctgtgaatgggcgcgtgtcagcttgtttctcg

SEQ ID NO: 15810 - DNA, 592 bp, Zea mays
  unsure (1)..(592): unsure at all n locations
  Clone ID: MRT4577_114418C.1
ctctcaaatcaaacctgtccaaatctctttacatcaaagttcaaatctttggtatcgacgatcggtacacaattgattgtgctcnatgttgaagacacattggacattagttacgagacaagagttgtggataggaaaactttcaaaaactgcttgacgatggctatgttatcgaattacttaccaaaattctgctcaattgatctttcctgaaagtaacttgaacattcttaatgttgacttcaagacactcatgaattgtatcaatagcaagttccctggaaaaatcaagaatgctgtcttgaccaatagtggatacaagataacaatcgaaaaagaaactgcaagcaagttgcttgaatccaagatcttcattggaaataacagtctcaatccactcctctcttgtcgttactgttcaatctgtgagggaagtcatagcttcaacactgatgagacgatcaaaaatgtcgaaatgaaaaagatccatgtctcatgtggcttcaggaaaagtactccccattctgattatgcaatttctgagagacgcaatatgaaaagtgataacaataagaggattgatttgactgtt

SEQ ID NO: 15811 - DNA, 383 bp, Zea mays
  Clone ID: MRT4577_114419C.1
aatacaaattgacactattccctgcatcacgctagcgacttacctcaggaatagacaagctcgcgtgatgctcgcaatatgcgtgatgtatacctacttgaactgaccaccgccgacctgacaagatgtggaggtatactcggcgcgatggcggacgtcctccccgaggctcaacaatcgccttctagatctcagaagtaccatgcgcggctcagctctcgcgagtggacatatcaacctgcccactgctcgtgctatgacgccgcgaccacatcttggatctatgcatcacagtgccaggagaactgattcagcacgaccacgacaccagtgcagctgctgcttgtttgacacatgaatcatgcgttataactgccactgca

SEQ ID NO: 15812 - DNA, 524 bp, Zea mays
  Clone ID: MRT4577_11441C.1
cattgggtacctcgaggccggccggactgagaatcgcagagacaggctgtcttcggactcgccgatctccgctgatcacagttttcacggattaggacccctataacatctctcaacgaggacgaccgcttccgctcgcgacctcatacggtgaaggatgcgtctcgcaactcacgtagccgactctgccacttacccggcaagacgcgagctgcgagctgcactgcctccaggatgcgatgactcgttgaaggccaaaagctgggtgacaagaccactcgaaggaggtgatgatggtttccacaccattctttagcgagactgaatgctcagaagaacgtcccccgtgctgtgtttgtctgaccttgagaccactgtcttgaggaggtgagcgaacggaactaccgactgctcttccatcctgagacaatcatgacaggcaaggaagatgcacgcaacaacttcgctcgggggcacgtacacgattggcagggacattgctgacctgagtcctgaccgaatca

SEQ ID NO: 15813 - DNA, 441 bp, Zea mays
  Clone ID: MRT4577_114421C.1
attcggctcgagagctccgcgcccctaggtatgctcctccgtgccctgatcttgccgggcgacctcataccgatcctgccctggtccgtggcgcaggagctgctctgccgactcgcgctgaggagccccgccgacctgctcccggccttggacggggctgcgcacgcaccgaggtctgacgacgcccaccctgtcactaagaggaagggcgcctgcttcttcgagaacagggcatggctggagttacgcaacgggaccggcagggggctatgacgctgcgtaatccatgtaaaggtaagagggtgatggagctattgtggcgccacgcaaggtgaccagctgaaagtcggggaatatgagcttgcgttcagctaaataaaatgtaaagcgcatcgcgttaaaacagacaaaatcaaatgggggcgggcgatcgataatgag

SEQ ID NO: 15814 - DNA, 342 bp, Zea mays
  Clone ID: MRT4577_114422C.1
tgctgctaccactcttcctatattaacccgtacaatttcttagttctctacatcatcacccaataccaccaggacggtttcatctatctgttggagatcctttccatccacttctcctactatatctacctcgttcagcacaacacctacgtgtgttcctatacacgcctatcctcattacacgttcatacgttctcatcacgcaatttacccacatctataatctcatgtacgccatgaactatgacccttatcttcatgaacctatacaactcttccacattcccctacacccttactttccccaacaccttcgacatctgccatatcacctacatcacc

SEQ ID NO: 15815 - DNA, 723 bp, Zea mays
  Clone ID: MRT4577_114423C.1
aggccggccgggccgggaaggtgacttggtcttcctcctccagtagcttctctccactccagtccttgactaccatttcatcatcatctgtgtatctcaaacttgcttgcattgcttgccctcactcctaccatccaagtttctttctcggtctctggcaagacttcgttcaccaatatctccggcccagacagccacaccaaccgagatgtcgaaccggaggtcacggtccaggcagtctggttcgtcgaggatcactgaggagcagatcagcgaccttgtatcaaagctgcaggacctcctccccgaagctcgccttcagagcaatgcaagagtgccatctgcgagggtgttgcaggagacatgcaactacatcaggaacttgcaccaggaggtggacgacctgagcgagaggctgtcggagctgctggctacgtccgacatgagcagcgcgcaggcggctgtcatccggagcctgctcatgtagctcagacatctcgcagcattcgtagcctaagtagagtgatttttttttttttgtacttgttggagaggcaggtcaattacctaatacgcccgtgtacttcgcctacgttgtccgtctctctgctacctgagccagagaccagagctatcttttttttttctgtgtacttaatcccatcgttattggcgcaatgcttactcatactaaaaaaaaaaaaaaaaaagggccctagggcc

SEQ ID NO: 15816 - DNA, 382 bp, Zea mays
  Clone ID: MRT4577_114424C.1
gagttatataccagttcaactttttgaacacatgtatggcttttcttgtgatcagtatgtgtatgacatacgatgtgtcttagtgcgcattcttgggttgagttttcactcaaggagatggagaccgcaatatatgtgtgtcacaagctggagatgaccacgtccagctgctcggaaagcatctgcctcttcagagggtatatgatgcctatgagaaaatattctgtaacacttgacctgctgattaggggtgaggattctttgagtgggcttaatgttagatgtcgtctgatacacgagaacatgatatatcaggtcggccttgaataatgagccaccaacactgttcaggtttacgatgcactcatcttaatggaatctt

SEQ ID NO: 15817 - DNA, 1824 bp, Zea mays
  Clone ID: MRT4577_114425C.1
aatttttgcatagatgatgcaaaagaagttaagaaaatcgagaaagtaaccaaccatgacgtgaaagccgtggagtactttctgaagcaaaggtgcagctcaaatccagagattgcaaaggtgtcggaatacttccattttggttgtacctctgaagatattaacaatctatcacatgcactcgctttccgtggctgtcgaaataaagttatgttccctgccatgatcgatctatgcagagcaatgtgttccttggcaacacaaaattcaggctaccctgcctccgttcgtactcttagcaaggctcagttgaatgaagcgcgtttagctgaagacttggagcaaacttgggaggtccttgctgagccaatacagacagtgatgcgaagatatggaatacctgaaccttatgagaagctgaaggaacttacgagaggccaagctgtcaccaaggacagcatgcagcaattcattgatggtctagacataccggaggaggttcgagcaaagctttcgaagctcttattatgatttttgcattataattatcctcccatccatgatcgagatatgcagagcattgtgttccttggcaacacaaaattcaggctaccctatgttggctcgaactcatgggcagccagcatcaccaacaactgtgggaaaggagatggcaaacttcgcggccagattatctgatataggaaagagtttctcagaggtgaagatactagggaaatttgctggcgctgttggcaattacaatgctgatgtggttgcatatcctgaagttgactggcctaaggtggcagaagagtttgttagatccttgggtttgcagtttaatccctatgttactcagattgagcctcatgactacatatcaaagctcttcaatctattcacccagtttaacaatgtgttgactgattttgatagagacatgtggtcctatatatcattaggctacttcaagcagataccaaaggctggtgaagttggttcttccactatgcctcataaaatcaaccccattgattttgaaaatagtgatggcaatttatgtcaggcgaattctatattgtctggtataagcatgaaactaccaatatcccggattgcagcgtgacctaacagactcaactgttttgagaaacttgggtatgggattaggtcattctctattggcttacaatgccaccatacgtggtaatcagcaaggttcaggtgaatgaagcgcgtttagctgaagacttggagcaaacttgggaggtccttgctgagccaatacagacagtgatgcgaagatatggaatacctgaaccttatgagaagctgaaggaacttacgagaggccaagctgtcaccaaggacagcatgcagcaattcattgatggtctagacataccgggggaggttcgagcaaaactttcgaagctaacccctcattcttatactgggctagcggaggatttggcaagatacatcgagaagtgggttgatcttgaatctggatttcaaatcaagtgaccttcctttttaaaaggataatcttctccacatttttttctttttgacaacgacggagaaaaaaaataacagacgggtgcgtcgtggcctctaattgtcgaccaagatgatttacgtggttctcattaatgatatttttggcacatgtaaaatgcgcctcaaggaattatgctaactgtatgttggaggtaatttaacgagctaaaaaagttgcttgctgggtttcttaacgagctaaaaaaagttcttgctgggttaaaaaaaaggggggtcgtttttaaggatccaagttta

SEQ ID NO: 15818 - DNA, 393 bp, Zea mays
  Clone ID: MRT4577_114426C.1
ggccagcaagcgggcttgggattggattggagctctcgtcagctcctatcttatcaccagagccagacagacagtcgtcatcgtctccgatccatctccgtcttcgtcctcctcgctcgacaacccaccaaggagcaagagaagaagatcgacgacgacgacgacggctgccctctgcgttcctcaaggctgtacaactactaatgctactacaggctgaacactggataattcagccacaacaccaccacatgtcattcagttactttactctaagtcttctacttcacgtttagcaaaggctttttttatgtatcttcttgttaattgaattgttaactttagttttcttttagacatagatggattaaggatctttaacatatgtttttt

SEQ ID NO: 15819 - DNA, 1402 bp, Zea mays
  Clone ID: MRT4577_114427C.1
cattgggtacctcgaggccggccgggccgcgttctcatcgagatcagtggctactgaaactttctcaattcctgagatcactgaggtgcctcagttcagcaaggaagcgcagtccttgttgaatgccattattgagaatttttgcatggatgatgcaaaagaagttaagaaaatcgagaaagtaaccaaccatgacgtgaaagccgtggagtactttctgaagcaaaggtgcagctcaaatccagagattgcaaaggtgtcggaattcttccattttggttgtacctctgaagatattaacaatctatcacatgcattggctttgaaagagggggtaaataaagttatgttccctgccatgatcgatctatgcagagcaatgtgttccttggcaacacaaaattcaggctaccctatgttggctcgaactcatgggcagccagcatcaccaacaactgtgggaaaggagatggcaaacttcgcggccagattatctgatataggaaagagtttctcagaggtgaagttgagcctcatgactacatatcaaagctcttcaatctattcacccagtttaacaatgtgttgactgattttgatagagacatgtggtcctatatatcattaggctacttcaagcagataccaaggggctggtgaagttggttcttccactatgcctcataaaatcaaccccattgattttgaaaatagtgatggcaatttatgtcaggcgaattctatattgtctgcctcaagcaggaaactaccaatatcccggttgcagcgtgacctaacagactcgactgttttgagaaacctgggtatgggattaggtcattctctattggcttacaaagctaccatgcgtggaatcagcaaggttcagttgaatgaatcacgtttagctgaagacctggagcaaacttgggaggtccttgctgagccaatacagacagtgatgcgaagatatgggatacctgaaccttatgagaagctgaaggaactgacgagaggccaagctgtcaccaaggacagcatgcagcaattcattaatggtctagacataccggaggaggttcgatcgaagctttcgaagctaaccccgcattcctacactgggctagcggaggatttggccagagacatcgagaagtgggttgatcttgaatctggatttcagatcaagtgagctcccatttgacaacaatggagaaaataaataacagacgggaaccctaggaaacgagaatccaatgctggaaccaaggtgccgtttggttcacaaatttgtaacgtaatgggtaacgaataacgttaaatcatgtttgttttagtccaactgtaatcgaatactacactaaaaattgataccagcctattcaaatttgttaccgccagt

SEQ ID NO: 15820 - DNA, 198 bp, Zea mays
  Clone ID: MRT4577_114428C.1
attcggctcgagctcaggccaccgccttctgtttctgcttgctggcctgatgaccaagaagcaggactagggacacctggactttggccaagcagggcgtcttcatcctgttttttttattctccatcagatcgtgcgctccacatgcggagcctgaggtcagtatgctgatccaactctttgaggagcatctccgca

SEQ ID NO: 15821 - DNA, 471 bp, Zea mays
  Clone ID: MRT4577_114429C.1
atggtgtcggaattcttccattctggttgtacctctgaagatattaacaatctatcgcatgcattggctttgaaagaggcgagcaatgtgttccttggcaacacaaaattcaggctaccctatgttggctcgaactcatgggcagttctatcccttcgacagatcgagcctcatgactacatatcaaagctcttcaacctattcacccagtttaacaatgtgttgactgattttgatagagacatctggtcctatatatcattaggctacttcaagcagataccaaaggctggtgaagttggttcttccagtatgcctcataaaatcaaccccattgttgacacctttttggaggcgtcaattactcaagagaaccagcggcggtgctctctggccctggctaccataatcttgtccttttctattgctcccaaagctatcaccctcttgtcggtcactgagagcacctag

SEQ ID NO: 15822 - DNA, 285 bp, Zea mays
  Clone ID: MRT4577_11442C.1
cctcggcgcgccgcaaccggccgcaggtcctggtcggcgcctcctcggtgctccgtaccatgctagggccggagatcgccgccgcgtccggtgctcgcgaaatggagttcagtaagctggcgcgtgcgcaacgggaggctctgattatgccgtcctctcctggaaaggagtatgaggagcatggcaagaatgggagggagactgaggagtcactgccgatggctgtcgagcagtgcagaccggagtgagctgcttgatctttcagccttggactcttggcttcct

SEQ ID NO: 15823 - DNA, 1146 bp, Zea mays
  unsure (1)..(1146): unsure at all n locations
  Clone ID: MRT4577_114430C.1
catggtctccctcggcggcggggggactcccaccgtatcctcccctgcgtagggtttaaccactcgcagcagccgccgtgactcgagaatcatgtcagcgccgccgtcgctcaagaccccggcaaccgccgtagcggtctctcggcgctcggtcgccaccccgagagccaccgggcttcgcggcgcctgtgctcccccgactcggcgcctccggtgctcagcctccgccgccgtggccggggcttccaccgagatggctgatgctccgctggactgggcagagaggtcgctggaggagttacgcagcttgccggaccacgacacgttctgcttgatggcgctctcgccgctggacgggcggtacgatcgcttcgtcaaggagctgatgccctttttcagcgagttcggcctaatcagataccgcgttctcatcgagatcaagtggctactgaaactttctcaaattcctgagatcactgaggtgcctcagttcagcaaggaagcgcagtccttgttgaatgccattattgagaatttttgcatagatgatgcaaaagaagttaagaaaatcgagaaagtaaccaaccatgacgtgaaagccgtggagtactttctgaagcaaaggtgcagctcaaatccagagattgcaaaggtgtcggaattcttccattttggttgtacctctgaagatattaacaatctatcacatgcattggctttgaaagagggggtaaataaagttatgttccctgccatgatcgatctatgcagagcaatgtgttccttggcaacacaaaattcaggctaccctatgttggctcgaactcatgggcagccagcatcatcaacaaattgaaaaaggtctccacattttttttctttttgacaacgtcgtaagaaaaagtaacatatgcgtaagtcgtggcctctaattgtcgcacaaaataatttaagtggttctctttaataaagttttggcacatgtaaaatgcgcctcaaggtattatgctaactgtatgttggcggaaaattatcgagctaaaaaaagtttcttgataagtctcttatgaaaaaaaaaaagtaaagggcggccaaagatctagtgatataccannctgggaattaattccgacccggtccctgcgg

SEQ ID NO: 15824 - DNA, 819 bp, Zea mays
  Clone ID: MRT4577_114431C.1
aaagctcaaggaggatacactcatgtactggtagcagtcgacaaattcaccagatggatagaattcaaacccattgcttctttaacctcagccaaggccgtggaattcatacaagacataatattcagattcggaataccaaacgatatcataactgacttaggatccaacttcacaagttcagaattcttcgatttctgtgagcaaaagagcattcagatcaagtatgcttcggtagcgcacccgagggccaacgggcaggtcaaacgagctaacgggatgatattggaggcactcaggaaaagggtcttcgaaaagaatgaaaagtttgcagggaaatggataagggaattgccctacgttgtttggagcctaagaactcaacctagccgagctttgcatggaaacacccccttcttcatggtctatgggtcagaggcagtattacccgccgatctcaagttcggggcaccgaggttggtcttcgaaagcatagcagaagccgaagctactaggctggaggacattgatgtactcgaagaagaacgactgaatgcaataattcaatcagcacgataccagcagactctgagacgctatcacgacaaggccgtgcgacaacgatccttctcagtgggagatcttgtcctccgccgaattctaacgggggagggatggcacaagttgtcacccttatgggaaggaccattcatagtagcagaagtcactcggccggggtcatatcgtctcactcaaatggacggcacaggaatcgggaactccaggaatatagaacacctcaggaagttttacccctag

SEQ ID NO: 15825 - DNA, 1395 bp, Zea mays
  Clone ID: MRT4577_114432C.1
ccacgcgtccgcaactatgacgtgaaagccgtggagtactttctgaagcaaaggtgcagctcaaatccagagattgcaaaggtgtcggaattcttccattttggttgtacctctgaagatattaacaatctatcacatgcattggctttgaaagagggggtaaataaagttatgttccctgccatgatcgatctatgcagagcaatgtgttccttggcaacacaaaattcaggctaccctatgttggctcgaactcatgggcagccagcatcaccaacaactgtgggaaaggagatggcaaacttcgcggccagattatctgatataggaaagagtttctcagaggtgaagatactagggaaatttgctggcgctgttggcaattacaatcctgatgtggttgcatatcctgaagttgactggcctaaggtggcagaagagtttgttagatccttgggtttgcagtttaatccctatgttactcagattgagcctcatgattacatatcaaagctcttcaatctattcacccagttcaacaatgtgttgactgattttgatagagacatgtggtcctatatatcattaggctacttcaagcagataccaaaggctggtgaagttggttcttccaccatgcctcataaaatcaaccccattgattttgaaaatagtgatggtaatttatgtctggcgaattctgtattatctggtataagcatgaaactgccaatatcccggatgcagcgtgacctgacagactcaactgttttgagaaacttgggtatgggattgggtcattctctattggcttacaaagccaccatacgtggaatcagcaaggttcaggtgaatgaagcgcgtttagctgaagacttggagcaaacttgggaggtccttgctgagccaatacagacagtgatgcgaagatatggaatacctgaaccttacgagaagctgaaggaacttacgagaggccaagctgtcaccaaggacagcatgcagcaattcattgatggtctagacataccggaggaggttcgagcaaagctttcgaagctaacccctcattcttatactgggctagcggaggatttggccagatacatcgagaagtgggttgatcttgaatctggatttcaaatcaagtgaccttccattttaaaatgataatcttctccacattttttttctttttgacaacgacggagaaaaaaataacagacgcgtgcgtcgtggcctctaattgtcgaccaagatgatttacgtggttctcattaatgatatttttggcacatgtaaaatgcgcctcaaggaattatgctaactgtatgttggcggaaaattaacgagctaaaaaaagttacttgctgggttaacaaaaaaaaaaaaaaa

SEQ ID NO: 15826 - DNA, 987 bp, Zea mays
  Clone ID: MRT4577_114433C.1
aaatcaaccccattgattttgaaaatagtgatggcaatttatgtcaggcgaattctatattgtctggtataagcatgaaactaccaatattccggctgcaggtattgcggctaatccaattttctgcctaaatttcagtttttctagcatgaggtatcaggattaaaatctggtgcctcgtttcatgatacctatacgagattggatcttaaactatatttatcatctcattagtttgttcttatactgatgaaccaccatgttgtatgattgacagcgtgacctaacatactcttctgtgttgagaaacctgggtatgggattaggtcattctcttttgtcttacaaagctaccatgcggtgtatcagccaggttcaggtgaatgaatcacgtttagctgaagacctggagcaaacttgggaggtccttgctgagccaatacagacagtgatgcgaagatatgggatacctgaaccttacgagaagctgaaggaactgacgagaggccaagctgtcaccaaggacagcatgcagcaattcattaatggtctagacataccggaggaggttcgatcgaagctttcgaagctaaccccgcattcctacactgggctagcggaggatttggccagagacatcgagaagtgggttgatcttgaatctggatttcagatcaaatgagctcccatttaaaaatggatgatgctctccacagtttttctttttgacaacaatggagaaaataaataacagacgggaaccctaggaaacgagaatccaatgcgccgtggcctctgacctgtctctaccgagatattttacgtgctcaacatttatataattctggcacatgtaaaatgcgcctcaaggaattatgcaagctgtatcttgactggaaaaaaaaaaagctgaaaaagttgaccgctcgattttaaaaaaaaaaaaaaaaggcgccgttagaggtccaagctacgacgcggctggac

SEQ ID NO: 15827 - DNA, 140 bp, Zea mays
  Clone ID: MRT4577_114434C.1
tttttgtctcaggcacaccccaaagaggcgcgatgttgtcatttacagtagcaaggcccaacaaaacccaaacacgacaaagctactatccaaccataattcatcttacagctcatatcaaaccgaatacactgtttcac

SEQ ID NO: 15828 - DNA, 404 bp, Zea mays
  Clone ID: MRT4577_114435C.1
gcaaaatctatggaccacaagacacacaagaaacatgcaaagatctcatatgccagacacgacagggctcataaggggacttaaggttgagatcacaccaccgcatctagttctattctagacctagaacatggcaaaatcctttcaggaccaccacaagttaactcagggaagctcgctgcagctcagtccatacacaacagtcagctgctcaacaagttaaaaaaaaacgaacacttgaggttcatgcatctctatagtgtgccatcaagacgtgacatgcgaccatggtcttggacaaaatcatcttcgtcgtcattcttttgccatgctcttttgcaagacatgatttgcaataatctcccagtctccatcatgatagaaacccccgtagtcgcaaatct

SEQ ID NO: 15829 - DNA, 506 bp, Zea mays
  Clone ID: MRT4577_114436C.1
ctctgcggtgactcgatcctccttcgtcacgaaacctatgacggcttcaattggtgcccggtcaatatctactgaacatagagggccttgactaccagtggaatgcaaccttgctaagatctccccggctatcattgtgaacttggactggtggcacaaaacactacatacgatgactgcaaacccagggaaattgtggataccgtacaccgacctacatgaggatgctcaaagggtggacttaaacaacaaagtgaatgttaccattaccttataaaaggtactatcagatgctcatactaatgcctctgttcaaaggttccagatctgttcacaatatgcttatgaccacagaaatgaggctcaataatttatatgtagagacacagaaatctttctaatgttgtccaagactgtgccatgttttcccattaatttggacatgcccttagcaagaaccgtattatttccaaccaggtacacgtgcttcatatatcacttaatgc

SEQ ID NO: 15830 - DNA, 249 bp, Zea mays
  Clone ID: MRT4577_114437C.1
gctaccgatgagctttaacaaacgacgaagctgacttgcatgaaagattggttgctatacgagaacggctaaaaggacataccgctgatcttcctaagagggtcaatacactggtatagacgtggcgacttctggctagcatgggtcctgccggacgcagcgttcatattcccagtggtccgcaagtatacgagctgggtgaaacagagcgtacttgaggccttacaacagctgacataggcagggatg

SEQ ID NO: 15831 - DNA, 331 bp, Zea mays
  Clone ID: MRT4577_114438C.1
ggccgggggcatacattccgacattggcttggccaaatactaatctggaggataatccaagcccgaggggactgccccttcgtccgccatcggtcgctctataccctcgagagcgatcctagctagggcaagacgatatcgccgcggatgatgatggacgcgccgaggatcctacagtacttcaagtaaaggtgatcctcgcgcccgggtcacaggagatcttgcaaggaccctgttggagaagatactgcgggcgcccctctcgcgcgcgacagacttcgctgattgaaccccccctccacaccccttcagcgcaacagcggcttgcaac

SEQ ID NO: 15832 - DNA, 440 bp, Zea mays
  unsure (1)..(440): unsure at all n locations
  Clone ID: MRT4577_114439C.1
ttttttttttttnnnnnnnnnnnnnnnnnnnattgtcggttcggaccctttttcccgagatatatacaaaggctcccctcataaaccgcaatacaacaaacaaaatttccagtgtggccgtattaaccccattgcagatggcgcatcctctcgtctgtgagaggtcctactccataaaaaatcatcttcttctcttctcttcgagttttccctttatcgtggcgcaatttagctggagaactttcgggtaatcttggcgataatgtgaagagcaacgacgctgaagatgaagacaagggacagaaccagaacgacaacagggtcgaccttcagaccgggcgactcatcggtgtaaagtcgcagcatggtgctgctggaaccaccggtgccagcggcgcgagtgctgctaggtcgagtattggcaatcttctccttctggt

SEQ ID NO: 15833 - DNA, 366 bp, Zea mays
  unsure (1)..(366): unsure at all n locations
  Clone ID: MRT4577_11443C.1
ggccacccccaagaccgcacttcgaaattcctcggccgccgccacacatggggacgcgggccacngccctgcanccagacccaggcgctcctgcacagaatataggggacggaggccactggggcaagggccactcaccaccaccaagagggacgctgacgacatggaggacgaacacgcccccacggccggccagggtgccaaaccaggcgactccgccagaagaaagggacggggaagacacccagaccatactagcgacagaaaaaaaagaaaccaatgaagcagggcgccagggccaacgctctagaagcaagggccttaaggcaagaccctatgaaccttaccagcatcacaaactaacaa

SEQ ID NO: 15834 - DNA, 402 bp, Zea mays
  Clone ID: MRT4577_114440C.1
gaaaaagcaaccgaggatgcgtatatgggggccaaagcgctttgtcgtcctctctccatgtctatatatgatgcctcgacagggatgacttgataccttattttccgctgcggctgtaggcatgacctgtagactactggaaactcacaatttggagaggatcttttggtgattgctgctgatcaaccatttggattccctgccacatttacatttatgaaataaatccaagatcgtggatgctggggcacttgagcccctgcttggttatctgcgatcgagcgatccaaatttgcatgagtgccttaagagcactttctttacttgtggaagtcctcaaaggagggatttcccaagccaataatgatttttcgatggtctttttcaacccttctacaatcg

SEQ ID NO: 15835 - DNA, 213 bp, Zea mays
  Clone ID: MRT4577_114441C.1
cggccgcccagaaaaggctatctgggcatctattggtttcaaatctgaaaatggacggcatgctgaaaatcattctgtttttgaaggaatttctcttggcggcgtggatacgactacatatcattaccctactgtggataattaccagaccagggataatggctcccaatcccttgagctgtgtgccaaggatatgacaaatcctaatgacat

SEQ ID NO: 15836 - DNA, 1740 bp, Zea mays
  Clone ID: MRT4577_114442C.1
tgggtacctcgaggccggccggggggttggtctagaagcaataaccggggtgacagaaaagaggccgcaactgcaaggcaccgcaggagagaagaagatcaccagcaacaccaagcaactactcgtacgcggaaagagaaacccagaagccggtcttgttggattattccgttcgtcagttccgtccggagcggcggagcaaaaatgagtgacaacctgatggacaaggttagcgcctttggtgagcgcttgaagatcaccgggacagaagtcagcaaaaagatgactgccggaatgagctccatgagtttcaagatgaaggagttgttccaggggcagactccagctgacaagattgttgagggtgccacctcagaggatctggacgggcctgactggaactcaaacttggagatttgcgacatgatcaacacagagaaggttgacagtgtggaactcatccgtgggatcaagaagaggatcatgctgaaggatgcgagggtccagtacctctccttggtcctgcttgagaccattgtcaagaactgtgacaaggccttctcggaagttgcggccgagcgggttcttgatgagatggtcaggttgattgatgatcctcaaaccgtggttaataacaggaacaaggcccttatgctcattgaagcatggggggagtctggtgatgaactccgttatctgccagtctatgaggaaacatacaagagcttgaaatcaagaggagtgcggtttcctggacgtgacaatgagagcttggctcctatatttactcccgcgcgatcagttgctgaagctgatgttgatgcaagcttgccccagcaggtgttcgaggacgtccatgttcatacatatactgctgaagaaacaaaagaagcatttgatgtagctcgtaacagcatagaacttctttcgactgttctttcctcttcccctgagcaggatgcttcgcaggatgacttgacggccacactcgtgcaacaatgctaccaatctcagcacactatccagaggattattgagaccgtcggagacaacgaagctgtgctcttcgaggccttgagcgtgaacgacgagatccagaaagtgttgtcaaagtacgaggagatgaagcagcccagggcctcggagcatgcagaacagagagcagttgtcataccggttgccacagaacatgaagatctgactgctgccgtcaatgaagacgcccttgtcagaaaaccagctgccgcgagaacaaggtcaggtggggatgatgatatccttgatgatctggacgagatgatattcggcaagaagggaggtagcagctcccaggaagggccgaagaagccagatccaaagaaggatgacctgataactttttaagcgtacccttctataattgcagcctttgcttgctattttctggtgatgtacccactcggtagattgaagattccttaggatttggatcgattgtctattcgcatacgattcgtatctgccccctttcggtttgttcagtaaagtcgctgcactttctcagtcttgtttcaaaaaaaaaaaaaaaaaagcggccctagggccatgaatgtgttggatggtggattatgcaccaacggggggaaataaaatcatgacggaaataaaaaaaaaaaaaaaaaaaaaaaaaaaaaaaaaaaaaaaaaaaaaaaaaaaaaaaaaaaaaaaaaaaagcttgtacctgcccgggcggccgctcga

SEQ ID NO: 15837 - DNA, 603 bp, Zea mays
  Clone ID: MRT4577_114443C.1
attgggtacctcgaggccggccgggtcggcgtcttcaaaacgccggcgcaaactctcgcccgagcccgacagatcttcaatatccccattaccgcccaccagatcagacctttcccgggcaattatcgtggctgcgttcctgaaggtggtcgtcgcagcgtctcgtttagatgatcgacatcgagtggagataggggtgagtgttatctccttcccacactcgggtaggaccggcatgcaagtcgtcagcgcatgctgggaactttactgcctcgagcacgtcccccatcctgatggacaaaagcctggatagaagaccgcgagacatcccgaggatgccttcagcaacttcttcagccatactggtgctgggaagcacgatccccgtgcaatcttcgttgatctacaacccaatgtgatctatgaggtgcgcactgccgcggaccgccaggtcttccacgctgactacctcatgaatggcaagcgacatgccgctaaccatttcccccgtggccactacacaattggaaaggatattggtgatctgtgccttgaccgtatccgcaagcttgctgacaacggcaccggtctcgagggtttcct

SEQ ID NO: 15838 - DNA, 320 bp, Zea mays
  Clone ID: MRT4577_114444C.1
cagagatgaatgttaagtcatgatcccatggcaactgggtaacacgacttatgggtaaagatgcaaaacctctatagagtgtaaaactggtatatcagccatgctcacggtcatgagtgctcggaccctcacatgagtaacttatggaataaacttaatttgtcatatgcattgcattgttgtcacacccggatttaagggataaagccaggtgcgtctcatatgtgcgccaaagaagaacaacacatataatgacaaagtgtatagagataaatgtcacaaaattaataaatgtcattattacatagaggcagtcttac

SEQ ID NO: 15839 - DNA, 529 bp, Zea mays
  unsure (1)..(529): unsure at all n locations
  Clone ID: MRT4577_114445C.1
nagaccgtggtgaataacaggaacaaggcccttatgctgattgaagcatggggagagtccggtgatgaactccgctatctgccagtctatgaggaaacgtacaaggtttgtgagcacaagccttcattctctttaccattgtttcaaccaaaccaactgcacaacgcttatattgttccagttgactaatactactaactgcagcagtttgttttctgatactacttcatgccaaaagatagaagtacaataatctttgttgttccatgatgcaagtataaggaacaatcagatttaggaggaaattgttgagataaggttgctttattgcagtcactgagctattcatgcttttgtagtccataagttgcatacatttttgttattgttataattttgtacaatcagctgagctgtccaggtacttaaaaagagtgccttaggcagcagttatatcattcctatagttgtggatttattattataataatttgctagttttgattaactaaagttattgataaatctg

SEQ ID NO: 15840 - DNA, 1892 bp, Zea mays
  Clone ID: MRT4577_114446C.1
gggtacctcgaggccggccggggagaagaccactgtgttcgcaccaagcaactactcgtacgcggaaagagaaacccagaagccggtcttgttggattattccgttcgtcagttccgtccggagcggcggaggtacgtctacgcccctcaaccccggctcctaatctgcatctcctgcttccccaaaaattccatgtcctgatcttctctgccgctgcccccaatttccctctcatctcttgctgtctcttccgccgccgccgcacgtcttccttcccatcgctctctactggtgctggactgccgtggggtggagatcggcttggaccaactcatattttaggctctgttggtggtgcaaaaatgagtgacaacctgatggacaaggttagcgcctttggtgagcgcttgaagatcaccgggacagaagtcagcaaaaagatgactgccggaatgagctccatgagtttcaagatgaaggagttgttccaggggcagactccagctgacaagattgttgagggtgccacctcagaggatctggacgggcctgactggaactcaaacttggagatttgcgacatgatcaacacagagaaggttgacagtgtggaactcatccgtgggatcaagaagaggatcatgctgaaggatgcgagggtccagtacctctccttggtcctgcttgagaccattgtcaagaactgtgacaaggccttctcggaagttgcggccgagcgggttcttgatgagatggtcaggttgattgatgatcctcaaaccgtggttaataacaggaacaaggcccttatgctcattgaagcatggggggagtctggtgatgaactccgttatctgccagtctatgaggaaacatacaagagcttgaaatcaagaggagtgcggtttcctggacgtgacaatgagagcttggctcctatatttactcccgcgcgatcagttgctgaagctgatgttgatgcaagcttgccccagcaggtgttcgaggacgtccatgttcatacatatactgctgaagaaacaaaagaagcatttgatgtagctcgtaacagcgtagaacttctttcaactgttctttcctcttctcctgagcaggatgctttgcaggatgacttgacaaccactcttgtgcaacaatgctaccaatctcagcacactatccagatgattattgagaccgttggagacaatgaagctgtgctctttgaggccttgagcgtgaacgatgagatccagaaagtattatcgaagtacgaggagatgaagcagcccagggcctccgagcatgcagaacatgtaccagttgtcataccgattgctgcggagcatgaagatttgaatgctgttggcaatgaagacgcccttgtcagaaaaccagctgccgcgagagcaacgtcaggtggagatgatgacatccttgatgatctcgacgagatgatatttggcaagaagggaggtagcagctcccaggatccgaaaaagccagatccgaagaaggatgacctgatcagcttttaattacctttccataatcgcagccagtacttgctattgtctggtgctgtacccactcggtagattgaagatttttattcgcatacgattcataccggtttgttcagttaagtcgctacactttgtcaatcttgtttcatggctgggtcccatgaccatgaatgtattgtattggatggtggattatgcgagacggcgggaaagtgtccaatgtgggtgaatctttattcttcgctacagtagccattttttttaaactcatatcttatgcttcggctaatcaagtagatctcttataatgccgcaaaaaaaaaaaaaaaaaaaaaaaaaaaaaaaaaaaaaaactggagactctc

SEQ ID NO: 15841 - DNA, 1728 bp, Zea mays
  Clone ID: MRT4577_114447C.1
cgggggaatgaagagaaatcccggaccacccggccgacaagccgctcttgttgattattccgttcgttagttccgtcgcggagctacgctaagcctacgcccatcggcccctgttttcctaatccgcttctcctgcttccggggaaatttcgtgtccagtatcttgatcttccgccgccgcgcttcacgccagggctccttccaccggcgtcctccttaccgtcgtcctctactggtgctggactgctgcgggggtggagatcggcttagatcaactcttaattttgccgggactctttagagggcgcgtgcgctggtacagcaaaaaatgagtgataacctgatggaaaaggttagcgcctttggtgagcgcctgaagatcaccgggacggaggtcagcaagaagatgacggccggaatgagctccatgagcttcaagatgaaggagttgttccaggggcagactcccgctgataagattgttgaggacgccacctcggagaatctggacgggcctgattggaactcaaacttggagatttgcgacttgatcaacacagagaaagttaacagtgtggaacttatacatgggatcaagaagaggatcatgatgaaggatgcgagagttcagtacctctcattggtcctgcttgagactattgttaagaactgtgagaaggccttctcagaagttgcggccgaacgggttcttgatgagatggtcaggttgattgatgatcctcagaccgtggtgaataacaggaacaaggcccttatgctgattgaagcatggggagagtccggtgatgaactccgctatctgccagtctatgaggaaacgtacaagagcttgaaatcaagagtgcggtttcctggacgtgacaatgagagcttggctcccatatttactcccccacgatcagttgctgaagctgatgttgaaaccagcttgccccagcaggcgttcgaagacgtccatgttcatacatatactgctgaagaaacaaaagaagcgtttgatgtagctcgtaacagcatagaacttctttcgactgttctttcctcttcccctgagcaggatgcttcgcaggatgacttgacggccacactcgtgcaacaatgctaccaatctcagcacactatccagaggattattgagaccgtcggagacaacgaagctgtgctcttcgaggccttgagcgtgaacgacgagatccagaaagtgttgtcaaagtacgaggagatgaagcagcccagggcctcggagcatgcagaacagagagcagttgtcataccggttgccacagaacatgaagatctgactgctgccgtcaatgaagacgcccttgtcagaaaaccagctgccgcgagaacaaggtcaggtggggatgatgatatccttgatgatctggacgagatgatattcggcaagaagggaggtagcagctcccaggaagggccgaagaagccagatccaaagaaggatgacctgataactttttaagcgtacccttctataattgcagcctttgcttgctattttctggtgatgtacccactcggtagattgaagattccttaggatttggatcgattgtctattcgcatacgattcgtatctgccccctttcggtttgttcagtaaagtcgctgcactttctcagtccaaaaaaaaagaaaaaaaaaaaaaaaaaaaaaaagcttgtacctgcccgggcggccgctcga

SEQ ID NO: 15842 - DNA, 335 bp, Zea mays
  unsure (1)..(335): unsure at all n locations
  Clone ID: MRT4577_114448C.1
gccacgggggggcgccnngagaccacanaaacaanggngaaggcngnngccgngcccggnagcagcgaagggggcaagggcaccaccnnaacacccaaagggggggggggggggggcttttttttttttngncncnggccncaanccnggccgccagggggggcangngcangcgcgcggggacaccaccaanggcngcangncaacnggaccacacnacaanccngcgagcaaggaacanggagcaccanaagacgagaaccgccacgccgggganccnggaaangngacagcnggagcagacggggnngcaaacacnaangggaccgacagcc

SEQ ID NO: 15843 - DNA, 2074 bp, Zea mays
  Clone ID: MRT4577_114449C.1
cccacgcgtccggcaataaccggggtggcagaaaagaggccgcaactgcaaggcaccgcaggagagaagaagatcaccagcaacaccaagcaactactcgtacgcggaaagagaaacccagaagccggtcttgttggattattccgttcgtcagttccgtccggagcggcgtagtgtcttttgctggtgcaaaaatgagtgacaacctgatggacaaggttagcgcctttggtgagcgcttgaagatcaccgggacagaagtcagcaaaaagatgactgccggaatgagctccatgagtttcaagatgaatggagttgttccaggggcagactccagctgacaagattgttgagggtgcccctctgacgagtctggacgggcctgactggaactcaaacttggagatttgcgacatgatcaacacagagaaggttgacagtgtggaactcatccgtgggatcaagaagaggatcatgctgaaggatgcgagggtccagtacctctccttggtcctgcttgagaccattgtcaagaactgtgacaaggccttctcggaagttgcggccgagcgggttcttgatgagatggtcaggttgattgatgatcctcaaaccgtggttaataacaggaacaaggcccttatgctcattgaagcatggggggagtctggtgatgaactccgttatctgccagtctatgaggaaacatacaagagcttgaaatcaagaggagtgcggtttcctggacgtgacaatgagagcttggctcctatatttactcccgcgcgatcagttgctgaagctgatgttgatgcaagcttgccccagcaggtgttcgaggacgtccatgttcatacatatactgctgaagaaacaaaagaagcatttgatgtagctcgtaacagcgtagaacttctttcaactgttctttcctcttctcctgagcaggatgctttgcaggatgacttgacaaccactcttgtgcaacaatgctaccaatctcagcacactatccagatgattattgagaccgttggagacaatgaagctgtgctctttgaggccttgagcgtgaacgatgagatccagaaagtattatcgaagtacgaggagatgaagcagcccagggcctccgagcatgcagaacatgtaccagttgtcataccgattgctgcggagcatgaagatttgaatgctgttggcaatgaagacgcccttgtcagaaaaccagctgccgcgagagcaacgtcaggtggagatgatgacatccttgatgatctcgacgagatgatatttggcaagaagggaggtagcagctcccaggaaggtccgaaaaagccagatccgaagaaggatgacctgatcagcttttaattacctttccataatcgcagccagtacttgctattgtctggtgctgtacccactcggtagattgaagatttttattcgcatacgattcataccggtttgttcagttaagtcgctacactttgtcaatcttgtttcatggctgggtcccatgaccatgaatgtattgtattggatggtggattatgcgagacggcgggaaagtgtccaatgtggcagaatcggttcccatcaccatgaatgtattttattggatggtggattatgagcgacaaaaaaaaaaaaaaaaaaaagtgaatctttatttttttatcaagccttcattctctttaccattgtttcaaccaaaccaactgcacaacgcttatattgttccagttgactaatactactaactgcagcagtttgttttctgatactacttcatgccaaaagatagaagtacaataatctttgttgttccatgatgcaagtataaggaacaatcagatttaggaggaaattgttgagataaggttgctttattgcagtcactgagctattcatgcttttgtagtccataagttgcatacatttttgttattgttataattttgtacaatcagctgagctgtccaggtacttaaaaagagtgccttaggcagcagttatatcattcctatagttgtggatttattattataataatttgctagttttgatt

SEQ ID NO: 15844 - DNA, 191 bp, Zea mays
  Clone ID: MRT4577_11444C.1
cctcgagccggcgggagcacaattcgcacctcaagccaaagaagtgcgatgccctttgaaccagcaactgaagcttcctcgtctcatcatcgagaccagtaagctaacatggcggataatctcaagtgggatcctgatctagacctactcgacaacgatgaatgaatggatggaaccaccagagacgaaaa

SEQ ID NO: 15845 - DNA, 775 bp, Zea mays
  unsure (1)..(775): unsure at all n locations
  Clone ID: MRT4577_114450C.1
gcgtgggcggccgcgtggggggggggggggggggaaaaaaccaaantgcgggaagtgaaananaagccagggaaggactcaaaagagtaaaaatgaaagagaggtagggaaagagtccaaancgcccagtgaaagagaaagcaggaaggactcaaaagatttagagggggcggggggggcaggaaaggagtccaaggttgtggaaaagctggatgaccatactttgagcaacaaggaggaatcagacagcgaaactctcagcgtctggaaaaaacgtacagcgaaagcaacatagtcttgctttctcagctgacctttcatattaggatgcagatttcacaggcaggcagtcgttcgcgaatgtggatatttcattgattgacaccttgcaattgacagttgtaatgtagaaaatgtttgtttcgatagcaacacgttagtatagaagtggaataggatttgtttgtaatgttattagatgtgggcacctgttgcccattaagttatggcatggcatcccccggttgtcttgtaatttttagaggggggtcagaggttttgtaacatactatctattagatcttttgcaggacatagtgctttgttgttgaactcttgtagaaatgttgtaggcaataaacagtgatacatgtaaaactagctgcgggcatccaaattttggccccggttcgattgccccagtactttggatctagaatctgacgctggagatttagttttggatttatgtaccccccccccacgcgccgttaag

SEQ ID NO: 15846 - DNA, 289 bp, Zea mays
  Clone ID: MRT4577_114451C.1
gtccgcccagcgctttcgcccactcgttcgcccactctttcgaaaacaaaaaaaaaaaaaaaaaaggaaggtttaaaaaaaaaaaagggcgccccaaaaaaaaaaccaaaacaaaaaaaaacaaacatacaacaaaaaaaaaacgccaaccgttcaacataacccaaatttactgacccttccatcccaactaaaaccactgctaaaaccccacctaaacccaactaaatggccttgcataaaaaacccctaaacccagaaaaccctacagctaaccaacccaaacccc

SEQ ID NO: 15847 - DNA, 298 bp, Zea mays
  Clone ID: MRT4577_114452C.1
cttcaatacccccaaaatgctatcatatttttcacagctcatccacttcctctatcgtatgtttaataaaaaagggatccatataaatcaaaaatctaaaattttatctatcttatcatctaataactataaaaactatcaataacaaatccatacatactttcttatcttatcctactttaaccaattaaactactctaaccgtacactcatcacacaattatttactttcacacaaattccttaaaaaccttctttcttatcccattactttttttatccaacacattaaaacttt

SEQ ID NO: 15848 - DNA, 261 bp, Zea mays
  unsure (1)..(261): unsure at all n locations
  Clone ID: MRT4577_114453C.1
gtcgcacggngcctaccgacggccggacgtcagcgactctgtcctgacaacctcaagcttgcgctctgattcctgttccgtgtcnntacgcacttctataatttgtaggcgagtataggttataggaagagcagcgnacagggttaccaagtgaatccanatctgaacaagtttctganaacacagtgcaccgtnttcnaccggcattatttgaaantccanttacaccacacactgntccatnacantttgtaananaaa

SEQ ID NO: 15849 - DNA, 369 bp, Zea mays
  Clone ID: MRT4577_114455C.1
cggacgcgtgggcggacgcgtgggcggacgcgtggtgaaaaaaaaaaaaaaaaaaaaaaaaaaaaaaaaaaaaaaaaaagaaaaacataataaaaagatacaaaattgagctacactcatctattacacgaaacatggtgttctgttgttctatgtctgtttgcttcactgtatcgtgatcttgctactgaggacgtgcttattccattttcagacctcgcttggcgcaatgtccggacaagtcctctttttggcagctttattttaactgggttaggccacccccggtctgcgcttcccgaactgtgccaagcatagccatggtgtattatacgtcctattgtagaaccactagtggctgcggaatta

SEQ ID NO: 15850 - DNA, 828 bp, Zea mays
  Clone ID: MRT4577_114456C.1
ctccccacccaccaacgatcgaccaattccttccaactccctcgtcccaccaagccaccacgcacctactcagtacttcctcccgacttcactaccctcccactcccaacctccgccctccacacccaccaacgatcgacccacctcgcgatctccgccacccgcctcctccaccccgacgaatcgacgatgatgcggggcgacgagtaccggtaccaacagcagcagcagcacggccccggcggcggcgcgccgcacggcctgatcatggcggtggtggcggggctggtggtggcgggcccgctgttcctgggcgacggcggcgaggcggtcacctccgccgtggcggacctgctcggccccacgggcctgctcctgctccccgtcggccccgtcctcgtcatccgcgtcctctcctccgtcctcggcgccgccgcgctcgccggcgccctctccctcggcggctccccggactccgtgcaccgcgtcggcggcttgtgtgctgtgctgcgcgctcgcgctcgccctcatcgccgccctcctctactacaggtcggcgctattcggcggcggcggcggcgacgacgagtagacagctgccagctgtggcttctgcgctgtgcggttcgttgcggtgcggctagtcggtccacacgacgccggctcgctaaactgtgcgcgcggcatcctgctgctgctgccgtcgtctcgtctggatttggaaacgccaacctcctgcgctacctaccttccttgcttgaatgtttcggtagtttagccaagattttctatttaattttgttaattaataccaacaacgctgaacag

SEQ ID NO: 15851 - DNA, 370 bp, Zea mays
  Clone ID: MRT4577_114457C.1
taatcatggattaattaggcttaataaatgtagttttcatctatgtaattagttttgtgattagactatatttaatactcgtaattgacatttaaacacccaatatgacacggactaaacttttagttagttgaaccaaacatagtcaaatccttgttcacaaaccgtggtcagtgcccaatgaatttgtttgtgctaaagttgtgggcttacaagttttgaacacctgtattggccatagggcctgtttgtttcggtttatggccaaattttggctgttaaacgcttcgtttctcggtccgcttctgtgaaaattgctcaaattaacgtgaatacatcatggttatcaaaaagttgcttaagcaccttt

SEQ ID NO: 15852 - DNA, 415 bp, Zea mays
  unsure (1)..(415): unsure at all n locations
  Clone ID: MRT4577_114458C.1
agggaaatctggtgcgcctgccggtatcccggtccggannattcccggggtcggacccaacgccgtccgcccacgcgtcctttagatttctctcgagaaagagatagcaaagggtggcccgtgcagaaatgcagctcctatcttgctaaacactgggtcaggcaaatgcactgacctgcaaaagatgaatggatgccccagtgagaacaactgtggtgacaaggggagagattcagcaagcagttccaaatcaacgcctgtgaaagtaagctcctttgacggaacctgccaatctgacggtgctcaacaccatatcacagagaacaacactcaaggtcgatcaagccccttcaagaagatgctggaccctattatgaagttcaaatctcctaagagcccatctatcatggaaaga

SEQ ID NO: 15853 - DNA, 399 bp, Zea mays
  Clone ID: MRT4577_114459C.1
gccggccgggtccgggtcgtgctcgtagaagatccaacgtggtctcaagcgtaagcctatgggtcttatcaagaagctccgtgctgccaagaaggctgccacccccggtgaaagacctgacgttgtcaagactcatctccgtgacatgatcattgtccctgaaatgattggttccgttgttggtatctataacggtaagactttcaaccaagttgaaatcaagcctgaaatgactggtcactaccttggtgaattctccatcacctacaagcccgttaagcacggtcgtcccggtattggtgccactcactcttccaagtttgttcctcttaaataaacaaattgcttgtatgttttgcaatttaaatactataaaaaaaaaaaaaaaaaaggccccta

SEQ ID NO: 15854 - DNA, 186 bp, Zea mays
  Clone ID: MRT4577_11445C.1
aaacttccactatcacttctaaccgaacgctatttaacacaattcttctactacactatacactcttcctacacacaaattacttcaatacacattcccatacactacaccactaccaatcactacccacttcaaactcactccccataccactatcatcctccaccaacaatatctcaccaccac

SEQ ID NO: 15855 - DNA, 540 bp, Zea mays
  Clone ID: MRT4577_114460C.1
gagttgtcgtcacggggtgcagcgaccctggcctgtggcagtggggtgctcgccgcaaggtggtgcccggtcggtgggggtggcatccgacacagctttgcggctgctacggcagccagcacgtcaatgtccctctgagagggtttgggcgggatgtcagggcagcgaagttggtggacgtagcctgcgttgtcccagggtcttggcttgacgtttgtgctaggggacttcttgggcgaaagcctcggcgacggtgatgtccaagggtgtcgcttccctgttgagggtgtcgcactccccagcactggcttccttgagcaaaagcctggtccatctcgtacatgcgacggtggcatccccgatgtcactaccttcctaaaggcgtcgcttttgaagtttgtatcggccacgacgtcacctttcgcttctcagcgaccggtatgcgggtggaggtgcggacttgcagcgtgaagtcagagctactacgtcaggggatgtggctcaacaacgatgacgtgacgcgagccccccttcttcgtg

SEQ ID NO: 15856 - DNA, 303 bp, Zea mays
  Clone ID: MRT4577_114461C.1
tcacaggccttccctatttcaacaactcgcatagattatccacaaaacatgctctactgaatgctagcctaaatatactaactatcatcaataatccaacacatgctgctatacactatcatctttacaagaaaccaacccatgtcacagagaagcatcatctcattttcaaccctctactatgctcctacgatatcatcctacttacaatctaactaaatatcttccaagtcaatatcacaactacctacacccatctctttcatccagactctgactacagactggttaaccactacttcc

SEQ ID NO: 15857 - DNA, 369 bp, Zea mays
  Clone ID: MRT4577_114462C.1
tccctttccacacgaaggcgcgagggccaccagaacggagcacgccggggggagcgccgttgcaccccaggacacgcaggaccacgacgacgccagggaccccactaccagaccaccgcgcgcaacccacgcaccaaccgccggacgccgcgcaacagccggaggcggaaggcgaagcaggcgcccacctcacccacggccgagcacgaccacaccaaacgcaactacgacgcgaacgacaccggcacgggcaacaacgccgaagaagagccccccgaaaacagaagcgcccaggaccccaggagcggcgccgaccgcacaggcggcaagatcccacggagggtggacgggcaggacatcagagagggg

SEQ ID NO: 15858 - DNA, 674 bp, Zea mays
  unsure (1)..(674): unsure at all n locations
  Clone ID: MRT4577_114463C.1
ccggccgggagtgtgggagatctcgcgatacagcataacccaacgtttacggcgactcaaccccttctcgccggttctggaaccaattggaggtcatttcagagagactgttgtctcgaatcctccaagatgtcgcaagttctaggtctcaccaaactcgcctactctcgagtatggcacgatgtttccgcctccgctccccacgacactctatcgactcagcccggagtgacaccgccctcgctcggccgcctcgcatcccgcatcggcgtcctcctcatgggcaagcacaagccgatcttcgacccctcaaccgactgtggtgactacgttgtcgtcacgaactgcgccgctcttcactactggccgcaagaagtggcaaaagccatactaccgacatactactcgacctggtagcctcaagaccgtaacgatggatgtcctcatggagcagcacggaggtagtgaagtactgcgcaaggctgtgagcggcatgttgcccaagaaccgactacgagacaagcgattggctaggcttaaggcttttgagggagatgcacacccgtacaagcagaacttgatacggctttagtggagtgccagtgagcaagcctggatgggagacgctgtctagaaaggtcgtggnggcgacaagaaagactataagcgagcgc

SEQ ID NO: 15859 - DNA, 1066 bp, Zea mays
  unsure (1)..(1066): unsure at all n locations
  Clone ID: MRT4577_114464C.1
gagaaaagaacatggtntaacaaggggaagaggtgcacagaagcttacttgggagatcccatggatcatatttgtagatgtctagctgcctgatgagctcaatggggagagacttctgatggatttttcttttaaggtaaaacctgacaagctcttcatctgttggatgaaacctgaatccagatacttatagaagaagttttaaaagtgtcacctattgtaactcacgtagggtcccattgtgcgaatctcaatgaggtatgtattctgcagcacgcttgggattaacaatcttgtgatctgatattcacctcggcacgaaactaactcgatgtcaagtactttgcatctaatgtatgtcttgtttctatagttaagcctcctcacagaataatctagctctctagatagctaccttaggaatttttaattgtgttcccttgaattttctaaaggcgaactatataagtacaattcccaagacactaggagacttgaaaattccactaagtgcagtactctattggaataacgagagtctaattccttttcacagtacatatatcttacagcggtatgtgcacatatacctttgattctcccatgatcccaaaatcctttttggacagacttccctcttcattggtaccctttttttctcacctgtatatgtgaatttgaaggggggtttagcgaacacaaagaaagcactgtaaaaccttcgagagaaaagtatacatgttccttactcatcattgatctcctgagttgattgaaattaaaaaaatagagatttttttattatacagcagatctctgtaatttgtaacatggtacaagatatagttttccaaagaagaaaggcctctttttaaaaccttggtctaaatttcttgaatcggnatatgaggggaaaatttcatgccatgaaacttgcttgtgcgaaagcttatgcatgccacccagtttnatgaagtgcacctatcgaaatggaatttagctaagctgagggaaagtgcctgttttcacatncccctgagttgagctgaaattcctgagtcatgtc

SEQ ID NO: 15860 - DNA, 576 bp, Zea mays
  unsure (1)..(576): unsure at all n locations
  Clone ID: MRT4577_114465C.1
ctgcctgcaaacctgaatagaataccttcatgcctcttccattcttcaccacgccggctccccggtggttgagagtgtcgctacaaaccaaggagggagtggttcaccggtggcctggtacacagctaccggcggcctcaccagtgacaggcctggaagctcttctggcttggctagcgcttccgccgccggccaggagctctctcccttccaaggccatgcccatcatcgacgggttgagttcattagttatctggtttcgatcatagttttaaatagccggctatagcttcgctatagctcactatagccttttcagcagggtgccgctaaatggactcatgtacgaatttcccgctatagcctgctatagcccgctataactccgctatagctgattttgaggtccgccgctatttgccatagcccgctatttaaaacnanaaaaaaaaaaaaaaaaaaaaaaaaaaaaaaaaaaaaaaaaaaaaaaagtccgggccgttgcaattgactccgcgagaggttcctgttccctggcggagagagagagagagagagagagagaggggcagggag

SEQ ID NO: 15861 - DNA, 114 bp, Zea mays
  Clone ID: MRT4577_114466C.1
caagaacaaacctgcaagtgcaagacgcatgtagcgcacctcgtcgtagtgtcatctccctcccatttcgttccgccacaccccccatggacaatccaatccacacaaggttca

SEQ ID NO: 15862 - DNA, 245 bp, Zea mays
  Clone ID: MRT4577_114467C.1
gcaacatagaaagcacaatagtgtaccaacaatggcagccaaaatattttgcttccttatgctccttggtctttctgcaagtgctgctaccgcaaccattttccaacatgctcacagctctatgcttctttttcccatccttaccacgggctagttgtgaaccattttacctcagatcacaggcatcgagattactttacctgtctcacacgcagccataagagacttgtgattgtgacaacata

SEQ ID NO: 15863 - DNA, 300 bp, Zea mays
  unsure (1)..(300): unsure at all n locations
  Clone ID: MRT4577_114468C.1
ggaaaaaaaaaaaacttattggtctccacggggagataccagcaggggatttttttattacagggggccgctgacaggtttttcaaagcttctcatacagtaacgcaaggccccaacaggggttttttcctcgcagcttttcaccaaaaaagcctacacgggacaaaaacattttgcgcgggcactggtactgactggcaagctggccttccttgacgatgtaatttttcacggggaaacgacccgtggggtcccacccacccctccgcnnacccgtggggggacccttgggttggcccg

SEQ ID NO: 15864 - DNA, 274 bp, Zea mays
  unsure (1)..(274): unsure at all n locations
  Clone ID: MRT4577_114469C.1
gagctcacctgncggcggccgccctgcttcttttttttgctgccatgttcaagacaaaactcaacatgttcaccagataccagaagaagaacgcgtggcgaactcagatcaacaacaaacaagcgggaccacgggcaaaacacacggcgtgtagccatggcgcaagaccccgcagaaggaaacacaagtggaacaccaacaacgaacactggggaatttacaaaacatgcataaacatcaaagagggaagcaaaatttatctttggaattcacc

SEQ ID NO: 15865 - DNA, 923 bp, Zea mays
  Clone ID: MRT4577_11446C.1
cattgggtacctcgaggccggccgggtactacccgtccccggcggcgtcctccccgacggcacgcgatccccgcgacgtgttcgccagggacctgccgggcttcattggcgccagccccgactccccgtcgccgcgcaagtcacgcgcatcgtctgtcagggcggccaacgggcgggcgagctcagcgtccgggttgagcaacagttccggcggcgacaggaagtatgggaagatttgcatttgggagtccgacggcgacatcacgtgcgacattgtggacgggcccgccttgggagatgaggcagggaccgcgcggaggagcgtgaggacggacgacggcggtgacgaccgggtcctgccgccaccatcgccgatgccgcacgtcacacagtgggtacctccacgggaggcgaagcgacaaggggagaccatcgccaagggacacaagcactacgagcttatgctaaaactgcagctcgggatcaggcatgcagtggggaagcaaggcccaattgtgcttgatctgaaatcgtctgctttcgacccaaaggaaaaggtatggacgaagtttcctcctcaaggctcaaaatacacccctccccacaattcttgtgacttcagatggaaggattactgcccacaggtcttccggacgctgcgcaagctgttcaaggtggatgctggtgactatatgttatcgctatgtggaaatgaggctctcagagagctttcatctcctggtaagagtggaagctttttctactgacaaacgatgatcggtacatgataaagacgatgaagaaatctgaagtgaagatgcttctgaagatgctcccagcttattacaatcatgtccgggcatttgagaatactctagtaaccaagttttttggtctacactgtgtcaagttagctggagcaa

SEQ ID NO: 15866 - DNA, 664 bp, Zea mays
  Clone ID: MRT4577_114470C.1
ccggccgggaacataaggcatgcgatacacgacgagatggaatagacacaacctattggtgaccgacatgccctagcccccacctgtccttcttcggtagtcgcgattggcgacaccgaagagctctccacctccatcgatacacgacccacgtctatggtgcccccttctacatcaccaaagtcggcgactccgcttgtgctgagactgacacgacgagacgcgtccagaggaggcatgcgcatcagcgtgcgaggacactgtcaagcaaacgatcctcctaccctggagaagacttcacttgtatgaacacactctcctcctcagggccattgcaagtgcccacgcgaccatctgggcgtcatcgctaatctgcctgtcttccaccctgccaagtcagtacaaggaccatgggaaatctatccagattctacgctgggataacctgtcacatcaccaggaatggatcacttgacacggacccaaccatcgagcgtagcaagaactcctgcaccaagaaccacgactgctggatccttcccaactcaatacggttggcactctacgaacaacacggcgtgtggcactcacctcggctgctcaactgccaagtcttccacatgaacatgaacccatgtgaccatgtgctggatcccgacacgac

SEQ ID NO: 15867 - DNA, 242 bp, Zea mays
  unsure (1)..(242): unsure at all n locations
  Clone ID: MRT4577_114471C.1
cgcatcccctccgcctcgnncctggcncggcncgccccaacnncgctgccggccgccgccggcgcaanccccgcggggacgcgcgccacgncgcaccccggagaagacaggcggaaacgcanggacgccaccgccancgcacggaaacggaaccgagncnagcggcacggcgaaacgcgccggcgagccagaggcgaggaccaacagcgacggcggcggcggcggcagcaaggacgcgggca

SEQ ID NO: 15868 - DNA, 426 bp, Zea mays
  Clone ID: MRT4577_114472C.1
taattccccggtcgagccatgcatacctgcgtctgcttgacgtcctgtgctaggccattaacttccgttcggacgaactctgttaaggagagggatccccagaacgacaagcaccccatcctcaatcaccctcccaaggcctacattcccactatgattaaaaaagtcttaatagctcttgaaaagcttacgaagaaaccttacacgcagcctgaaaaaatcaattagatacacaaccttatacttcacgcatacaaagacatctacaagacggttaacgttggctccattcatatgaacactgccaaccatcccaaatatccacttgcaatgcataaaaacgccattgagatacttcctggtttgtatgctccaaactcttaaccttgctcttccacctaggattcttcaaaaatcgctatcata

SEQ ID NO: 15869 - DNA, 267 bp, Zea mays
  Clone ID: MRT4577_114473C.1
gagggcgaggatgggttccccttcccggcgacgacgagcgggctcccgacgtcggagcggcacatcaacgatctgccgcggaaagacgccaactacacggcgctaacgccgctctggctcctcgagcgcgcgcagctggggcatccggcacagggcctccgtcgtgcaccgccccgcgcgctacacctggaatgacaccaactagccgcgtgccgaacgccgtcgacatacggccactcgagccgcctcatccgaacggccacggaa

SEQ ID NO: 15870 - DNA, 253 bp, Zea mays
  unsure (1)..(253): unsure at all n locations
  Clone ID: MRT4577_114474C.1
aacatgcgtggaccgaacgaaagctagcattcggctcgaggaagagcaagactagcagcttcttgacgctgaacttggaagatttgtgctgcatgcaagtgagtcatgtgcagactggatatcagattgacaaatatcagcaagaaatttagaagctatggaagtaagcactagacagatcatgaagtggtgaaaataatgctaagggcttatattgaatgaaatnctaaattatgtcttatgataagagata

SEQ ID NO: 15871 - DNA, 801 bp, Zea mays
  unsure (1)..(801): unsure at all n locations
  Clone ID: MRT4577_114475C.1
ggccgggccgggactcttctgagtcctgatctagtccttcagagaaacgagcttcctcttccaagtcccaattcccgataaccaatgtcaaagcgcaagcacactgaaggcacgaccgcacgagctagcaaggtcctcagtgactgaccggcgataaagcagcggccagcagcagtgtcgcacagcacaccagctgcttgctcactcagggaagcttccataccaccagcccaccaccatgccgaccgtgctgagcacaaggcgggccgcatcgccggagacgatctccctcccctcctctcgttcctcccactctcgcacggcgagcccgctccaccccgtctcccgcggcaaccgagcgctccgtcttctcgccgcgcttcgctccccgtccgcgccgcggccgcggctgaggcgtaggcccggcctccctcccgcccgcgcggggctcgccgccgccgcggcaatgccggcgccggagaccaaggcgcgcatcctggtggccggcggcggcatcggcggcctggtcttcgcgctcgccgccaggcggaaggggttcgaggtgctggtgctggagcgggacgtgagcgccgtccgcggggaagggaggtaccgcggcccgatccagctgcagagcaacgcgctcgccgcgctcgaggccgtcgacgccgccgcggccgacgaggtcatggacgccggctgcgtcacggnggaccgcgtcaacggcatcgttgacggcgtttctggctcctgggacatcaagtttgatacgtttactcctgcagctgagcgngggctccc

SEQ ID NO: 15872 - DNA, 545 bp, Zea mays
  Clone ID: MRT4577_114476C.1
ggccggcgggccgggctcccctcccacggccagtgccccggctccctcccctccggttctcacccctcttcctcctcgcctctgggtcccgacgccttccgccgtcggtcggagcagcacctccgccacgccaccgctgggtcccgctgtctccagccatcgccgcttcacctccgccacctcaccaccgggtcccgtcgccatctggctgctgctaccggtgcaatggcgtggcgaggaagcgcgggaggagccggtacggctgggcgcggtcgcctggtctgcaacaatctgcatcctgggaggccatgagagaaaataaggtgagggagagttgatgattcgtgtagattcgagacaaccatcagtcgaccctacaagattgctgccatgaagaggaagatagaaaacagctcgaacatgacatccatagggaatgcagtcacgttgcaaagcaccacaccaacaattacgttgagcaatatatggaataaattcatgattgttcttcgtgcttccaaaaaaaaaaaaaaaaaaggccccta

SEQ ID NO: 15873 - DNA, 588 bp, Zea mays
  Clone ID: MRT4577_114477C.1
ccccggctccctcccctcgcacggccagcgccccggctccctcccctccggttcttgcccctcttcctcctcgcctctgggtcccgacgccttccgccgtcggtcggagcagcacctccgccacgccaccgctgggtcccgctgtctccagccatcgccgcttcacctccgccacctcaccaccgggtcccgtcgccatctggctactgctactggttgtcctgcaccgcccagacgtgtccttctccgttctccatccacctccatctgctgactgtcaactccattcgtctccaggtgcaatggcgtggcgaggaagcgcgggaggagccggtacggctaggcgcggtcgcctggtccgcaacaatctgcatcctgggaggccatgagagaaaaataaggtgagggagagttgatgattcgtgtagattcgagacaaccattagtcgaccctacaagattgctgccatgaagaggaagatagaaaacagctcgaacatgacatccatagggaatgcagtcacgttgcaaagcaccacaccaacaattacgttgagcaatatatggaataaattcatgattgttctt

SEQ ID NO: 15874 - DNA, 177 bp, Zea mays
  unsure (1)..(177): unsure at all n locations
  Clone ID: MRT4577_114478C.1
cttattaatactgcgaaactgatgctagtgctcgggcatgccagcatcatgtacgtcaacttagccgctcacggttgcttcaactgcaattaggcagataggcttcctatagtcatctgctataaaatgaccatacaaactaccaaagaaaggggaggcccattcaancactaaact

SEQ ID NO: 15875 - DNA, 298 bp, Zea mays
  Clone ID: MRT4577_114479C.1
cagagacatcattcacaagtaactgatgtattggcatctcattcatatttctgatgtgtgaggtatatggtactaattaccttttccttgatgtttgccaaatttgaataaaggcattggtacgaaattacagaatgtaaagaaaatgtttatggcttgaaaaattaacatattttatgacgtaccacagtatactctgcccaaaccagcaccctatctatctttcctgttctttacatccctgttccccatccctacttcctcatttttggtataacacagttcttttgtagcatca

SEQ ID NO: 15876 - DNA, 635 bp, Zea mays
  unsure (1)..(635): unsure at all n locations
  Clone ID: MRT4577_11447C.1
ttgggggacccaccgcgtccgcggacgccgtgggggaaccgcctgaatgatatntgccacactatatatttataatgccattggcanaactacatgagtggaggcgcttgttcatggntgactttgaccacgtcaaacantgatacattaagaaaacagtaaccaatcacattgcgttcttaattgatctttgggcttgacgtttcactttcgacacattnncccgaggacannaagcggtggaccctatactgnntgctagnnngagagctttgactttccaattgcattcnngtcctgtggggactgtgaaatggaganacaatcctgcgcttgcgtaccagaaagtgctttcnngaagcaatcggtgcttccacncnncagaacaagcttggctttcacagtgatggcaacgnngggcaggannagcgcaccatgngnntcggatgaaattggagaaagaaagaaaaaatattgtggcattgcaatgcgactgtatcgttcnattagaaagaacncgtccgtctaaaacggagaagtgactgtaccaccatttgctgtatttttttttaagcgggtgagttggcttttggcttgctgtaacgttttggtgaaatcttggaactatgtttgca

SEQ ID NO: 15877 - DNA, 223 bp, Zea mays
  Clone ID: MRT4577_114480C.1
atcgacgtcagcctaagaggttcgtcatacactacagattggagaacgcgacaccacgaaggtgctgatcggctctgttactttcctggccctctctaatagcgctgccttgagtatgagcggcggttgagggtttgtaccacgatcgcttcatctataccaccattattatctgccgcctgctgtatatctgcccggagatcatgaggcagacgcattgcat

SEQ ID NO: 15878 - DNA, 375 bp, Zea mays
  Clone ID: MRT4577_114481C.1
caagaggagatctgcgatgtggtgctggcccggagccccaacccggggtgcgcggagatcgaggagttcctggaccgtgcccgcgtcccgctcacctccaacaacggcataaaacaacagggcgttcgttacgccaaccccatggccttcttccgtaaggacccgataaacgattgccgcgccctactatagacgaacgatctaaaagacgcctccgaaacaccatgatcagcctgcgcgctgggcatacctgtatccattgctgccctgcccgctcacccaagaattgaagatggtagctgcactacgcgccatctgtatagtgatacactatgcactgcatgcgaaggcatgagataatgggtctgacctcat

SEQ ID NO: 15879 - DNA, 309 bp, Zea mays
  unsure (1)..(309): unsure at all n locations
  Clone ID: MRT4577_114482C.1
ggaagngnaaaaaaanaaaannanaaaaaaaaagagngttaaaaaacacccaaccgggggggacccgaagacaccggcccacccagaaaaaggccaatcaaaccggggcccgagggggcaaccccccaaaaaaggaaccccccatccaggaccccaaaacccaaaacaaaaacaggaaaagcgggggaaaacaaaaaaaccgggggccacgcgcataggaaaagggcccgggaaccacaaaaaaccgcctgggcccccggggcaggagcacccagccctgggggggaccctggggccaccccccaaacc

SEQ ID NO: 15880 - DNA, 337 bp, Zea mays
  unsure (1)..(337): unsure at all n locations
  Clone ID: MRT4577_114483C.1
ccgggncgacccacgcggccggngacaannaaaaacaagaccgggcgcgnnagngncngggaannggaangagnacaancgagaggccnnaacgagganccannggagggcaagncnggngccagcagccgcggnaannccagcnccaanagcgnanannnaagnngnngcagnnaaaaagcncgnagnnggaccnngggccgggccggccggnccgccncacggcgagaaccgaccggcncgacccnncngccggcgaagcgcnccnggccnnaacnggccgggncgngccnccggcgccgnnacnangaagaaannagagngcncaaagcaagcc

SEQ ID NO: 15881 - DNA, 561 bp, Zea mays
  Clone ID: MRT4577_114484C.1
ccccttcctgcgcaattgcacctagcagttgaggagtgcctctttttctcttttcgtatggcttggcaagattatacgggaggcttgtatttctcatatccatatttggcttacgtctttggagctgaggatgagcgcataatggcacaccgtctagcattggctgcccgtgaggtgcaccgtccactcgcagtgcgattgttggctttgcattggctactcggctctggcatgttcaaaatctggtgcctggtctcacccattggttttaccctgtcgtgtttgttcatgccgctctatgatggcgttgcccacaggctaccatatcaccatatcaatcgaggtccttcaccatatcaatcgaggaatgggagctggctacctcttctagacagacaagcagtaggcggtggattgctgctagcaagttttctaagttcatgatgtcagagtatattccttaaaaagtgacttactctggcacgtaccttactatatcttttaagatatgaaaacatctacttttagtgatgctaacaaaagtatagaataataattagt

SEQ ID NO: 15882 - DNA, 199 bp, Zea mays
  Clone ID: MRT4577_114485C.1
aaaaaagaaaaagctttttttttttgtttatgagaaacattaaccctaccccccgttttatatactttgggactgacaaaattttaatcctttggggttggaagactcatgaaaaaatacaaatttctgcccaatagaaaaaagggtcgggatccttttgccccgcaagaatgctcccccacaagacgagcagcaaaag

SEQ ID NO: 15883 - DNA, 513 bp, Zea mays
  Clone ID: MRT4577_114486C.1
cacacatgtccgtccctatgcctgggctgtaacgcgtctgtccacgctctatgttgtgtgtcgaacacaagcgcaccatagcgaagcctgcgcgcgggcctgtccatctacttcccgaacaccgcgtctcacaagaggctgagctcccttcacccagagattgaggagctcctgtacaggcccaccgataagcggcccactactctcctctgaaccacaggaacgagacaatcatcttctacatggatcgtctcgaccgcgcgaataatatgactgcgctggtggagctgtacacccgcaaacaagcggctgcaggagctggtgaaactcgtgtgactcctgaccagatcatggtaacccttcgcaagggctaggatcagcaggccgagctcaaaaagatgtttgacctcatccgagcagtacaaccctgaacgtagaacctccgcttggatctccaagcatatgaaccgcgtgcgcaacggccgagctgtaccgctacatctgcgacaccaa

SEQ ID NO: 15884 - DNA, 2029 bp, Zea mays
  Clone ID: MRT4577_114487C.1
attgggtacctcgaggccggccgggactacggacccgcactcgagccgtcgggggaaacgaaagatcctcctccctcccaaaggtgaggccgttagccaggaattccggcaacaatgacttccctctcctccgctgtggcactgccgtcctcgtgccgggcccggccggcggggggcagccggagggcgcggatggtggtgacgcgcgcggcggcgtcgagcccgaagctgccgaacgggcggcggctgcgggtggcggtggtgggaggcggccccgccggtggcgccgcggcggaggcgctggccaagggcggcgtggagacggtgctaatcgagcggaagatggacaactgcaagccctgcggcggcgccatcccgctgtgcatggtgtcggagttcgacctgccgctcgacctcgtggaccgcaaggtgaggaagatgaagatgatttcgccgtccaacgtcgccgtcgacatcggccgcacgctcgcgccccacgagtacatcgggatggtcaggcgcgaggtgctcgacgcctacctccgctcacgggcacagtccgtcggcgcggaggtcgtcaacggcctcttcctaaggtacgaggcgcccaaagagccgaacggctcgtacgtggtgcactacaaccactacgacggcagcaacggcaaggtcggcggcgagaagcggtcgttcgaggtggacgcgatcgtgggcgcggacggcgccaactctcgcgtggccaaggacatgggcgcgggcgactacgagtacgccatcgcgttccaggagcgcgtcaagatccccgacgacaagatggtgtactacgaggagcgcgcggagatgtacgtcggcgacgacgtctctcccgacttctacggctgggtgttccccaagtgcgaccacgtcgccgtcggcaccggcaccgtcacgcacaaggccgacatcaagaagtttcaggccgccacgcgcctccgcgccaaggacaagattgagggcggcaagatcatccgcgtcgaggcgcaccccatccccgagcaccccaggcctaagagggtgtccgggcgggtgacgctggtgggcgatgccgcggggtacgtgaccaagtgctctggcgagggcatctacttcgcggcgaagagcgggcggatgtgcgccgaggccatcgtggcgggctccgccaacgggacgcggatggtggaggagagcgacctgcgcaagtacctggccgagttcgaccgcctctactggcccacttacaaggtgctggacatcctgcagaaggtgttctaccgctccaacgcggcgcgcgaggccttcgtggagatgtgcgccgacgactacgtgcagaagatgaccttcgacagctacctctacaagcgcgtcgtgccgggcaacccgctcgacgacatcaagctcgccgtcaacaccatcggcagcctcgtcagggccaccgcactgcgccgggagatggagaaggtcaccttgtgagccgccgcccgcgacgtcattgccgtcgaaatggtgtcgcagctgatcggccggtgtattagtagagatttgcggctgatcgggttaatttaggccaacatgcgtgggcagtgggcgcggagaggaagagaaacaagttgtgcaagtgcagcaagtagatcaaaagtgctgcctgtttgtatcgatggatcctgcaacatatagcatctggtgatgttgagaattcggagcagttcatcgactggattctgacgccggcaagcatcgacgtcaatgaatgtctaatacttagtacatcaagacatgtaataaaactgaaactcccccgttctggttctgattactgtaaccctaatccatgtatcttcagtttctgaactctggcgagaaagcaaatgtacagagactattggactgctcgtccaccaaaaaaaaacaatcatacgttaccctcgtgcttgctacttcatatcttttctttagtgtcaccctaaatttaattcacttgccttcttttacaacctcttacttttaaaaccct

SEQ ID NO: 15885 - DNA, 288 bp, Zea mays
  Clone ID: MRT4577_114488C.1
gcctacggaggtggcagccatctccttctcggcatcatggacgccctcagaccccttgtgaagcccaagatcgtcaaaaagagaaccaagaagttcatccggcaccagtcagaccgatatgtcaaaattaagcgtaactggcggaaacccagaggcattgacaacagggttcgtagaagattcaagggccagatcttgatgcccaacattggttatggaagcaacaagaacacaaagcacatgctgcccagtggcttccggaagttcctggtccacaacgtcaaggag

SEQ ID NO: 15886 - DNA, 373 bp, Zea mays
  Clone ID: MRT4577_114489C.1
tactagttctagatcgctagctcctcactatttttattattattccccaattaattcatacagtttatcatatattgaatagggagagtcctattatttttacactgcaactagtttggaccgtatgctatcgatatagtatatattatctttccgattcctctgatgctagcataccatatcatagtatgtcacgacacgtgatgaacaagagcagactaaatgagcaaaatgatattttgcctgtatcaatatatattgcacgagataaaaataatacaaggttacaaccatgatttatatcttgagccttactccgaccctacgcttctaaataaatatttacctttgaatgaatttcacgaaaacccat

SEQ ID NO: 15887 - DNA, 1025 bp, Zea mays
  Clone ID: MRT4577_11448C.1
ctcgaggccggccgggccgggactcactacccatgcccagttctccctgtccaccggccgccgccgccgctgccgtgcgcttaatcctacccctgtctgtctcctcatccagtgcaaggagcgcccaccgctgcctgtgtcgtttggtcaccggagatggatggggatgaggagaacgtcgggccgttccgccggactagcgcgcgcacgcgccgcatggccacgcgcatggcgtccgcgctcgccagctcggacaatcgcgcccaggttgctgacttgctgatcagttactgtgtctgaaactattctcctttatgttttgctgcctcattatggaaacacctctgtatctgtaatgccattcaggctgcattagctcgccttgaagctcttgagagcgataatggtggggtcgaggtggtagatcttaatgatgatgagtacggatccacggatgaagaagaccctgttctcatgcaaaaaaaacagtccaagatcatgaaacgtaaaacaaggcaagggaaagctttggagaagagggcagcaagatcactcatggatgtgctacaagaagcaaatttggagtccgttcctcctcatgtgccaacatattcaagggctgctgtgggtccaccgagcacttcatctcgacgccactactgctcagtttgcggtagctctgcaacctacacatgcgtgaggtgtgggacgcggttctgttcatgccgctgtcaagtcatacacaatgatacacgctgcctgaagtttgtggcttgatcggctggatatgtataagctacatttgatgtatgtccacatcctaatggctgttcatatgtgctctgatcagtatgatatacttgctgactatgtatcctactctgtaggtgggggtttggtaagttgtagaaaaccattttctcagtagtgtactgcagttgcaccgaccacttttgtttttttttcccagaaatgttgtgcgagctcgcagttatgcagtagagctgaaagtagctcttggttcc

SEQ ID NO: 15888 - DNA, 262 bp, Zea mays
  Clone ID: MRT4577_114490C.1
ctgactcatgtagatggctacaaatttttattcaagccagacaatgagaggaggggtctgtaggtgccaacaaaggatgacttgctgtttactcaccggataccctcttttcagctgacaacagagaagggtggcgagctctgcggcttctactagctggatcctgctgctatttctgattcctttctctctgtgggtacccactgactcgtgaaggctgaattcgattacctccgtcattgaactggtgatattgcatgct

SEQ ID NO: 15889 - DNA, 344 bp, Zea mays
  Clone ID: MRT4577_114491C.1
tttctgtgcaaatagtgacacctatacaccgggggagttttaaaaaaacggtggtgttcaactcaccatggaccagacttgcggacgctgggcagtacgaccatggccagaccggcatacacgtccccattgtttacccagatcgggcacagtgcacccccgaggtactagaactgtaacacgatgacctggtagacaagtttcccattggggtctatatgtgccccttacagtgattgggaatgctctacccgacacttggtgatgcctgccacatgctgatcaatggccacataaatacactgggtgattgtgagctgacaataattatttttacccactat

SEQ ID NO: 15890 - DNA, 902 bp, Zea mays
  Clone ID: MRT4577_114492C.1
gcaatggctagtgctgctcagtcacacatcaaatgaggaatacaatctcacatcaaataaatttgaagatcttttatgggaggaaatcaaagtcacaaagcctactggatatttagataaaagagttgtctaccttgatttccaccaatatcttacatttgaaatcaatttcacaaagtggtgggctgtgggagtgcgggcaaaagcagggggcgatcctggaaggctggccggagacgaacttgtttgtgaaggctgaaagcattactacgttagggataggatttttttactactggtactttcttgggctatactaaggtattgctcgagcaatacagggccacactgggcccttcgcccctggtgaggcgattttctttccactgttcgactgttcttaaaagatggttgtatgattgcctgtttggatcacttacgtgtgacgcttaccgttataatatgggcttgcctgacccagtggtgatggtatattgctatggttgcttgatcggatcacaggtccttggcattgttctttgggatgcctgagcccaattgcctgacccagtggtgatggtatattgctatggttgcttgatcagatcacaggtccttggcattgttctttgggatgcctgagcccaaatctttgtgtatcagatcagagatcgtgatgcgaatagcctgccactgaactattgtccttgcaatgtaaggataaggaagacaaagtatttttttctgtattactaggacgctattttgacaagggacttctgccatatccatgggcttggtactttacagtaagcattagcagagcaacataactttttcctattaatgatttggaaatattaaggatggaagtcataatggatttgactgcttctttgcat

SEQ ID NO: 15891 - DNA, 416 bp, Zea mays
  Clone ID: MRT4577_114493C.1
gggtacctcgaggccggccgctttctttctgtgtcgcacacatgcagatctccgtccgttctcccggccccgggggctaatggcgggctccatctgcgccgggatggactcgtcgaacagtgcccggatggcggcccctcctcctcatctggggggtaccatcgaccagcggaatatcatctaccctggctaccttaactcccacaatacaggtccgagacggtcgccgcgtcaccgctgcctatggctgtccggatcccagctgcctcgagagccctgaatgatgcccgcatcacaagattccccgaggcaacgaaatggatacagttcactgtcaccatgacttccaggtggatgaggtcaggtgagaatgttagaaagattattactcccccgtcaatcctgctattctgacg

SEQ ID NO: 15892 - DNA, 278 bp, Zea mays
  Clone ID: MRT4577_114494C.1
cgcatatctcacgagccactcgagcaccagcacgaggatacgagaatagcgaaggtcctcgagcgccggtgacggcgaaatcctcctccagcgccgcttcgacgaaaggaagggagttatccgcgcgcgagtgcaacgaggccacccgcgaccgcccctatggccactgcctcgtcgaaaggctccccaagtacccaaagaaggtggtccgcaaggactccgccaacaagactgagaacaagccgcgcgtccagcgcttcatcaagctcgtcaacctt

SEQ ID NO: 15893 - DNA, 275 bp, Zea mays
  Clone ID: MRT4577_114495C.1
gctagctcactccatcgtctgagccaaccttctggccatgacacacacacatggttaattagatctcgaacccttgtattcattcccatccgttcctgcttttggtcttgttcatccacagaccacagagagcccagccactacgtagatagatagatagatacatacatactcaacgaactggcggcgaggatctgaggagaattaggaaaaaagaagggtatggaacaacccttgaagctcaggagggatagcgcctaggaaaacacatagat

SEQ ID NO: 15894 - DNA, 1667 bp, Zea mays
  Clone ID: MRT4577_114496C.1
cccctcgcgcgcacgggggacctcgaggccggccgggcgagcggcacgaccgcgcccgaggagaccacaccacaccgcctcctccgcccgccgattcgtcgagctcgccctcccgctcgcctagctcccctgccttttcccttcctacccacctcctgccccgcgaacgtgctcccgcatgccaccgcgctgacgcgcgcggcggacgacggggtcgggatcatggacaagtacgaggctgttcgggacatcgggtcgggcaacttcggggtggcgcggttgatgcgcaaccgcgagacccgagaactcgtcgccgtcaagctcatcgaacgaggccaccggatcgacgagaatgtgtaccgcgagatcgtcaaccaccggtcgctgcggcaccctaacatcatccagttcatagaggtgatcctaactccaactcatcttgcaattgtgatggagtatgcggctggtggtgaactatttgatcgaatcgtagatcgtgggcgatttagcgaggatgagaccaggtatttcttccagcagttgatctgtggagtgagctattgccatcacatgcaaatatgtcatagagatttgaagctggagaatgttctcttggatggcagcccagctccacggcttaagatatgtgattttggctactccaagtcatcagtactacattcaaggccaaagtcagcagtggggacaccagcatatattgcaccagaggtgctttctcggcgggagtatgatgggaagcttgcagatgtatggtcatgtggagttactctttttgtcatgcttgtgggagcctacccgtttgaagatcaggatgatcctaaaaatattagaaagaccattcagcgaattgcagcaattcaatataatatcccagacaacattcgcatatctgatgattgcagacaactcatttcacgtatctttgtcagcaatccattaaggagaatcaccatgagggaaataaaaagccatccatggttcctaaagaacttgccgagggagctcacagaggcggtgcagttatcctacttcaggagggacaacagtgtctctgcattttcagaccaaacaaccgaagaaatcatgaagattgtcaaggaggcaagaaccttgccaaaatcgtcgagatcaggctatggttacagtgaagaatgctcagatgaggaggaaaaggaagtggagagcgaacccaaagaggaggaagaagaagctgagtgtgataagacagttagggaggttcgcgagagcggggagctggatatgacctcactgcacatctaaatgctgcctgtgaggctgtgacgtgtctgtagataattggctttattgtctgctgaatttggtagaacttatgcaattctggcgtcagatatagtggtctatataagccttttccatcctgtaatatatttgttttgttgaactgtatgtgtggtactccgtatatgggtttgttctaagggagcaaggctttgtacaggcacacctgattgtgtttttggataggaagttttaccgtctgtttgcacactgcagcaaacattttggagtttgtaagccataggttgcggcatatccagtaaaaatggatgaaacgctgcaaattccgtcaaaatggcttgtataactttgcaaagattgaagat

SEQ ID NO: 15895 - DNA, 272 bp, Zea mays
  Clone ID: MRT4577_114497C.1
gtccgccgccctttttttttttttttctttctttttaaatttatggagataaacctcaatcaatttatggtttttttttaggaaacacaggccgaaataagggccccatattcgagtccatttaatttgtaattaaaaaaatggcacctccaacattgggttgttcccttaccaaaccagggtttttaaaaaaaaactggttgtttggcaccaatttttgttcttttagaaaggcaccacccaatggtttagccccttttaggggataaagt

SEQ ID NO: 15896 - DNA, 572 bp, Zea mays
  Clone ID: MRT4577_114498C.1
gtatgatccgatattagttcctttggtggtggggaaggaggccaaacaatgcaaccaaaggtaggctacatagcaatagatattctcacagatactgtagaagctgctgaacatcaatggaaatttcatctctggtgaagggatcgatgaggtggaggaaatcttgaaggctggtaagaaacccctgaaagtgctgggcccactagatgagaatgagcctgatggagagcctgatgatgacgatgaagaggttgaggataatgaggactagctggatttgaagctgcaaagtgtgaaggttgagcaggatgattgaccgagtggtatcgagatataagcctgtcgcagtgataactgagtactacaatgctgatctttgtgaaaccagaattatctggagctcctaaagagcatgacccccgatccttaggttaaatatctttagctactccagtaatcatttggatgtccatgagctacgcaaacttttaattaaaaagaatgtactgaggcttttgcattgtccaaaaaaaaaaaaaaaaaaaaaaaaaaaaaaacccccccacccacac

SEQ ID NO: 15897 - DNA, 573 bp, Zea mays
  Clone ID: MRT4577_114499C.1
agctcctttggtggagttcaaggaggccaaacaatgcaaccaaaggttggctacatagcactagatattctcacataagtgtgaagttcgtgtgcaaaatcagatcagatctcaaggaacttgtgaggacatgctgcggttggagctcggtgctttgcgcgcagtcgcaaataccagattttgtgctgctgaacatcaatggaaatttcatctccgatgaagggattgatgaggtgaaggaaatcttgaaggctggtaagaaatctctggatgtgctgggcccactagacgagaatgaacctgatggagagcctgatgatgaggatgccgcggacgatgaggacgagctggatttgaatctgcagagtgtgaaggttgaacaggatgaggatgattgacgatccttaggttaaatatctttagctactcagtaatcatttggatatccatgagctacgcaaacttttaattagaaagaatgtactgagccttttgcattgtcctgagccttttgcaagggccaaaaaaaaaaaaaaaaaaaaaaaaaaagtactctgcgttgttaccactgct

SEQ ID NO: 15898 - DNA, 326 bp, Zea mays
  Clone ID: MRT4577_11449C.1
atagggaaaggtggtacccctggcgggaccgggcccgaatttccggggtggaccaacccttccgttgggttgggcccggttcctttttggttacaccaacatttgttgccgttctaccaacacgttgggcttaacgttgggaccctttaacaactgcaacagtggttgccattaaaccaacttgcttggacaaacccaggagtgtcctaccaacaacccattattggtggtgcccttttttagatttgttatgagttatagttgaataataaagttttttgtctgaagtttgtggcttcccagaattaagaatgtacatttctaat

SEQ ID NO: 15899 - DNA, 269 bp, Zea mays
  Clone ID: MRT4577_1144C.1
atagtgagtcgtatgtaagcagctggatatcccggagcgcttcgtcgtttgtccattttaggtcggatgagctgtgtttccttgactataggtatcctgtccttgttgaatacttgtggacacacacgcaagacgactgcgccatagttcagagagagcgcaaataccattggctcagtcagcgatacgcatctcataggaacagggagagacgatcagctgttgatcatgtcatgcgaaggctcgatctcggaactgggttgaagttc

SEQ ID NO: 15900 - DNA, 495 bp, Zea mays
  Clone ID: MRT4577_114500C.1
cgttgctgtcggtatcagtttatgcaaatatagtctgcgcatattacgtgaattgggcccacgccgcactataaaaacacccccacgccgccagagattaggttttagcggcggcggcggttccctcgggcgtgcgaggaggcgcccgtgagcaggagagccccggccgccgcggcgctctccagccggcgggttggcggtcgtggagggggcgcgaggaggagcctcagcgtccacggcggtacagcttcaggaggcaccggtcgggcgcggcggaatgggcggcggtggtgctgttcatggtgcttgcggtcgtggtgctgctgggcgtcgtggccgtccttgtggtggtgctgctgctgcagccccgcgtgtcgtacgtggcggtgcgggcgggctggcggtgctctgcgcctacccgttccgcgtgcccgccaggggcgtcctcccgctggcgtacgtggcgcgcgcagggcgccccgctgggcgacgccc

SEQ ID NO: 15901 - DNA, 2370 bp, Zea mays
  Clone ID: MRT4577_114501C.1
gcgccgggggcggccacagccacaagttatatcctgggatcctaacccaaacaaacacatttcgctccccacagcggcggcggccacagccacacgttctcgcgcgggatctaattccaaacagcactgcccttgcttctaccgttccccaagtgcgctccctctctcgccatccatctcgtgcacgactgggcaaccgttgccgctgtcgaggtgcccaggtcttcatcggtccctcgtcagttcttctccggcccttcgccgccgacaagctccgccaggttgctgtgttaagtccaagcttatcacatggattcaacacaagattttcaacccaggacattttctataaagttgtggccaccaagtgaaagcacacggctcatgcttgttgagaggatgacaaagactatgtccacagagtccattttctctcgcaaatatggtcttttgggcaagcaagaggctcatgagaatgcaaaaaggattgaagaactttgctttgcatcggctgatgagcatttcaaaaatgagccagatggtgatgggagttctgctgtccagctatatgcaaaggaatcaagcaagatgatgttggaagttctgagaaaaggcccaaggactactgcagaattggaggcacctgtagatgatacatctcttgtgtctgctgatgcacctcgtgtgcttgctgatactgtactggatatatctggtggggagcgtgcttttattgaggcagatgaagcaaaggaactgcttagtccacttaccaaaccagggaattcatataaaagaatttgctttagcaacaggagctttggtattggtgctgctaatgttgctggtccaattcttgagtcagttaagaatcagctcacagaggttgacatctcagattttgtggcaggaaggcctgaggatgaagcccttgatgtgatgcgcatattctccaaagcattagagggttctgtcctgagatatctgaacatctctgacaatgctttgggtgagaagggtgtcagggcattcagtgagctcctgaaatcacaggaatccctcgaagaactatatgtgatgaatgatggcatatcagaggaagctgcgaaagctctatctgagcttattcctgcaactgagaagcttaaggttctccacttccacaacaacatgacgggagatgaaggtgctatgtatattgctgagatggttaagcgttctccgaatgtagagagtttcaggtgctcagcaacaaggataggatctgatggtggagtcgcattgtctgaggcattagggacatgcactcgcctgaagaaacttgatctcagggacaacttgtttggtgttgatgcagggttagctctcagcaaaacccttccaaagctacctgatcttgttgagctttatctcagtgatctcaatctagaaaacaagggtactatagcaattgccaaagccctcgaacagtcagcaccacagttggaggtccttgaaattgctggaaatgaaataaatgccaaagcagccccagatttggccaagtgcctagcggcaatgcagtcactcaagaagctgactttggctgaaaatgaactgaaggatgatggtgccgtgataatcgcaaaatcattggaagatggccacatagatctcaaggagcttgatgttagcgtgaacatgctgcagagggttggagctcggtgctttgcgcgggcagtcgctaataaaccggcttttgagctgctgaacatcaatggaaatttcatctctggtgaagggatcgatgaggtggaggaaatcttgaaggctggtaagaaacccctgaaagtgctgggcccactagatgagaatgagcctgatggagagcctgatgatgacgatgaagaggttgaggataatgaggacgagctgaattcgaagctgcagagtgtgaaggttgagcaggatgattgaccgagttggtatcgagatataagcctgtcgcagggtcttgataactgagttatctacaatgctgttgatctttggttttgtagtcggtttttgttatgaaaaaccagaaccagctatcttgtgacttgtgcaatctgattatagattagaactgctcttatttattcgtttatattaatgacatcgttccattacaaaaaaaaaaaaataagcgggctggatgattgacgatccttaggttaaatatctttagctactcagtaatcatttggatgtccatgagctacgcaaacttttaattaaaaagaatgtactgaggcttttgcattgtcctgagccttttgcaagggtcatacttacattgtctgtagccttttgggtccccggtaaaaggatgttttgccccctagttat

SEQ ID NO: 15902 - DNA, 319 bp, Zea mays
  unsure (1)..(319): unsure at all n locations
  Clone ID: MRT4577_114502C.1
agatgaaaaatagaatggaaaancaaataaacgaaacaacgaacgaaaatggctctcgctgacgaacacgactctctctctctcgatttcgaccatcggcaacgacagcaatctactgccggccggcgtctcgttgtcactcgatcgggcggccctccttcagatcgcccccatcatgaccgcgccgacctccacgcccctccggccggcggccacctgacaaagctccccccctccaccgccggcgccgccgccaccaccaccacctgccgcctcggggccgtcgccgncggtggcgaagcgcaggcggaggcgtccg

SEQ ID NO: 15903 - DNA, 2132 bp, Zea mays
  Clone ID: MRT4577_114503C.1
ctcgaggccggccgggccgggaccgaccacctggccaaaccctaacaacgcatttcgctccccacagcggctcggccacaacccacagccagacggtctcgagctggatctcgtccgttccagcagacagcagcgcgcgctctctctctccctcgtggcgacgactgggcgaccgctgccgctgccgctgccgctgccgctgcccttgtgccccggtctccgtcggtccgttcgccaggtctcctgcgggctcttcgtcgtcgacaagctccgcctggttgctgtgtgaagtccaaggttgtcacatggattcagcacaagatttccaacccaggacattctctataaagttgtggccaccaagtgaaagcacacggatcatgcttgttgacaggatgacaaacaatctgtccacagagtccattttctctcgcaaatatcgccttttgggaaagcaagaggctcatgagaatgcaaaaacgattgaagaactttgctttgccttggctgatgagcatttcagagaggagccagatggtgatgggagttctgctgtccagctatatgcaaaggaaacgagcaagatgatgttggaagttctgaaaaaaggcccaaggactactgcagaactggaggcacctgtagctgacacacctcttgtgtctgctgatactgtactagatatatctggtggcaagcgtgcttttattgaggcagatgaagcaaaggaactgctgagtccacttaccaaaccaggaaattcatataaaagaatttgctttagcaacaggagctttggtattggtgctgctaatgttgctgggccaattcttgagtcagttaagaatcagctcacagaggttgatatctcagattttgtggcaggaaggtctgaggatgaagcccttgatgtgatgcgcatattctccaaagcattagatggttctgtcctgagatatctgaacatctctgacaatgctttgggcgagaagggtgtcagggcattcagtgagctcctgaaatcgcaagaatccctggaagaactttatgtgatgaatgatggcatatcagaggaagctgcaaaagctctatctgagcttattcctgcaactgagaagcttaaggttcttcacttccacaacaatatgactggagatgaaggtgctatgtatattgctgaaatggttaagcgttctccaaatgtagagagtttcaggtgctcagcaacaaggataggatctgatggtggagtcgcattgtctgaggcattggggacatgcactcgtctgaagaaacttgatcttagggacaacttgtttggtgttgatgcagggttagctctcagcgaaacccttccaaaactacctgatcttgttgagctttatctcagtgatctcaatcttgagaacaagggtactatagcaattgcaaaagccctcaaacagtcagcactgcagttggaggtccttgaaattgctggaaatgaaataaatgccaaagcagccccagatttggctgaatgtctagcagtaatgcagtcactcaagaagctgaccttggctgaaaatgaactgaaggacaatggtgctgtgataattgcaaaatcattggaagatggccactcagatctcaaggaacttgatgtgagcacgaacatgctgcagagggttggagctcggtgctttacgcgggcagtcgcaaataaaccagattttgtgcagctgaacatcaatggaaattttatctctgatgaaggggttgatgaggtgaaggaaattctgaaggctggtaagaaatctctggatgtgctgggcccactagacgagaatgaacctgatggagagcctgatgatgaggatgctgaggacgatgaggacgagctggatttgaagctgcagagtgtgaaggttgagcaggatgaggatgattgacgatccttaggttaaatatctttagctactcagtaatcatttggatgtccatgagctacgcaaacttttaattaaaaagaatgtactgaggcttttgcattgtcctgagccttttgcaagggtcatacttacattgtctgtagccttttgggtccccggtaaagaggatgttttgacctctcgttgatagatccccccagc

SEQ ID NO: 15904 - DNA, 240 bp, Zea mays
  unsure (1)..(240): unsure at all n locations
  Clone ID: MRT4577_114504C.1
ctcgccgtgtgctccctcgcccgccgtcaccgccgccgcctcccagcgtctcatccccgnccttcttgttccacccccacagccgacccncgaccacctcgccagcagaacgccttccaccacgtaggaggggagctgctcctgccgacgagagcctgccgccgctctccgtcaatagcgttgcgtgtactcggtagctaagcagtcgtaggttgttctcggcaactggcacctgcacgc

SEQ ID NO: 15905 - DNA, 578 bp, Zea mays
  Clone ID: MRT4577_114505C.1
cccagcgtccggtaattagtctttcgctcctatctgacgaccttatcaatgccatttcgatattatacgcttttatgttgcgttgaatgatttcgatacactatatatgtttactgacctcgtatgctacattctcagccagatactgtcgccgcctcaagatcctcgtcgcgaggttcacggcgccggctcgcatccctccttgctctgctcgcctatgctagcaccttttcgtctcatatggctgcagctcacttatcgtagttgaaatggtgcacgtgatgtatgcattgtaatcctattaattgcacatgtaaagtggtcgccgagttctgatcataatcttggtgtgcttgagttcatggtcggttgattcacgacgcagttggtctgcacattttaagggctttcggttaggccccttctagtcatttttgactaggaggggatttaaactcctccaatccctttctggatttgtgtaactgaacatgctaaggcggcacgatgctgttagtatgctgtacggttactgccaccatgtcgatagcttgcaatgcaatagattgccttgtatg

SEQ ID NO: 15906 - DNA, 285 bp, Zea mays
  Clone ID: MRT4577_114506C.1
cccgacccgaccgacgcgaccgacttgagcggacgcggtaacacgcgagattagattaccagacagagagagagagagagggcgagagccaaagacaagcggggggaggcaagcgagatgctacatcggagcgcgaccacaccgacgcgcaacagcaggcgcacaccagacagacgagaaaacagtcgagcaccacaaagaagaaacgccgcagaaaacaccaacagaggcgacgccaaggcacggaccgggacaggaccaagccaagcccaaaggagaccaaaa

SEQ ID NO: 15907 - DNA, 397 bp, Zea mays
  Clone ID: MRT4577_114507C.1
gggagcgacaattctaccatgtgacatgtccacagtgcatgcagacctgacacaggtgggcacatgcaatcaacaatgcataggataaactagcatccgaggcggttacaaaaccatagcacacgaccaccggggtttaccatgacacagatcaagaagccgtagtgaggagcttgaacacagttaggtataaagattacaatagcatgctgagcatgtactatgcatgtaagcaacaagatcatgtaggggaagcacaggccaacctgacctccataggaactcttatcaagcgtgccgcctaatcatgcgccttaggccgtacatgactaagcgcgcaaaccataaagccaaaaccctaacctacaactccacatgcacgtgtccaacaaaggag

SEQ ID NO: 15908 - DNA, 658 bp, Zea mays
  Clone ID: MRT4577_114508C.1
gacggcagcatatcgccttgtgagggagctatccagaaggaaaaaagaaggactggagaagctaagtgtgagaaaggagaaactccgtcggatcctccgaagaaggaaaaggaggagaccatcattctaaggccgctgaacatgacagatctgaaagaagcaaagaaccaggtggctgcaagtttcgctgctgaaggcgccataatgagcgagctgaggcaatggaacgagttgtacggtgaaggcggctccagaaagaagcagcagttgacatacttcctctgagcaatatgaaaatcaggcgcaaaaatgtatgaacataatttgagaagtagagtagagcacaaagcagccatgaggaaatagaccgaacatgtaatcgtgtataagaagaacatgagaaaagggtgcgtgttagggggacaaggacaagaaatcaggccgtaaaagccagtatctggtgtaggacaaggaaggacagttttcatctccaccaaaattccagtttgcctgtgctggttgttgttgtattacactaataatggatctgcggtgtagatcgctcttctcttcatcttttcctggtcgcatcatccttctgtatatgtacaaactggtaggttgtggcaacgaaaggtttttaaagcagcttatatat

SEQ ID NO: 15909 - DNA, 353 bp, Zea mays
  Clone ID: MRT4577_114509C.1
gagccctccagtcggcggccgcccttctttttgggggtttttttaagggcctttgctgtatgcccacgccaatttacacgcaaacaggaaacacagtcacagagcaatgcgagcagtgcatcctacactaacctacaataccaacccgaccttttgaggacggactgggcatatagaaccagaccgatgcggaactggcacggaggaactggaaagcgaacacagctgaactattcacgaccagcacgggtccagaaagcaaagagatacgaagaaaaatcagactagccgacccacccgagcataaatgaagagaagctttcatggcgaacagaactgtagtcggggatgca

SEQ ID NO: 15910 - DNA, 398 bp, Zea mays
  Clone ID: MRT4577_11450C.1
tcgcacgcgtccggcgatattgctttgtgtgattagacagaaaaaaaacctgtttcgaatacataagcccaatgtcgtgcctcaagtgcatgtgccaatgatggtcgtctttgatgactgtatcaaagatccggggggactatgtgcagaggttattttacttttgtccaccttcttttggtgcggaggaacctagttcgccagtggttgcttgccactgacgaatcacgttcgggttgcgttctccgatccgtcccagcctaattctgggggcgcaggggaaggattcgggacggaaggaactagtttctgggcttccttggattccacggcaaagcccggctgcgacgtcggcgtcgtctccaccgcattccggtacggttcccaagcaaccttgc

SEQ ID NO: 15911 - DNA, 335 bp, Zea mays
  Clone ID: MRT4577_114510C.1
ggccataaaacgcgttaaaaccaaccgtttttagacacggcctttgtgctgctggcctgctgctgcttgttcttcctgttcaccttcctccttctccctataaatttggctagaatgcaaccaatccttggtcatgttctttggggaacacacacacacacacacacacacactcacacacacacacacactcacacacacacacacactcacactcacattgtttggtgttggaacaaagctctacacgggaagacaggctggtttttttttgcagtctttgtgccagaagcctccagaaatggcgtttcccaacgtcacattccttgcttttt

SEQ ID NO: 15912 - DNA, 227 bp, Zea mays
  Clone ID: MRT4577_114511C.1
gggggggcctcacctattgttttgtgcttcgtgatcttagctttgtacactactacggggtatattattgggggagggggcatttgtacgtgagtggggggttccttgtacaataacataacatgctctttttctggatcctgctgtgctcttcttcttggtggggggggtatgtatatataaatatatgtttacaatgagttataagagggaggttattaccttct

SEQ ID NO: 15913 - DNA, 183 bp, Zea mays
  unsure (1)..(183): unsure at all n locations
  Clone ID: MRT4577_114512C.1
cattggtacctcgagccggccgggtcaccctcttccccggccgcacgaaaccctaacgccgccgcttcacaggtaagccgccgccatggtctccggttccgggtatgcgcgaagcgcatcgtgggtgggacgcgcgccaccacantgctgggccgctgtcgtcatatcgccagaactgctcat

SEQ ID NO: 15914 - DNA, 469 bp, Zea mays
  unsure (1)..(469): unsure at all n locations
  Clone ID: MRT4577_114513C.1
cccacgcgtccgcggacgcgtgggtctggcttatcgagttgcacaagtagaggagggggcggaaaagaaagtagttgcaggatcacattagcactgacggccatgctgtctgcatcgtttcccgttgtcgtctgcaggatcgccatcgccgtgctcatagtttctaccctgtcatcctatgcggaggcgaggtactactgctacgccccgtgcaaggactgcccgaactgcagcagctggtgcaaggggaaagggtaccccaagggcgggcggtgccacccgaaggacggcggcggcgacatcgtgttctgctgctgcgacagggcagacgtcatgaagctgctagtttcagcagatgcgaatgcgattctctgatggactggcaaacaaataaacggggctggacgcattgngaaaaaaaaaaaaaaaaaaaaaaaaaaaaaaaaaaaaaaaaaataaatacttgtac

SEQ ID NO: 15915 - DNA, 514 bp, Zea mays
  Clone ID: MRT4577_114514C.1
ccggccggggcccgcccggccaaaagcagaaagcaatcgagaggagaaccagcagcctccaataagagccagccagagaaactaataaaactctcaccgccgccatccgagagaacaagccaaccgaccccgtccccagcggcgcgcccgccctcgccgccgcgcccgccgcgctcctcttctccctcctcgcctactacctccactaagcgtgtgcgtgcttacgtacgcgcgcatggacgacgatggatccgtccaccgttgccattgcagttgcctcgctcgttcttggtgactgttgctgcggtggtcgacttggaagacgtcacctgcaccgctgtttccatatattattattgatgtgatctgatatgaatatatatgcatggtgacgggttgtgttaattacatagacgtgatttaatttatctatttgtgtcaagtcgttctgtaatcatgcgatgaaatatatgatttggttttccgcaaaaaaaaaaaaaaaaaatttgcggcc

SEQ ID NO: 15916 - DNA, 190 bp, Zea mays
  Clone ID: MRT4577_114515C.1
cgtgcgggcgtggatccgggattgtttagggctgatttggtgaccggggatcccgaggggaagaaatcctcttgctattcaaaattgaattgcgagggaattacttccccatggatcccctagggatccctaatcaccaaattagctcttaatgcgaagggccatggttgattagggggtatttggttct

SEQ ID NO: 15917 - DNA, 519 bp, Zea mays
  Clone ID: MRT4577_114516C.1
actatcggtgggtagggcctgagataaacccaatactctaactcttcgggctctcaactggtaatagatgttggcgtggcaccttcataacaccgtgtgcctggcaacaacacatgatccgtatgacagaagatgcctttggtgcggtttattgtgcgcagcaacatgagggaggcaacaactacaacagctcgtgctggcgaaccaaggtgactactgtggttaacagcaagatggttccattgatccacactagctggcttgaactatggttgttattggcgactgctgcaactaccattcaagctgattgctgttgcctacctgcatggaataatttgcttgaagcaagtggcaggattgtgacttactgcttattgtcggtggcgccaactactaccattcacactgctagttggtgggagccctgataacttgttgctcatccaaagttgatgccggtctactagcacactgtgcctaacgctgtgacccttttacaactgcgacaattgctgc

SEQ ID NO: 15918 - DNA, 540 bp, Zea mays
  Clone ID: MRT4577_114517C.1
ccggccgggagaaagaatcgagaggagaaccagcagcctccaataagagccagccagagaaactaataaaactctcaccgccgccatccgagagaacaagccaaccgaccccgtccccaaggcaatccgtcgccgacgtaccaccgccaccgcaggagcgagatggagatgaagaggatcctcttcgccgtcctcgtcgtcatcgccgcctcggccaccgcagtgctggcctccaccgaggccgccgccgcgggcgccccaactgcctccgagtcgtccgccagcagcggcgcgcccgccctcgccgccgcgcccgccgcgctcctcttcttcctcctcgactactacctccactaagcgtgtgcgtgcttacgtacgcgcgcatggacgacgatggatccgtccaccgttgccattgcagttgcctcgctcgttcttggtgactgttgccgcggtggtcgacttggaagacgtcacctgcaccgctgtttccatatattattattgatgtgatctgatatgaatatatatgcatggtga

SEQ ID NO: 15919 - DNA, 255 bp, Zea mays
  Clone ID: MRT4577_114518C.1
tttttcttttttagaaaacttaccactttctatataaacaaaaaaaacccccccaattacaccactaaaacaaaattattaccccatacttacccaacagctaatctgcaaccatcatagcccaaaaaaacaaaacaaaccttaaacaaacatttaattccacttttaaatataccatgcaaaaaaaactatctaacaacaaacccacataaaactctaacctaacccctaaaccaattctaaatcacttctcaa

SEQ ID NO: 15920 - DNA, 1445 bp, Zea mays
  Clone ID: MRT4577_114519C.1
actcctatgggcgattgggaccctcgaggccggccgggagcagaaagcaatcgagaggagaaccagcagcctccaataagagccagccagagaaactaataaaactctcaccgccgccatccgagagaacaagccaaccgaccccgtccccaaggcaatccgtcgccgacgtaccaccgccaccgcaggagcgagatggagatgaagaggatcctcttcgccgtcctcgtcgtcatcgccgcctcgggacaccgcagtgctgggcctccaccgaggccgccgccgcgggcgccccaactgcctccgagtcgtccgccgaggctcccgctggcgctggcgctggcgctgccgctggcgccgccgccgcggggccctccgccagcagcggcgcgcccgccctcgccgccgcgcccgccgcgctcctcttctccctcctcgcctactacctccactaagcgtgtgcgtgcttacgtacgcgcgcatggacgacgatggatccgtccaccgttgccattgcagttgcctcgctcgttcttggtgactgttgctgcggtggtcgacttggaagacgtcacctgcaccgctgtttccatatattattattgatgtgatctgatatgaatatatatgcatggtgacgggttgtgttaattacatagacgtgatttaatttatctatttgtgtcaagtcgttctgtaatcatgcgatgaaatatatgatttggttttccatttgtttgaaaaaaaaaaaaaaaaagcagaaagcaatcgagaggagaaccagcagcctccaataagagccagccagagaaactaataaaactctcaccgccgccatccgagagaacaagccaaccgaccccgtccccaaggcaatccgtcgccgacgtaccaccgccaccgcaggagcgagatggagatgaagaggatcctcttcgccgtcctcgtcgtcatcgccgcctcggccaccgcagtgctggcctccaccgaggccgccgccgcgggcgccccaactgcctccgagtcgtccgccgaggctcccgctggcgctggcgctggcgctccggtcggtgctgccgcgcccgccgcgctcctcttctccctcctcgcctactacctccactaagcgtgtgcgtgcttacgtacgcgcgcatggacgacgatggatccgtccaccgttgccattgcagttgcctcgctcgttcttggtgactgttgctgcggtggtcgacttggaagacgtcacctgcaccgctgtttccatatattattattgatgtgatctgatatgaatatatatgcatggtgacgggttgtgttaattacatagacgtgatttaatttatctatttgtgtcaagtcgttctgtaatcatgcgatgaaatatatgatttggtttttccatttgttccaaaaaaaaaaaaaaaaaagcggccctcgagctc

SEQ ID NO: 15921 - DNA, 509 bp, Zea mays
  Clone ID: MRT4577_11451C.1
aaatacaacttttcctgttcccccctttccaaaaaaataaccaaacaattttcaggatctcttaaaaacaaaaaaaagttcaaaagggaaccttgactcggggggaaacaaatttgttttgtttttgccaccacccactaggttaacataatctttaattcgaataaataaagggctgtcactgtcaggggccttttaataagaaagtttcaagcggaggtcctcgttgtttttgtaaacttgaaccaaagttgcacccttgtccccaagaaaacccatcttccttgaaaaaacctcaaaactgaaaaagcttttttggaagggatgggataaagctgacattccataaatcacggcgggaattataacccttggaaataaaaaacttagtcctgccccacccaatgtcttttttattgtatttttaaaatcttacctgtgaaggccaatttttttcctttttttttttaaaaaaactttgggaatattttcctttgataggttatcac

SEQ ID NO: 15922 - DNA, 565 bp, Zea mays
  Clone ID: MRT4577_114520C.1
gctgggccacgcttggtcggaggccgcggcctgcgagcccgcgccggagttggggagggagggcgccgccgcggggaggggcacctagggtggcggcgacgtccgcgcgcttgcgcgtccgcggctgtgaggcggcagctcgcgcccgcacgcctgttcccgacggcggccacacgggtcgcgtgctgatgctcgctcgggacggccgtgcccatcggaggggaggtggcgagggccaagggagccgccggctgggggctgcggcggccggctggggagaagggccgccccgggagggatggatgagtctcccggggcggcggcgctgaagccagtggcggctggacctgggcagggacgaggtggcggctgtgggatgggaggaagccctaaccctaatcctttgataccatgtagttatatgaaagtggattgataatagatgggatacaatatatatagactcaaccctaaccttaatgggccggcagcccaatagtggtgccagcccacacacactcacacacacacagtctaacaggaaagaaaacttatacattcaggg

SEQ ID NO: 15923 - DNA, 1328 bp, Zea mays
  unsure (1)..(1328): unsure at all n locations
  Clone ID: MRT4577_114521C.1
ccggccgggattctcccccctctgcccttctctctccctctctcgcgagtcccgagtcccgactcgcacctccagatccacctcctcctccctcttccagatccaccatctcttctccgttcctctccgcagctacagctggggagctcagcttagccgccgccgtggccgggcacgccgggccgggaggatgctgaccaagttcgaaacgaagagcaaccgggtgaagggcctgagtttccacccgcgtcggccatggatcctggcgagtctccacagcggggtgatccagatgtgggactaccgcatgggcaccctcctcgaccgcttcgacgagcacgacgggccggttcgcggcgtccacttccacgccacacagccgctcttcgtctccggaggtgatgattataagattaaggtctggaattacaagacacaccgttgccttttcacacttcacggacaccttgactacattcgcactgtgcaattccatcatgagtatccatggattgtaagggctagtgacgatcagacaatccggatctggaactggcagtcacgcacctgtgtggctgtgctgactgggcataaccattacgtcatgtgtgcatnctttcattccaaagaagacctgggtgtatcggcttacttggtcagactgtacgtgtctgggatatcggtgctttgaagaagagacagtgtcacctgcggatgacatcctccgtctcacccagaagaacacagatctttttggaggtgttgatgctgtagtgaaattgtcctcgaaggccatgaccgtggggtcaactgggcctcgtttcatcccactttgccgctcattgtttctggggcagatgaccggcaggtgaagctatggagaatgaacgataccaaggcttgggaagttgatactttaaggggtcacgtgaataatgtgtcctgtgtgatgttccatgcgaagcaagacatcattgtgtctaactcagaagacaaaagcattcgcatttgggatgccacaaagagaactggtatccagacatttagacgggagcacgaccgtttctggattcttgctgctcaccctgaaatgaaccttcttgctgctggccatgacagtggcatgattgtgttcaaattggagagggaacgcccggccttctgcgttagtggtgacactgttttctatgtgaaagatcgatttctccgtttctttgagtactccacccagaaggaagttcaagtggctccaataagaagacctggatcggtcagcttgaaccagtcacccaggatgctgtcctacagcccaaccgagatgctgtctt

SEQ ID NO: 15924 - DNA, 606 bp, Zea mays
  Clone ID: MRT4577_114522C.1
gcgccggccccgcgctcgctcatgtcgcagcagcccaccgccggcgcgccgtccatgctctccgactggggttctccggacggcaggctggactggggcgtccagggcgacgagctgcacaagttccgcaagtccgcgtctttcgcgttccgtgggcagtccccggcccccgcgccggctcccgccgagccagacgtctcgtgggtgaactctcttgtcaaggacggccacgccggcgacatatttgcgcagtggtcggagcaggagcagatggtggcctaatctagctgaccaaagttcattcctttccttcaattgtttttcccctttgtttgcttaattcgattcatatgagatgttttttactagtacatatatataggacgttctataatatttgttcatccccaagaagcatggatgcccaaagggagctctgtattggatgaggaaggaacacccagtattttacttgtacgaataaaaacataccaagagttttatatttatttatatcccttgaaaaatataaaagaaatcgagaggccagtaataaaaaaaaaaaaaaaaaaaaaaaaaaaaaaaaaaaaaaaactcgagaagggg

SEQ ID NO: 15925 - DNA, 2319 bp, Zea mays
  Clone ID: MRT4577_114523C.1
aattcggcacgagggcccactctcgccaccgtgtggtccagacgtccagtcctctaaccgaaccaggaagcaccacaccaggcagcggaagctcgcgctgggatcggctaccaacaataatatcgttcctcgcctccctcacctctgaacgagaacgcgaacgcgccctgtgatcactaccccacagcatgtgctcaggacctcgcaagccgtccacaccccctctgccggcggcgacggccaaggactcctcggcgatggcggtgctgctggagctggcggcggcggacgacgtcgtggggttcaggcgcgccgtggagggcgacaaagccccagccttggacgacgcgggtcactggtacggcccgtccgccgcggccgccggccgcctccgcctgcgcctcgaggcgcgcactccggccatggtggccgcgctctacggcagcacggcggtgctggcgtacgtgctgtccgccgcgccggcggaggccgcgcgcgcctcgcccacggacggcgccacgccgctccacctcgccgcggccggcggcgcgccgggcgccgtcgcggccgcgcacctgctcctggccgctggcgcgtccgccgacgcgctcgctttctcgggcctccgcgccggcgacctcctcccgcgcgccaacgccgccgccgacagggaccgcgcgctccgcgtgctcctcaagtcccccgcggcgtcgccgtcgtcctcgcccaagaagtccgcctcgccgccaccgccgacggcggcagctgcggcgccggagccgaggaaggagtacccgcccgacctcacgctcccagacctcaagagcgggctcttcagcaccgacgagttccgcatgtacagcttcaaggtgaagccctgctcgcgcgcctactcccacgactggaccgagtgccccttcgtgcaccccggcgagaacgcgcgccgccgcgacccgcgccgcttctcctacagctgcgtcccctgcccggagttccgcaagggcggcgcctgccgcaagggcgacaactgcgagtacgcgcacggcgtcttcgagtgctggctccacccggcgcagtaccggacgcgcctctgcaaggacgaggtcggctgcgcgcgccgcatctgcttcttcgcgcacaagcccgaggagctgcgcgccgtcaacccgtccgcggtctccgtcgggatgcagcccaccgtttcgtcgccgcgctcctcgccgcccaacggcctcgacatgggcgccatgctcaacccggcctggccctcctccccggccagcaggctcaagactgcgctcgccgccggccgggagctggacttggacctcgagctgctcgcgctcgaccagtaccagcagaagctgttcgacaaggtgtcgtcgccgagggccggctggggaggcgggatgggctcgccgctgcccgccgcggcgcccagcaccagggccgtgccggactacgcggacctgctcggctccgtcgacccggccatgctgtcccagctgcacgcgctgtcgctcaagcaggccggcgacatgccggcgtacagctccatggcggacacgcagctgcacatgccggcgtcgcccatggtcggcccgaactccgcgttcgggctcgaccactccatggccaaggccatcatgagctcccgcgcctcggcgttcgccaagcgcagccagagcttcatcgaccgcggcggccgcgcgccggccgcgcgctcgctcatgtcgcagcagcccaccgccggggcgccgtccatgctttccgactgggggtctccggacggcaggctggactggggcgtccagggcgacgagctgcacaagttccgcaagtccgcgtctttcgcgttccgtgggcagtccccggcccccgcgccggctcccgccgagccggacgtctcgtgggtgaactctcttgtcaaggacggccacgccggcgacatatttgcgcagtggccggagcaggagcaaatggtggcctaatctatcgaccgtcactgctggctcatagcatctagctgaccaaagttcattcctttccttcaattgttttccccctttgtttgcttaattcgattcatatgagatgttttttactagtacatatatataggacgttctataatatttggttcatcgccagaacacccagtggatgaccccaaagggagctctgtattggatgaggaaggatttaccaatattttatgatatcgaatttataaatatttttaaaaaaaatttaaaaaaaaaaaaaaaaaaaaaaaaaaaaaaaaaaaaaaaaaaaaaaactcgagaggggcgcggtacc

SEQ ID NO: 15926 - DNA, 219 bp, Zea mays
  Clone ID: MRT4577_114524C.1
ggttcgatcgcaagcgccgtcggctgctcgaccaccagttgcggctcggcgatcgcgacggctttgcgcggctcggctacggcgcgccgtccgacgcgcagatgttcatcaagggctggctgttctatccgtacggcgcgccgttgccgccggtggccgccgaaatcgcgccggatcacccgcgcggtttctggctgacgcacgcgcagtggccggcgt

SEQ ID NO: 15927 - DNA, 347 bp, Zea mays
  Clone ID: MRT4577_114525C.1
ggggaaaaaaagacaaggcatcaagaccttttttaaaaaaaacactttgtgttccaacaaacaccccaccgaccaatttttgttaagatcctgctaatcccaaatcactccagtactacggggggggccatcaccactgaaccccttcacaacggaaaagccccatccgctggtttgctctccgccgggcggtcagtacccgaacctcaaaagctccatccgttgttttactttcccccggtcggttaaaccccgaaccatccgcccccttaggcttaatatgaggccgtgtgtgggtacgcgccccacccgggggaggggttggaaaccacgtgcggatttggcgg

SEQ ID NO: 15928 - DNA, 345 bp, Zea mays
  Clone ID: MRT4577_114526C.1
caacatgcacaaagtttccttcaaaactttaacaagttcgagtttaatttttttttggaaaggccccaaaaaactcctctttcggtccaaaaaaaaatcccattggatttttaagtttataaaaaaagggccccggaaaatcgggcccggcccccccatggtaccccattttcctttagaagggagaaattaaagcttgggaaaattatgatcaaaaatattacctggggaaaattctaatccggcaaaaatcccccacaaaaaaagacccgggcatcttaaactgaaaacttcgggggcctgaaggggaggaccaaccccattaacttgacctcccactcccgc

SEQ ID NO: 15929 - DNA, 2675 bp, Zea mays
  Clone ID: MRT4577_114527C.1
tggcggtggtggtggccatgctggccaccgccttcttcgctgtgaccgctcacgccgagaattgcagatcgcaagccggagacgcgctgtgccccaactgcctgtgctgcagccagttcgatatgatgaaaaattcacctcaccactactgcattgagaactgtgttttactggagtgccaaccagacctgactgctacctgccgaatcgcgcgcgcctgccaaaaaggcaatgggctccccgtccgcggccgggccaccagcggtcaatttcgacgcctggagtcaaccggccgagtcgtccacctacgccttcacagttcacacgcgcggcggcggcggcggcggtggagcgggtgatgagggaagtggcgtgaaccaccgaatctcgcggtcgcggagcgggcgtcgcgggcgaacgagccccggtctctctcttctctgcgcgcaacctttccaaggaactcctctgatgctacagtaataatagaagaaagatggacctgctcagcatcattctagttatagcatctctgctcccattcgcagcatctgatggtcaaggtgatgccttgtacgatatgaagctgaaactaaatgctactggcagtcagctttctgactggaaccaaaatcaagtcaacccatgcacctggaattctgttatttgtgacaacaacaaccatgttgtgcaagtaacattggcttctatggggtttactggagttctgtcaccaagaatcggagatctggagtatttaaatgttctgtccttgcctggtaacaacatctctggtggcataccagaagaatttggcaacctctctcgattgacaagcttagatttggaagacaacctgttggttgggccaataccagcttcacttggcaggctttcaaagctccagcttctgatactaagtcaaaacaatctcaatggctctattcctgatacactagcaagcattttaagcttgacagacattcggctggcttacaataaactcactggtcaaataccttcccagctgtttcaagttgcacgttataatttttcaggtaataacttgacctgtggagcaaacttcctccatccatgtgcctcaaatatgtcttaccaaggttcttcccgtggttcgacaataggcattgtgcttgggacagttggaggtcttatggggcttctaatcatatgggctgtattcattatctgcaatggaaggaggaaaagccatctacgtgaaatatttgtggatgtatcaggtgaggatgatcgtagaattgcatttggccagttgaaaagatttgcatggcgagaattgcaacttgcaactgataatttcagtgagaaaaatgttcttggacaagggggttttgggaaagtatataaaggagcacttccagatggcactaagattgctgtaaaacggttaactgattacgaaagtccaggtggagaggctgctttcttgcgtgaggttgagctaattagtgttgcagttcaccggaatcttttaagattgattggtttctgtacaacacaaacagagcgcctacttgtttatcctttcatgcaaaatcttagtgtggcctaccgactacgagaatttaaacctggggagccaatattagactggtctgcaaggaagcgagtggctataggcacagctcgtggactggagtatttgcacgagcactgcaatcctaagattatacatcgtgacgtcaaggctgccaatgtcttgcttgatgaaggttttgaaccggtggttggggatttcggcctggccaagctggtggacgtgcagaagacggcagtgactccgcactcccagtccgagcatgggtcacatcgcccccggaatacctgtccactgggaagtcctccgagagaaccgatgtttttggctatggcataatgcttcttgagctagtcactggtcagcgtgccatcgacttttcacgtctggaggaagaagatgacgtgttgttacttgaccatgtcaagaagctgcagagggaagggcatctcgacgccatcgtcgaccgcaacttgaacagctgttacaacgggcaggaggtggagatgatgatccagatcgcgctgctctgcacgcaggcgtcgcccgaggaccgcccgtccatgtccgaggtggtccggatgctggagggcgagggcctcgccgagaggtgggaggagtggcagcaggtggaggtgacgaggaggcaggactacgagcggatgcagcagcgcttcgactggggcgaggactccatctacaaccaggacgcgatcgaactgtccgccggcaggtgacgacgtcgggtcgtcacacggagcttgtcgtcgtcgacgtcgcagtgccgacatgtaactgtatatgtaaggcattgttgcgaagcttgttagcaaaatataatctgtgacactcacttagtgttgatacgtgcctgtattttattatttgtgtgtataaggaaggatgatttaaacgcgttcaggtgtttaccggctgtccggctcccaagtcccatcctgtaaagctctatataggggggtggggaccggttgaaaccacatcacatgcaagctgcaagaattggcttgacaaatatttaacgaactctattgtcgacagaaaaaaaaaaaaaaaaaaaaaaacaaaaaaacccccc

SEQ ID NO: 15930 - DNA, 877 bp, Zea mays
  Clone ID: MRT4577_114528C.1
gccttaattatcctttagaactttggctggacatgcaactttagatagccataaccgcaagctgccttgtcctattctcagaaaaataaataaacaaaaccgttgatttatttatatttttccaactatataagctatttatgtcctgatgaagtttattactgacatttgactgaaccatcagctacttgtagcattcatctccagtcttgttacacatggatttattgccatctcttgcctgttgagttgcgcacttgggctgaagcctaccagctgatttttgctctgccgcacctgtgatgctactgctggggggcaatggatatagcaataacaccagctactgctggggggcaatggatgtagcaataacaccagcccatgcttgacacctttctttggtccttctggcagctgaccaggctaaattttcatttccttcaaagtccatggtgctgtctggcctgaggtaacagattgctcagtttgcaacgagtttctttgtgagtgatgtgcttttgggagagcatggagtgtttgatttgtcgctaatgtcatgttaaggcttgttcattgtactaggatttagttatctatggaaatttgtcaaggattgctgggcttgaagattcagcgtgtttgtattatggttttcatttactagcttatccaggtctgctcttaaacccgtagggctttgtacccagaaaagtactggctgcttttagacgcaggcttcctgttggggagagttggcagcgtatcatcattttattagcattctagcgtcctgactcgcgagttgttctcacccaacactttgtccttgaagttgtacttgacggattgttaattttctgatgcaatgcttgag

SEQ ID NO: 15931 - DNA, 565 bp, Zea mays
  Clone ID: MRT4577_114529C.1
ggcaccggggcctacgtcgaagtagctgacagcattcgggccgagatgtctcgctccgtggccttagctgtgctcgcgctactctctctttctggcctggaggctatccagcgtactccaaagattcaggtttactcacgtcatccagcagagaatggaaagtcaaatttcctgaattgctatgtgtctgggtttcatccatccgacattgaagttgacttactgaagaatggagagagaattgaaaaagtggagcattcagacttgtctttcagcaaggactggtctttctatctcttgtactacactgaattcacccccactgaaaaagatgagtatgcctgccgtgtgaaccatgtgactttgtcacagcccaagatagttaagtgggatcgagacatgtaagcagcatcatggaggtttgaagatgccgcatttggattggatgaattccaaattctgcttgcttgctttttaatattgatatgcttatacacttacactttatgcacaaaatgtagggttataataatgttaacatggacatgatcttctttataattct

SEQ ID NO: 15932 - DNA, 297 bp, Zea mays
  unsure (1)..(297): unsure at all n locations
  Clone ID: MRT4577_11452C.1
ggccgacccacgcggncgacaggctatataagaagctggtttccatcttttcggntctctcacagntngaggcagtcctggattgcgacatttacttgaactgactctttatcattgaaatccacatactggaaatatttttgcaatgcaggattatcgtattgattatgtcgactaacaaaatgtagacgctcttagccagcaaaacaaacaaatactaattgacactcttgctcatgcttgtaacaaacactattctgaaatggcaaatgacttcacatggtttgctttccttgc

SEQ ID NO: 15933 - DNA, 382 bp, Zea mays
  Clone ID: MRT4577_114530C.1
agggataaaactgaaatcaaggccacccgcttcgaggactatgggggataaacaaagaccagacagacgggggttcctcaaaagaagccccaaaaaaacaggggctttaaaacccattcatttccaggagataggggcgccttttaaaaagggccttcgcagaaaacctaaaggggccaacgaacccccttgaaacaaagggttcaacttccttgggaatgccatgaccatcgctggcaggcttggggaaaaaaaagggtgcaccttgcagggccaagccaccaggcaattcgagggactgagcggactttaacttcatgttgcatgccggcacctggggcctgttaaaaagggggaggctgacaaatgggggtccctgaaa

SEQ ID NO: 15934 - DNA, 269 bp, Zea mays
  Clone ID: MRT4577_114531C.1
tacttatttcttaacaccacaggagtataccccccacaaggtatttaccaccaaagcccccaccttaggttccccaggatacccaaccagattatatttacctccaagcccgcctcaccgcctatggtatacccacccacccaccaccacgattttagacaacaaaataagggggctggagaactacactatgacctaatacgcagccatacgaattgaattttttcacggacatctgggccctcgtttcgcaagataaggctgaattg

SEQ ID NO: 15935 - DNA, 383 bp, Zea mays
  Clone ID: MRT4577_114532C.1
gctctcttttctttacgaacatcgggcactgcgctcaactcgaagccattgctgattgcggggcgcactaccctcacgaaggggcggccggcgtgggacagaccgcacggcagctccacgaacttatgcgggtccatggccgccatgctataaaagctcactgtacagatacggcagcagcgcttcgctgcgcgttcagcaagtacaggcagctcacagtccgcctgcgcctcaccttgcaatttggccgtggtcgccattaccagatggtccaggggttacgctgggtgaacgggaacacgattgactgcccgtatctcgcgcagcgtacctgacttgataaaggcgaacgtgtggtaaattagcgcttagtacaggcgcgc

SEQ ID NO: 15936 - DNA, 461 bp, Zea mays
  Clone ID: MRT4577_114533C.1
cctgctccaccaaaaaaatttaaggcaaacaaaataacgacgagggcaaaccaccacccgccagaagcaaaacaaaaagaaaaaaaaagaagatttatgaaaaaaaagggcccaccacaaaaatagctgcttagccctcgaacaaaccccaccaaacattaattgagaccgaccaaacaatgaaacaaaacgcagcaacaagctaacaaaaggccacaaaaaaaaaacctcacccccccccataataaccaaggcgccaccggtgcccagaacggccctccggcggagaccaaccgagcaccgacctaaacctcgacccaaaccaactggttgtaaatccccagcccctcaaaccggcaaggggggcccttatagctttgggccgccccacaggccaactgagacggcaacaaggaaagcgggcagggtctcaacaaacctggggtttgtcaacacacccc

SEQ ID NO: 15937 - DNA, 312 bp, Zea mays
  Clone ID: MRT4577_114534C.1
atgtttccacgcactcagcttttacctatcctttatacttgccatgattctctcgtttatctacaaactactatctttatctctacatccagacctatacgctttctattttaattcaacatattgatcattccctcccttatcctgtctatcattctctataatatatcctattaaatacccttttattttattcactttccaattacctttgtggttcaaccataaataatcaaaaactaacctctattactactatttaaactccacttactttttcctatatcttaatcaacaattcctccctcttta

SEQ ID NO: 15938 - DNA, 747 bp, Zea mays
  Clone ID: MRT4577_114535C.1
atggaatgtctgctacaacagcttcacgaagtgtttgagacacctagtggccttcccccagctaggtgttgtgatcaccggattcatctcctcccaggaacatcaccagtagcagtacggccttacaaatatccacagctccagaaagatgaacttgaagcccagtgtaaggccatgctccaacaaggcatcatccgccacagcacattggctttctcggcccaaggtgcaagattcttcaccaaattggatctgcgttcaggttatcaccaggtccgtgttcaccccgatgatgtgcacaaaacagacttccggacacatcatggccattttgaattcttggtcatgccatttggtctctccaatgccccggcaacattccaggccctcataaatgaagtgttgggacagttccttcaacgatttgtgctcgtattttttgatgacattctcatttacagtgcatcatggtctgaccacctaatacatgtcaaggtggttttggagtccctgaaagccaacaagctgtttaccaatcagtctaagtgttcctttggaacctcaaccgtcacttatctgggacatgtgatttctgcagaggaagtcaccatggatagtgtcaaggtggaggttgtcccttcctggccacagccacaggcaccacgaggactgcgaggatttctggggttggcaggcttctatcgcaagtttatcaagggttttggagtaatagtgaaagtcgcctag

SEQ ID NO: 15939 - DNA, 453 bp, Zea mays
  Clone ID: MRT4577_114536C.1
aacaaaactaggaaccatttttttgggtcaccaaatgttcggataagtcttaaaaaacactttgggtttaacgaaaataaaaggtttaaattgaccaggcaaacgttgggagcatagtttaaacaatgacgggaacaaaaagagatattttatgtttccactagggattcctcaaggaaacacaaaacccgcccgacacattattttttttttgggggagccttgggcaccctgggtccaaggggaacctttttttccacacttttgaagaatcccacaaccaccgtttgccttattttccgggcaggaaagcgaccaaaaggggggtttttaaaaaagggctccactaccaagggcttagggggaaccatttttaccataccaagataaacatttttgaggaaattggggtcctttttaaactccttgccaaaacgcctataaaatttggga

SEQ ID NO: 15940 - DNA, 260 bp, Zea mays
  Clone ID: MRT4577_114537C.1
cccccacagttctatatgtttatccccatggggcctttgttggtgtttgcgagctcgcatgcaactaattttccgggacatagccttacacccttatgtttgggttccaccttaaaaatcggatacacagaactagactttccctaacacaatttttttcatccgggtttttttgccctgggacatactgacaacgatcgacgttgtcttgcaagggcagtcaaatcctgtgaaaaataattggggccccatgctgggga

SEQ ID NO: 15941 - DNA, 301 bp, Zea mays
  Clone ID: MRT4577_114538C.1
gaacatcccttttttttattttttggtttagcaaacccatgtttgtgtataactaagaggctttaaacgcacaaccaatcaaaccaagcaagggtgtcaacaactttttctacaaaccaggggatgcgacacagaccgctcgtacagggggccccaacactgaaaggttgctgttagccccgggaagacgcaggtccgaagaaaataaacttaggaggccatttggccccacaaatcccgagaaatgacgggggcttaacttgtgacttggtatcaaggagggacttggcggatcctaaaa

SEQ ID NO: 15942 - DNA, 232 bp, Zea mays
  Clone ID: MRT4577_114539C.1
attcggctcgagcagatactctgtttttttacgcctagggcgggcaggatgaccgcggggacattacacgcggtcacgggatgtaacaaggttgaagccagcttatgtaggttccttatgaatgcactggtacagaaaatctacgaaatgacggaaggattaactgtggtacacagaaaatcatatcggttttacggaaacatagaaacagcggagaacgggatacttaatt

SEQ ID NO: 15943 - DNA, 373 bp, Zea mays
  Clone ID: MRT4577_11453C.1
tctcactcttccgcggactcgtgggtctgcctaatgactgtcgtatttaggtatatatctagtgctttgcccatcttcagaggttatcgtttgagcggatactattcgtatttgggaccttcgtgctcatcgattataacctctaaggggccccaaccgtttggacttgagtatgttgaaaaaagacattcaaccttggcaagaactacgttcatcataatatatgacccatgctcctttaagctctttaaattccctgggtgacttagctacctagatcaatgctgataattatatatgccctataacttggttatcgacctcccattttgttctaagattcatctattttgtggtccatttgtggcattca

SEQ ID NO: 15944 - DNA, 459 bp, Zea mays
  Clone ID: MRT4577_114540C.1
gaattccgggctcgaccgacgcaatcgtatgctcttcacgtcactaacaccacctagcaactctttctcttctgcaataatggcggctcgcgtactcatcttcagacacgaaactggtccctgctacaaccccaacaccatcgcggctcactgttcttgcgcggccaacacctactaccataacaacaaggcaactgccgccacctgacacttcacctgcaccggcgccttcactaccagatacccaagttcttcatgctgcttcttaccctaccggagcaagcgtccgctggaaccataaccccgaccactgcaggcaccatgggaggaggaacctgaagtacctccacaggcacacgcacagccgtcgctggcatgtcgacaggcactgacaccggaactgcgggtacaggtttcggcggtctatgaccaggcacatacgctagcatggacactgca

SEQ ID NO: 15945 - DNA, 782 bp, Zea mays
  Clone ID: MRT4577_114541C.1
gagcggaagactttacaataagataataaacattagtagacttttaattttacaaaaccaagtggttattattattacatgcccgaggtagagtcaaagtgctaacttattacatcacatgagaagatctcagcttcccacaagcacacacaagttaggcataagtaaataagtctccatatgtgagcctaacagaagtcaaatgtgtaaaggacctctcctgcaacaacatagggaataaaaccctgagtatgcaattactcagcaagactaacccgactaaagaaaatactctcaagggtatgctagctgatttgggaatcaaggtaaaggtcatcaatgttcaaatactcaagttttgcataagagcttactataacttcatctttaggccagctttttactttccaagttaagttattacgtttctctagataggcccaatctagctcattcacttggcctaatctagtttcattttacataaaacaaaccttgttatacttattatatacgatgagggtcaaagacctagtattcatatccgagaagtaacaacaatctaaatcggataaccaactagggatctccaaccacatgtagcaccccgaaaattcaaatcttaaaaattcctcaaaattgctctaattcaaaatgaattttaaatttcgtttaaaaatgtttgtttacgagttgatctcaacaaataaaatatagtgttctgtattctctccaaaatccttctcaaaatatcttacaaatatttcaccagtgatccccta

SEQ ID NO: 15946 - DNA, 186 bp, Zea mays
  Clone ID: MRT4577_114542C.1
ccccatcttgttctgtaccggggctaattctttgccagcacacaaagagccaagacgggaccccatcttgttctgtaccggggctaattctttgccagcacacaaagagccaagacgattgttgtaactcgggttatttaaatcccagctgcagagcaaatacacaactttaaacgtgtagcgagc

SEQ ID NO: 15947 - DNA, 668 bp, Zea mays
  unsure (1)..(668): unsure at all n locations
  Clone ID: MRT4577_114543C.1
gggtacccctcgggnnccggccgggnaaaaaaaaaaaaaaaaaacaaaaaaaaaaaaaaaataaaaaaaaaaaaaaaaaaaaaaaaaaaaaaaaaaaaaaaaattttttgcactcccacccctcaatttttcccagccgccatagccattcttcctccctgtcttctctccacggcagcaagcctctcccatggcgcaacagcaaatcccatgcagcgagctcctcccccatgcggggtccggccaccacttcttcacctgcgcaggatcccctagcccaatcccttgtggcgggagaacaaccgtcgtttctcttggggctcagctcctaggcgcagatccctccatggccgaggacgcccaggccaggagcgccttgagctcgcccctgctgctctggttgctcatcttccccgacgccgtcggcctcctccaacgttggcccctttccagctcgacgcctccagcagccatggacgcccaggctgggaaacgctggaactcgcgctctctctggtttgggtggagcagcgcctttccctgcgctcagcctccccaactcggcgcccttgctgtaggcgagcagcagctccctatccatggcgccactgcaatattccccttccttcttccccctttctgctttctcatctcccttggctgccaag

SEQ ID NO: 15948 - DNA, 446 bp, Zea mays
  Clone ID: MRT4577_114544C.1
aggcggccccaagcgctcgccaccgacggcccgcgagggcatcacacctgcctcttgagcaccctctcaccgccgcacgatggcaacagcagccacgacgggagacgcccccttccccatcgaggatcgcgacaatgtggagctgttcacgctcacgtacggcgacattgtgaggaagttgctcacggacctggaggaggccgaggaggtcaacaagcagctcgaccacatgtgttacaacatgggaacacgactggacgctgagcccccagcaaagaccaacgcatcaaggtgtgcagacttcgaggagactggcccatgctattgcgaagcttgactccaaaatgttcttgcgagcgactgcaaccgcgaccaattgccatgctgaggataaagttgcagccttggcctggaagaccaccctcttcctgatttcgctgagatcc

SEQ ID NO: 15949 - DNA, 394 bp, Zea mays
  Clone ID: MRT4577_114545C.1
aaaaagaaaaaaaatggaccccgttaacccaaatatttaaagggcaaagtaaacacatcacagcctggtttcgttacataaaccacaaacccacaggttttaaaacaaaaaagggacggccaacaaacatcgacaatttttccaaactcgttggaatcccccaggcttaaccttaagggactaagtgggaccggcaactaattggcccccatgcttcccctggaagggaccctgcaaacccatcccactatggaaggcctggcggcaggattggcagggaacggcccccccaaatttgggaaactcccccgtggattggccattgttggcaggggccttgcctttggcggggggggaagtgcccacagggggggccccctccttgccacctgtt

SEQ ID NO: 15950 - DNA, 1850 bp, Zea mays
  Clone ID: MRT4577_114546C.1
gccggccggtcctggaaggccctatgcacagatcgaggctcaaacagtttacggagcccttcatgctttggagacatttagtcaacgctgtatgcccagatcgaggctcaaacagtttacggagcccttcatgctttggagacatttagtcaactgtgcagccttgacttcaatgcaaacctgatcgaacttcattcagctccatggactatcctggacgctcccaggttcccttcccggggcttcattcggcacgaggcaccataaaagaaacgtgacacataattgatgctgtttgtattgagatattttgcaggctcaaacagtttacggagcgcttcatgccttggagacatttagtcaactgtgcagctttgacttcaatgcaaacctgatcgaacttcattcagctccatggactatcctggacgctcccagattcccttaccgagggctcctcatcgatacttcaaggcactatcttcctgtcccagtgataaaaggtgtgatcgactcaatgaccttcagcaagctgaacgttcttcattggcatatcgtggacgagcaatcgtttccgctcgaaatatcttcctacccaaagttgtggaacggcgcttactcttattcagagagatatacagttgatgatgcactcgacatcgtacagtatgctgaaaaaagaggcgtgaatgtcttggctgagattgatgtacctggccatgctctttcatggggtgtcggatatccatcattgtggccatcagctacatgcaaagaaccgcttgatgtcagcaatgaatttacatttcaactgatcaatggaattctttcagatttcagcaagatttttaagttcaagtttgtccatttgggcggagatgaagtaaacacaagttgatgcaacatagcatgaatgaatctgatgcctacagatattttgtactgagagctcaaaagatagcgatatcacatggttatgacatcattaactgggaagagacatttaacaactttggagacaagctggatcgcaaaacagtggtgcataactggcttggaagtggagttgcagagaaagtggttgctgctggtttgagatgcatcgtaagcaaccaggataagtggtacctagatcacttggatgctacatgggaaggattttacacgaatgaaccactgacaaatatctacaacccggagcagcagaaattggtacttggtggtgaggtatgcatgtggggcgaacacattgatgcatcagacattcagcagacaatttggccacgtgctgcagcagctgcagagcggctatggacaccaattgagaagctggcgaaggacacaagatcggtcactgcaagattggcacgcttcaggtgcttgctgaatcaaagaggggttgctgctgcaccactagctggttatggccgctcggcaccatcagaaccaggttcctgcttaaggcagtagatatttttcatagagtagattaataaacataattccaggcatccaatttacttctctgagcgattaaaaatagctcggatcgatgtaaggcgaacccgcagaatgttcctatttttctgatgcgctctattcatttggagatgtctggtcatgttttactttcagtgtaaggtcatgaatatcaagatttagtttcatacaccaatgaaacaaaaaaaataattagcatgtgttctaaagaaaggtgcttcaaaccttgcaagaaccaacattttagttcggatgttttaatggaaattgcctccataaaaaaaaaaaaaaaaaataaaaaaaaaaaaaaaaaaaaaaaaaaaaaaaaactcgagaaaggggccggtacc

SEQ ID NO: 15951 - DNA, 326 bp, Zea mays
  Clone ID: MRT4577_114547C.1
gactcttgctcccactcttcctctaaggattaacggtccttatattcttctttgcagtatttgaccaaaaagttgttaatgccctcatgacaacctagtctggtctattccatgttggataattgtttgtggttcgtccattaaattccacatttcaagggagattgtttatcattattcccaagctgtcatagatatcattatcgcatggtctgtaacatgaccataatcttctaacatgactctggtttttttatcatactactatctaaccttttcgtcatttatttcctatatatggttactctatatccttagtctaatta

SEQ ID NO: 15952 - DNA, 1488 bp, Zea mays
  unsure (1)..(1488): unsure at all n locations
  Clone ID: MRT4577_114548C.1
aattcggcacgagggtggtctgccactgccagtctgccactgccaggcgccgtcctgcagagatggcagcggcgctgaggccgaggctgctcgtgctgctcgcggtggcggccgcggcgaccgggccgtcgtgcgccggcgccggccgcgtcgacctgtggccaatgccggcgtcggtcgcccgcggcgcgcagacgctcctcgtcagcaaggacctcaggctgtccacggccgggagcagctaccccgacggcaagggcatcctcacggaggcgttccggcggatggtggccgtcgtggagctggaccacgccatcaacgggacctactcccggggcgcgcccgtgctcgccggcgtccacgtcgccgtccgctcgcccaacgacgagctcaacttcggggtggatgaatcgtacaggttgtctgtgcctgccactggggatccgctgtatgcccagagtcgaggctcaaacagtttacggagcgcttcatgccttggagacatttagtcaactgtgcagctttgacttcaatgcaaacctgatcgaacttcattcagctccatggactatcctggacgctcccagattcccttaccgagggctcctcatcgatacttcaaggcactatcttcctgtcccagtgataaaaggtgtgatcgactcaatgaccttcagcaagctgaaccagttgatgatgcactccacagcgtacagtacgtccgaaaagaggcgtgaatgtcttggctgagattgatgtacctggccatgctctttcatggggtgtcggatatccatcattgtggccatcagctacatgcaaagaaccgcttgatgtcagcaatgaatttacatttcaactgatcaatggaattctttcagatttcagcaagatttttaagttcaagtttgtccatttgggcggagatgaagtaaacacaagttgctggagtaccacaccacacattaagtcgtggttgatgcaacatagcatgaatgaatctgatgcctacagatattttgtactgagagctcaaaagatagcgatatcacatggttatgacatcattaactgggaagagacatttaacaactttggagacaagctggatcgcaaaacagtggtgcataactggcttggaagtggagttgcagagaaagtggttgctgctggtttgagatgcatcgtaagcaaccaggataagtggtacctagatcacttggatgctacatgggaaggattttacacgaatgaaccactgacaaatatctacaacccggagcagcagaaattggtacttggtggtgaggtatgcatgtggggcgaacacattgatgcatcagacattcagcagacaatttggccacgtgctgcagcagctgcagagcggctatggacaccaattgagaagctggcgaaggacacaagatcggtcactgcaagattggcacgcttgaggtgcttgctgaatcaaagaggggntgctgc

SEQ ID NO: 15953 - DNA, 253 bp, Zea mays
  Clone ID: MRT4577_114549C.1
cattgtttgaggtgccatcttttaaatcgcgtgtgaaatggactcgatagtggtgcccttattaccgaatgtgtttcctagaaataatcaatttattgcttgagattcatctgaatatatttctcacaaaactcaaacaactagccatggagaaccctgccgtctacctacaacagcaacaaactgatttcatctagccctttcgctgtggttaatgcacctacatacctgcaacaacagattgttgcaacaa

SEQ ID NO: 15954 - DNA, 301 bp, Zea mays
  unsure (1)..(301): unsure at all n locations
  Clone ID: MRT4577_11454C.1
tttaattattattttttttttttttttttttttacagagggaacatacagttgcttcattattcattcaggtcgaacaaagtggctcagcccagtctttttatttttttttttacgatgattattattactgcatggtggggggggggggctttttannaaactcttnntttacttttcncggggggggggggccgagcttttattgggggcgagctttcccttgcaggagccatgggttcatcttggacgccgtcccctcccatgtgagggtgggccctgggtcgtcgcgttgttgttgg

SEQ ID NO: 15955 - DNA, 849 bp, Zea mays
  Clone ID: MRT4577_114550C.1
cccacgcgtccgttttacacgaatgaaccactgacaaatatctacaacccggagcagcagaaattagtacttggtggtgaggtatgcatgtggggcgaacacattgatgcatcagacattcagcagacaatttggccacgtgctgcagcagctgcagagcggctatggacaccaattgagaagctggcgaaggacacaagatcggtcactgcatgattggcacgcttcaggtgcttgctgaatcaaagaggggttgctgctgcaccactagctggttatggccgctcggaacccgcagaaccaggtatttgcttatggcattgaggtatgcatgtggggcgatacctttgacataatttcaattcagcagattatttggccccgtgctgcaccagctgcagagcggctatggcccccaattgagaagctggcgaaggacccaagatcggtccctgcaagattggcccgcttcaggtgcttgctgaatcaaaaaggggttgctgctgcccccctagctggttatggccgctcggccccatcagaaccaggttcctgcttaaggcagtagatttttttcatagagtagattaataaacataattccaggcctccaatttacttttttgagcgattaaaaatagctcggatcgatgtaaggcgaacccccagaatgttcctatttttttgatgcgctctattcatttggaaaggtcgggtcatgttttcctttcagggtaaggtcatgaatatcaagatttagtttcttccccccatgtacccaaaaaaaaaaaaaaaaaaaaaaaaaaaaaaaaaaaaaaaaaaaaaaaaaaaaaaaaactcgagaagggg

SEQ ID NO: 15956 - DNA, 871 bp, Zea mays
  Clone ID: MRT4577_114551C.1
gccggccggtccggtatgcccagatcgaggctcaaacagtttacggagcccttcatgctttggagacatttagcggactgtgcagctttgacttcaatgcaaacctgatcgaacttcattcagctccatggactatcctggacgctcccagattcccttaccgagggctcctcatcgatacttcaaggcactatcttcctgtcccagtgataaaaggtgtgatcgactcaatgaccttcagcaagctgaacgttcttcattggcatatcgtggacgagcaatcgtttccgctcgaaatatcttcctacccaaagttgtggaacggcgcttactcttattcagagagatatacagttgatgatgcactcgacatcgtacagtatgctgaaaaaagaggcgtgaatgtcttggctgagattgatgtacctggccatgctctttcatggggtgtcggatatccatcattgtggccatcagctacatgcaaagaaccgcttgatgtcagcaatgaatttacatttcaactgatcaatggaattctttcagatttcagcaagatttttaagttcaagtttgtccatttgggcggagatgaagtaaacacaagttgctggagtaccacaccacacattaagtcgtggttgatgcaacatagcatgaatgaatctgatgcctacagatattttgtactgagagctcaaaagatagcgatatcacatggttatgacatcattaactgggaagagacatttaacaactttggagacaagctggatcgcaaaacagtggtgcataactggcttggaagtgggcatcgtaagcaaccagataagtgtacctagatcactggatgctacatgggaagatttta

SEQ ID NO: 15957 - DNA, 700 bp, Zea mays
  Clone ID: MRT4577_114552C.1
gttccattcctcactccatcctaccagactgatgttgcctgctccccagacctcttatgttcttctcggcggcggacgtcgcatccgctcgtggtgtcagtactgcctcgccgtggtgcagctgatgatcgatcgcacgatgttccgcactgtgcatcctccggcgctgttctcggagcaggacgtctcgtcataactatcgcggcgtggagtgaaaggacgagattcgtcaccctgcgaacggtgtgaatgagagcctgtacctgccgtggcacctgggatacgacaaagacgcgcggatacacggggaggactacttttgctcttcctgattctgcttcagttccgggcgaatggccattttctgcgcttggtgcctactcctgggatccgagttccactgcgaggagctctccttcgaatatcgactgtagcccgaacaacggctcccgaccgagaatcagcacggttccagacccatgtcctgtcatgcgctcacgtcgttgctgacacctggctcgtctatacctcctacttggttggcgtattactgtaggtctattccttgatctaggatcccatgcacttaagatttgtgattctctccgcactggtgctgctatccccgtgtcgtaataatacgagatgtcttaagcggttgaacattaccgtggtgtaatcacagtaatttgttgctgtc

SEQ ID NO: 15958 - DNA, 299 bp, Zea mays
  unsure (1)..(299): unsure at all n locations
  Clone ID: MRT4577_114553C.1
ctcttttcttccacacaacataaaatagataaaagccananggggtcacacgagagctccaggctctgggaaggtcnatcagtagatgaggatttgtgacagaacttanagaagcaccttgctagcatggtttctgaagggtgaattctggtggggaaccagaaactccctgtctttggggcagggctaaagcagctcctaaggaccactgaccattagctcttgcttttgatggcattctctttccaccttgtcttctcctatgctcctctgtgttagtgtggcaggtatgacaactc

SEQ ID NO: 15959 - DNA, 2060 bp, Zea mays
  Clone ID: MRT4577_114554C.1
ggccgggccgggctccccacaaaccctaacactccaccgacgcccagatctgttccttctctcttccacgccgccgccgccctcgaattttcgaatcctcagcaacaatcgtcctgccgccatgagggagatcctccacatccagggcggccagtgcggcaaccagatcggtgccaagttctgggaggtggtgtgcgcggagcacggcatcgacgccaccggccgctacggcggcgactccgacctgcagcttgagcgcgtcaacgtctactacaacgaggcctcgtgcggccgcttcgtgccccgcgccgtgctcatggacctagagcccggcaccatggactccgtgcgctccggtccctacggccacatcttccgccccgacaacttcgtcttcggtcagtccggggccgggaacaactgggccaagggccactacaccgagggagccgagctcatcgactccgtgctcgacgtggtgcgaaaggaggccgagaactgcgactgcctgcaaggcttccaggtctgccactctctcggcggcggcaccggctccggcatgggcacgctgctcatctccaagatccgcgaggagtaccccgaccgtatgatgctcaccttctccgtgttcccgtcgcccaaggtctccgacaccgtggtggagccctacaacgcgacgctgtccgtccaccaactggtggagaacgccgacgagtgcatggtgctcgacaacgaggcgctctacgacatctgcttccgcacgctcaagctcaccacacccagcttcggcgacctcaaccacctcatctccgccaccatgagcggcgtcacctgctgcctccgcttcccggggcagctcaactcggacctccgcaagctggccgtcaacctgatcccgttcccgcgcctgcacttcttcatggtggggttcgcgccgctcacctccaggggctcccagcagtaccgcgccctgacggtgccggagcttacccagcagatgtgggacgccaagaacatgatgtgcgccgcggacccgcgccacggccggtacctgacggcgtccgccatgttccgcggcaagatgagcaccaaggaggtggacgagcagatgctgaacgtgcagaacaagaactcctcctacttcgtggagtggatccccaacaacgtcaagtcgacggtgtgcgacatcccgcccacggggctgaagatggcgtccaccttcatcggcaactccacctccatccaggagatgttccggcgcgtgagcgagcagttcaccgccatgttccgcaggaaggccttcttgcactggtacacgggggagggcatggacgagatggagttcaccgaggccgagagcaacatgaacgacctcgtgtccgagtaccagcagtaccaggacgccaccgccgacgaggagggcgagtacgaggacgaggaggagggagatctccaggactagaataggctgcttcacattcagtcaccgtcagtcatgaaaaactaatcatttgctgcttttcgtcgtcgtcgtagtagtagtaggtcggtaatcatctgtcgtgggtttgtttcgtttctatcattaatcagcattagtagtagcagctgctgctgcgggggcacaacacaaggggggggataggaactgcaataccctgttgcgctttggttgtttctggaaccgatgttatgttaaattctcaacgctcagtgtctgaacactatttgccgaaaaaaaaaaaaaaaaaagcggccgcacgaggcctcgttgtagtagacgttgacgcgctcgagctgcaggtcggagtcgccgccgtagcggccggtggcgtcgatgccgtgctccgcgcacaccacctcccagaacttggcaccgatctggttgccgcactggccgccctggatgtggaggatctccctcatggcggcaggccgattgttgctgaggattcgaaaattcgagggcggcggcggcgtgaagagagaaggaacagatctgggcgtcggtggagtgttaggggtttgtggggacccggcacaggcctcgaaaggggtac

SEQ ID NO: 15960 - DNA, 589 bp, Zea mays
  Clone ID: MRT4577_114555C.1
aaaaaaccctgcctccaaagcccaggggaaaacccttggtaaaacaaaaccccttggaaaaaaaaaactggttaaccaaaaaaccccccgccggaaacctttgggccccccctttatttgggccggcccctaacggcccccaccccaaatcagagtttaacccaaaagcaccccttttaaggggggggccttccggcctttttgggggggggggaacttaacggttttgggttggccctggccctgggggggggggaattttttgggtttccccacaacttttttttggggcccttggggctgggccccaaaaaaaggggccttttttggttgggaacccgttcccttttttgactgggggggggggcccttgcccggttggggggcgggggttttggaagggggggcctttgccggttaaccctgggtctggggggatccctttttgggggggcccaaaagcttgaacaaacccttgcccttaaaaagctggccctgggggggggccccagggggggggatgaaaaccttttttttaaagtgggccggaaaaaaccccccgggtttgcccccaaatatttgggaatcc

SEQ ID NO: 15961 - DNA, 1829 bp, Zea mays
  unsure (1)..(1829): unsure at all n locations
  Clone ID: MRT4577_114556C.1
cattgggtacctcgaggccggccgggtctcccctaaaccctaacactccaccgacgcccagatctgttccttctctcttccacgccgccgccgccgccctcgaattttcgaatcctcagcaacaatcggcctgccgccatgagggagatcctccacatccagggcggccagtgtggcaaccagatcggtgccaagttctgggaagtggtgtgcgcggagcacggcatcgacgccaccggccgctacggcggcgactccgacctgcagctcgagcgcgtcaacgtctactacaacgaggcctcgtgcggccgcttcgtgccccgcgcggtgctcatggacctagagcccggcaccatggactccgtgcgctccggtccctacggccacatcttccgccccgacaacttcgtcttcggccagtccggggccgggaacaactgggccaagggccactacaccgagggagccgagctcatcgactccgtgctcgacgtggtgcgcaaggaggccgagaactgcgactgcctgcaaggcttccaggtctgccactctctcggcggcggcaccggctccggcatgggcacgctgctcatctccaagatccgcgaggagtaccccgaccgtatgatgctcaccttctccgtgttcccgtcgcccaaggtctccgacaccgtggtggagccctacaacgcgacgttgtccgtgcaccagctcgtggagaacgccgacgagtgcatggtgctcgacaacgaggcgctgtacgacatctgcttccgcacgctcaagcttaccacgcccagcttcggcgacctcaaccacctcatctccgccaccatgagcggcgtcacctgctgcctccgcttcccggggcagctcaactcggacctccgcaagctggccgtcaacctgatcccgttcccgcgcctgcacttcttcatggtggggttcgcgccgctcacctccaggggctcccagcagtaccgcgccctgacggtgccggagcttacccagcagatgtgggacgccaagaacatgatgtgcgccgcggacccgcgccacggccggtacctgacggcgtccgccatgttccgcggcaagatgagcaccaaggaggtggacgagcagatgctgaacgtgcagaacaagaactcctcctacttcgtggagtggatccccaacaacgtcaagtcgacggtgtgcgacatcccgcccacggggctgaagatggcgtccaccttcatcggcaactctacctccatccaggagatgttccggcgcgtgagcgagcagttcaccgccatgttccgcaggaaggccttcttgcactggtacacgggggagggcatggacgagatggagttcaccgaggccgagagcaacatgaacgacctcgtgtccgagtaccagcagtaccaggacgccaccgccgacgaggagggcgagtacgaggacgaggaggagggagatctccaggactagaatagtctgcttcacattcagtcaccgtcagtcatgaaaaactaatcatttgctgcttttcgtcgtcgtcgtagtagtaggtcggtaatcatctgtcgtgggtttgtttcgtttctatcattaatcagcattagtagtagcagctgctgctgctgcgggataggaactgcaataccctgttgcgctttggttgtttctggaaccgatgttatgttaaattctcaacgctcagtgtctgaacactatttgctcatgtttctggaactgctgttgtgttaaattctcaacgctcttntctgtagttacaattcacccttgcttgttactgtgaacctcctatttgctgtcat

SEQ ID NO: 15962 - DNA, 265 bp, Zea mays
  unsure (1)..(265): unsure at all n locations
  Clone ID: MRT4577_114557C.1
cgagaagagcaagaacgncaaggacgcnaacggcnangaccgggacgacgacaggccggagcccggcgaagacacgcacaagcncggcgnccnaaagaanagggaccaagaacggancancnccacgaggcaggcggggancgggcacgcgccccgnnngnncaaggcgncggcgcgcgacaagggcggcnacgnnnaccccaacgncaacagcgncggcgcgggccncnnccncaacgagaagnncaaggcgccgaccancaac

SEQ ID NO: 15963 - DNA, 836 bp, Zea mays
  unsure (1)..(836): unsure at all n locations
  Clone ID: MRT4577_114558C.1
cattgggtacctcgaggccggccgggtactganttccccagagtacccttggctatatgccattcccgccgttctcttcggtggaggatatgttgctgctgtctctactgggatggcaggtctggtccaggccgggtaccttgtcagcagcgttctttgcgtggcatccttgtctggcttggcttcccaagtcacagctcgccgcggtaatttgcttggtatacttggagtaatgtccggcatcatagcttctttggctgcggtaggctttacgccagacgtccttacacagtttgcgggagtagctgccattggtaccattgctggactggccatcggaagacgaatcaccccaacctcactaccacagactgttgcagcattgcactcggtagtcggtctcgcagctgttctgacaagtatcggcagcgtcgtcggccacactggagatatctccactctacatctagtcagcgcgtaccttggcgtacttattggtggtgtaacgttcacaggaagtatagttgcctttttgaagctggcagcgaagatgtcttcgaagccgttggtgcttcctggtcgtcatcttgtcaacggcacactgttgggtgctaacttcgccactctgggagctttcctggcatacgcaccgggagcgcccataatcggtgctgcttgcttgctgggcaatgcggtactcagcttcaccaagggttataccactacagcggcaattggcggtgcagatatgcccgtcgtcatcactgttctaaacgcatattccgggttcgcacttgtggctgaagggttcatgttggataactctctactgacta

SEQ ID NO: 15964 - DNA, 589 bp, Zea mays
  Clone ID: MRT4577_114559C.1
gcacacccaaatacgatgtgctgaaccgctgccatcacctctcctctgcaagatatcattttgggtgctgggatcactgaatgagagacgagaggcgactgagacagcccttgcgaaaggatcaacgttaaggttgactgatagaggagactgctattcatgcggcatagcacatattggaaagtacgaacgataatctgcttgaggacccttgtgaacgcaccgctatgactagaacttgaagctctgactatacgtctttccagcgagattacctgaacatctataatatactggttatagagggacaggaactgagatctgctacaagtctatctggcaagagctggtacgaaaaggtgagaaagactttaaaggatggatgaaacgaaagtggatctgtaactatacaaatccatggcagcgtaggataagattaatctggacaccaacaagatcatgcacttcatctagtttgacgatcgcaacgtggtcatgggtgactggcagcacgaacacctggacactttggcattcatcatagaacaggagagaatcacatcgtcagctctgataccattcacgtgct

SEQ ID NO: 15965 - DNA, 1266 bp, Zea mays
  Clone ID: MRT4577_11455C.1
cgaggccgtgccgggaaaaaaaaaaaaaaaaaaaaaaaaaaaaaaaaaaaaaaaaaaaaaaaaaaaaaaaaaaaaaaaaaaaaaaaccgccccgacttttgggcaacggatattttgggttttcgcatcgatgaaaaacgtagcaaaaggcgatccctggggggaattgcaaaatcccgcgaaccttcgagtttttgaacgcaagttgcgcccgaagccttttgggggggggcaggtttgcttgggggtaacgcacgcaacctcccactgcattctcgaattccgattcccaatccagcaaaccctaccagccttttgcaaactcagagagggacccgatggcacccaaggcggagaagaagccggcggcgaagaagcccgcagaggaggagcccgcggccccggcggagaaggctcccgctgggaagaagccgaaggcggagaagcggctcccggcgggaaaatccgccggcaaggaaggcggtgttgacaagaaggggcggaagaaggccaagaagagcgtggagacgtacaagatctacatcttcaaggtgctgaagcaggtgcacccggacatcggcatctcctccaaggccatgtccatcatgaactccttcatcaacgacatcttcgagaagctcgccggcgaggcggccaagctcgcccgctacaacaagaagcccaccatcacctcccgggagatccagacctccgtccgcctcgttctacccggcgagctcgccaagcacgccgtctcggagggcaccaaggccgtcaccaagttcacctcgtcctaagctccttttctagtaggtccttaagcgccgtggcgccttttgactgtatggaatgtttgtcatctgaaagttgatctgagcagtgcaatatataattctggcatactattctcgcaatcgttttggggttcagaatgggactgacatcagagtaatatgtggcataccttctgatcctctgtactcgagaggattttgttgtggataagccacttgctgcctttgtttggtgggtaattgcttcgagcataagaaacagtgtatgctgctataaacatctatttgcaacgcgaaaaaaaaaataccatagaaaaaagaaaaacaaaaaagtgaaggcacagaagagagaatcaaaggttgcaagattttatcactaaggctatgaagaaccattgcttaagctgatgagaatgaaaactgatcatgctggactagttattaatgctgaagaaagaacgctttccttgac

SEQ ID NO: 15966 - DNA, 321 bp, Zea mays
  Clone ID: MRT4577_114560C.1
attcggctcgaggagaacacggtgatgtgctacacgagcccatcaccgcaagggggctaggacttgagcgtcattcgcgagtaccgcaacaagggccgagtgccacctaatcgacacaggctagacagaggcaaatgggatgtgcattacgggcacaacaaacatgggggccgtcacgatggggaagagcataaagctccgatacccgcacagtgcgatcgcaaggcacaactctacttgcaggcctcttccagagaccagagattgaacaacgtattcgacctgaaaggggtactctaatccagaacctctggagaacca

SEQ ID NO: 15967 - DNA, 200 bp, Zea mays
  Clone ID: MRT4577_114561C.1
ttttccttttagttttcaaattccattttaaattcagatttaaattcaaatcttgtgccagtttatcctcaatttatattgtgaaataaaaagtaccaatcttagaagtataatcacatatatgttgtttatattttataccctttattccttttctccatatttctaaagtcccctttaactcttaaattctcatctag

SEQ ID NO: 15968 - DNA, 1360 bp, Zea mays
  Clone ID: MRT4577_114562C.1
ggccagccaaaaaaaaagaaaagcaaaaaaaaaaaaaaaaaaaaaaaaaaagacccatcaacccacactccagcacacagcaatggcgttcacgcggcgtcatccgtgcggcatcctcctcctctccctgctggcggcatccggctcgctgtcgctggccgccaccggcccgggcgacgtggccgtcttctggggccggaacaaggacgagggcacgctgcgcgaggcctgcgacacgggcacctacaccaccgtcatcatctccttcctccgcggcttcggccacggcgccgcctactactcgctcgacctctcgggccacccgctcgcgggcgtcggcgccgacgtcaagcactgccaggccaagggcatcctcgtgctcctctccatcggcgggccgcccaacaccaacaccggcgccggcgccggctactccctcccgtccgcgcgggcggcggcggacctcgccgcgtacctgtgggacgcctacctgggcggctcgcgcgcggggctgcgccgcccgttcggcgacgcggcgctggacggcgtcgacctgtacatcgaccagggcggcgtcgacggccactacgacgagctggccaggcgcctctacgcctacaacaggagctaccgcggcaggctcggggtgacgctgacggccacggtgcggtgcgcgtacccggacccgcgcgcgcaggcggcgctcgccacggggctcgtctcccgcgtccacgtccgcctgtacggcgacctcaagtgcacctggtccgaccgggaggcgtgggagaagtgggccgcggcgtacccggccagccgcgtgttcgtcggcgtcgtggcgtcgcccgaggcggacaaggacgcgtacatgttccagaaggacctctactacaacgtgctgcagttcgcccagaaggcgcccaactacggtggcctcatgatctgggataggtactacgacaagatgaaccactacatcagcagcagctaataattaagcttcccatccacatccatccacatccacccggtttatcacctaatatataatagtattattgtatttttcttcttaactttataatacactgtaatgtaataatgtgatgatctgatgatccaccaacggaataaaatggtcagcttccagccggtgggccgcgccgctccgtcgcctggtctctgggcctgcagcgccgcgccgctcctggctcgcgcgcgcggagcgacctgcaccgctacgtcttgggcctgtccgggctgggccgcctcctcggctgctctgcctggactcaggcttagggacgatatgggccaaaaaaaaaaaaaaaaaaaaaaaaaaaaaaaaaaaaaaaaaactcga

SEQ ID NO: 15969 - DNA, 175 bp, Zea mays
  Clone ID: MRT4577_114563C.1
atagttttcgagggccgcgacctgatcgctggagcacatactggagctggaatgacactggactttggcatacccaagatcaagcatctgatcgagcaagacaatggtaggattccaaggagcggacgtactactcgggttatggtactagcacgcaccagagagttagccaaac

SEQ ID NO: 15970 - DNA, 337 bp, Zea mays
  Clone ID: MRT4577_114564C.1
attctgaccatcatgaaatagcaccatgcgaaccgcaactagaacgtcttaagaggcaaagggtaccaataaatcacctctccttgcccttctagccctttttttgatcgcaacaaatgcgttcattattccacaatgctcacttgctcctagtgccattattccacagttcctccaaacagttacttcaatgggcttggaacacctacctgtgcaagccaacatgcaacaacaagcacttgcgacgagcgtcttacaacaaccaattgcccaattgcaacaacaatccttgccacatctaacaatacaaaccattacaacgcaacatcaacaacag

SEQ ID NO: 15971 - DNA, 647 bp, Zea mays
  Clone ID: MRT4577_114565C.1
tcgggattcactcccacccctatcttttttcagccgccaccagcaggcagcagcttctccctcgcgcgtgtcttcttcccttggagctgagctccttctcccatggcgcctccacactcccagccgccctcctctgcccagcagccgagcgcccagctccctccctggatccatggcgtccaagcccctgtgccctctctcccatggcgtgaggcccctactcccatctctctaccagcgcccagccatggtggtcgccgacctccctgctccctgctgttgctcgccttgcttggatgagaagcagccgagcgccctccctgtccatggcgtggagcagcagctcccattccccggcgacatcctcctcgccgtcgtccatggcgcccctgcgaacctccctgtccatggccacaaatccttgcgcccttcctgcgcagcgccgctgctccacccctcccccagcgccccctctctcccatggccgagcagcagctctgctcgcctccccctccttctttttcccttgcgcagcagcaagaagcccctgctcgcagtcttggcgtccaacttcgctgcgcagcggtgccgatccaaaacagcagccccgaatcccctgcatcgcgtgctcgctcgatctgcgcagc

SEQ ID NO: 15972 - DNA, 242 bp, Zea mays
  Clone ID: MRT4577_114566C.1
gttgatcttaactaaagctttcggataaagaactccagaagcttcttgtatatcacgatcgctgttaacaccacaggttactgacagactgattgtgactgatagactagtagatcatgaaagagctgtgaatccttgattatgatgtgcaaaagaaatttttcggacaaattgagctttacataagtgctgagcaggtactgcataacatgctgtgcctgcagtttacaacgttctcatga

SEQ ID NO: 15973 - DNA, 471 bp, Zea mays
  Clone ID: MRT4577_114567C.1
gcgccaccagtctggcgtccttggcgggggacgctttcacgacgacggagaacctgggcagcggcaggctgcttggcggcggcgccagcacgtgcagcaggtcctcgacgaagttcctggccacctcctgctcgaggtcgtccagtgcctccgtcaccactggcgcgggcggcagaggcgtcgcccgctccagcggcttcttcttcttctgcgctgtagacctctccatcgccgccggcggcggccttgccgacctcctcctcctgtccctctgtcgcggcgcaggagcagctggtgctgctgccggaacggaaactgtagcggttgccgctgctgccctgccggcgcgtggcgccggcgggggtgggggttgagcatctgctggtagaccgggaaaagtgacgtactccatggcggtgggtgggagcggcaggagcggctgttggttggacggtcggagaggaacggttg

SEQ ID NO: 15974 - DNA, 631 bp, Zea mays
  Clone ID: MRT4577_114568C.1
ttgatccacacaccgcttcccgctccgagcgacctggtccatccccaccaccgggcctatggtggaccagctcaccgacgaccagatcgccaagttcaaggaggccttcaccctcttcgacaaggacggtgatgggtgcatcacgacgaaggagctgggcactgacatgcgctcgctggggcaaactcctaccgaggctgagctacaggacatgatcaacgaggacgatgctgacggaaagggcaccatcgagttcgcagagtttgctcgaccgtatggctcgcaagatgaaggacaccgactctgaggaagagctcagggtaggcctaccgtgtgattgacaaagaccagaacgacttcgtctcgagacggcgagctacgccgtgtcatgacaaatcttggcgagaatcttactgatgacgaggtggacgaaatgatccgagaggctgatgtcgatggcgatggccagagcaactatgatgagatctgtcaaggtcatgatggccaagtgagccacagaacgcatactctgtatgcagagaacagtctgcattgcgtataacaccagaagcaacgttttgttccatcgacttctagtgaaacagtcagctatcctgcagttgctgaaaat

SEQ ID NO: 15975 - DNA, 335 bp, Zea mays
  Clone ID: MRT4577_114569C.1
cggacgcgtgggcaaaattccctcggcaggtggttattgtagacgctccctcatacctaccggccaatttaagcgggcaggggatccccacaaggcatcacatggaagcgaaaggtggcggtggcgcggcgtggcgcgggcgctggcgcggctagctaggccggctcgtgtgcgtgcgcgaggagacagccacagccatacagggatgctgtctgcttcgtgaccgtgctggtggtggtgggctgcagtctgcagctcgtatcacacgcccacagtgcaagaaggagggagtgtaagaaaatagaggaagttgtttttaaaggcaacagcgagtc

SEQ ID NO: 15976 - DNA, 372 bp, Zea mays
  Clone ID: MRT4577_11456C.1
aactgaaaaaaaaacccctttgattaaaataaaacccgaccctattaaactgaaatagaacatggtttaacctgaggggaatataagatgttgtattctaaggtgacgacccggcattgacctaaacaatcattaccccgggctggctctgacaaacttttcaccaccaacggactgctaaaaccttccaacccaagaggcttcccgggccgcatgtccttggagggggggaacaggccctggccaaaaaacgaggggaccgtggaactaaacatgtcctacacccccttgaactcccccagcccaaccgggcgggtcttggacgtggcgaaaccgcacgactgctggcacggggcccgagggaagctcccc

SEQ ID NO: 15977 - DNA, 501 bp, Zea mays
  Clone ID: MRT4577_114570C.1
attccattcaagacagcgagcgttgcactgcttctttcctctgactcgcctcctccccgaccactatgccgccacctccaccctagtcctctcttagtcgcccgacacttcggcttaatgcagggtggaggacgcgagatctgctgttgcatatggagaagggtaagaagttagggagggcgtacatttcttggaatgatgacatatttgtggagtactacaacaagggtgacagatgccaaaatgggtggaagtctcatgtctacaacggttgttatcaagaatgaccgagaaaagtgcaatatagatatcacaaaagactaaatcatgtccaggatcaatacttttgacaagctccacactattatcaatggtatgctagaaacaagtgactttggttaggcttggaacaagagcaagatattcgttgatagtgattctgcattattattactattcgcgtgatttatgttgcatgataaattgtaggggtaaaactag

SEQ ID NO: 15978 - DNA, 651 bp, Zea mays
  Clone ID: MRT4577_114571C.1
ccggccggggatcgtcctcacctttagagtccaagttccccctacaatatgcctcgccagacccgatcctccgcgcgacctgccgctcgtccttccgctcctgctccccaacagcagtcccgaggcgcacacactcaggccgcgcctcctcccgcttacgcccaacaggctcaccctcccgcacatgctcccgccgccccttctgccggcggaggaatgtttgccaacatggcctcgaccgctgccggtgtcgccgtaggatccacaatgggtcacggtctctcaaacatgctcttcggcggaggaggatcgtcgcagcaagaagttgccgcgcccgtcactccccaagagcaatcgcaattcgtccaagcgaccaacgttggaggaaagtgtgacatccaagccaaggactttgtctcgtgcttgaacgccactggaaacgacacccagtcgtgctcttactacctcgacatgctcaagcaatgccaatccgccgccgccccttactagatcatcgtggggaaggattgatattggggtcggggtttcgagagggttgttcggtctggagtctgggttctttcgttttctctttttgaatttaaattcgcaacgcatagtatctacaaaaaaaaaaaaaaaaaagcggcc

SEQ ID NO: 15979 - DNA, 448 bp, Zea mays
  Clone ID: MRT4577_114572C.1
aaaacggggccatcagcgatcccaatttgttaaatgaaaatcagaaagaggaagggaaaaaaacaaacaaaaggaaaacgaaggggtgccattgccgtgcccaatcagagcacacccacccacccattgggaatgcgcgggagcagaaaagcagggcagggcaaccaagtttttcccccccttggttttttccctccggaagtccggtttcttgtccgggggtttagtgaatgtagtacccaaaaaaggaggccacgggggccccaacaatggggggtgcaaccgcggaggaacccttggtgggggacggagccggcccctccggggccagcgccacgggggccgaggcggcaacaaggacggcccaagcaatttttttcatctccatccctggatgcgggggtttattagccaccgtaaacaccgcggcggcgggatgggatggagg

SEQ ID NO: 15980 - DNA, 221 bp, Zea mays
  Clone ID: MRT4577_114573C.1
cgagaacagtaacaatgcttattgaatccagctacttgcttattggtgggatcaaatcaataccaacccaaccgggctggcccccgccatatatcagaacacctcgctgtgcgcgtcccatcgaatgccaaccaaatgccgtctgtgaccggacgtatccatgctgataggatgtcccagcgcgccaaatggggagcgacacaatgccacacgacttacga

SEQ ID NO: 15981 - DNA, 399 bp, Zea mays
  Clone ID: MRT4577_114574C.1
ggggggcacaaattttgggtttttaagattccggaatccggttggtttaaaaattttttgtgcttaagggggcggacaagcctttccattataaactttcggattcaaaactggcgggactctcccaaggagcttcaaaagaatgacccggggggccccgggattacgggtcctaactttggcaatcggccccctgggaaaaaggggggattttgatccgcaccacaaaaggggcccaaacgagttacagggcaatctggccgggggacgatgagggcatgaggttcagggtttccgtcacaaaaaacatggggctcagcgcccccttaaggacattctgggggcccccaggcttcacaaggctttttaccttttccacgtattcctggaattttttta

SEQ ID NO: 15982 - DNA, 138 bp, Zea mays
  unsure (1)..(138): unsure at all n locations
  Clone ID: MRT4577_114575C.1
tggatatnnnctgcagaagttccagcctcatctgagcggccgtcacctagctggcatcctgagcatcgtgtatccatagacttaggcggtacatcatgactcataggcgtgtttgcctgcagcgaagataggtgatca

SEQ ID NO: 15983 - DNA, 335 bp, Zea mays
  Clone ID: MRT4577_114576C.1
gtaggacttacttgagtattggtatttgctaatggatactaatcaatctcttctaaggggaaggggaaaaaatataatatagagtaaaataaaaatataataaatggccgtaagttttacaaaggggtgggtgggttagcgctttcgtttccccgctcccttgctcttgcattacatgcccttttttcgtgttaccgtaattgaatttcagggccgtggcgatcgaccttcccatcttggcgcaccctgtctggcccatggtactctccctgcagcggggcctcctgctcctttgttgtggtggtttcgcagcggccttgccggttctcttttcc

SEQ ID NO: 15984 - DNA, 417 bp, Zea mays
  Clone ID: MRT4577_114577C.1
aaaaaaaaggaaaaaaccttttacatggtaaacttttttgggatcataatttgggtttttataaacctaatcgaacttaaaaatggtgggccggtgggcaagatcccaacacagtttgtccatgccaaatgggggggggggtgtccacaaaactggggttttccttggggatttttttggggtcaccacggtgggtaaaaaagccgttttcaaaaagggggggggggccccttataaactgaatacgggcccccactgaaatgtcgttttaaattaaagggagtttgggggcccccttttaaaaactttggaaatgaaggccgggttccatccaaataaaaaatccgggctggggatcatgatctcgggattgaaaaacccggcagggataaaagaaatgtggcccttttttttggg

SEQ ID NO: 15985 - DNA, 523 bp, Zea mays
  Clone ID: MRT4577_114578C.1
gcccaatgaacggatgaaaccaagatggctctcctccagctaagagacatgctgatgactgtaagctgtattgcaccatcagttgaacatatccaaagaattctttattacaaataaaaatgaacgaacactagaaaaagctaatagatactcgaaccgaagaaagtccaatgctataaagagatttatatacatacatgcgtactattggatatgaaccaatgaatcccgccgcatgaaagcaatactataaccaatgagttaagtaggcaatttatcaccacaaaagaggccccaatactttaatcgactatagattgaatcctttttataagcagtaccgctccgttattggtatggtaatgctatagtagaaatcgatcaaagggctatcctctgaagttaaagaatattcatctttacaggaagtatctatactgctaagatatctctgacaagggctatagcctcggggccggtagagcatcttcgtttaacgtaccgcccaggcttttttaagggg

SEQ ID NO: 15986 - DNA, 175 bp, Zea mays
  Clone ID: MRT4577_114579C.1
gtcgccacttttgggcaagcaaaggtttcagggcgggtcattggacttattttcaggggcaaaaggccatggctttccaaaacctacacccttactctttctcataaaacaccaaaccaagatgctgttttggaaatggtggctctggtgaaaataaaaaaccaactccttcttc

SEQ ID NO: 15987 - DNA, 273 bp, Zea mays
  Clone ID: MRT4577_11457C.1
gcgacaagaatctctgttgcatctagaccaagtacctcaaacctttcccccttctgccaataccctccgttgggcgccgatccatccctctctcagtaccacgctgagggagtcgcgtttcagaccacaacggccgaggagcgcttagcgtccgctgcccccgttggcgactcgactgcctcgagcatggcattcaggccgagagacttgacgagatcggcaagctccttaggagagagtggtttttaactccgcatgctgctctctaagggc

SEQ ID NO: 15988 - DNA, 260 bp, Zea mays
  unsure (1)..(260): unsure at all n locations
  Clone ID: MRT4577_114580C.1
accgcggcggcgtggggtgcgcggggccgccgcgccgaggactctttgggtgggtgacgattgacgaagcagccgggatcggacgacgaaggcgcgccgcgcnggtgtgtatggatggatggaacccacggagccggggccgggaccgcggcgcgacgcgcgtcggcgggccaaaagtactagacgagacaataacanctggctcaccgctcacggctgcacctgcaccagcacgcccggtccccggcctccgtgcaccc

SEQ ID NO: 15989 - DNA, 434 bp, Zea mays
  Clone ID: MRT4577_114581C.1
acgcgtacgcgtccgaagcatacgattgacgcatcatgcagcaccctgtgttacttacctacgtgcatcggacattcgactagcccatacatttcagacatgcatgctcactatggacatctaaattgcagatatttatgcacatggtgagctaccattatgctcatgatcaagacatactctgacaccttgatctcatcgtgacataactgggcctactcgctgtgctgcatgagctgcacttgtgccatctttgcgagcaattgctgcttcatagtgatacgcaatttcaactgaatggacgacgcttcacaagatcatgacttggacagcgctgataatactcatataaaacattttggaacgcatccccctgttagcaattgacgtgagatcgatatggatcgtacggatttacgttcccagcagttgca

SEQ ID NO: 15990 - DNA, 273 bp, Zea mays
  Clone ID: MRT4577_114582C.1
cgttttggtgccgcagctgtttaagatggagtatgtgagcatgtggatgtgggtggagaagttcaacaggacgcggcggtccgtggagatccagcccgacgtgcttgtctaccagtccgtctgctacaaccgctacttcacggcgcactaccagtccccgcaacacatgatctgcctgtggcggaagctgcactccagcagtgcccggtgctacaacgccacatgactcattgctagagaaagcctgattttgaactctttcttgatcaaaga

SEQ ID NO: 15991 - DNA, 385 bp, Zea mays
  Clone ID: MRT4577_114583C.1
cccacgcgtccggcgtgggtgttctctccgcctcgcgagtcgggaccatgtggacgggcagcccgctgctccgggacgttggcgccgccgtgctcacgggagtgggcgcggctgccgtgctccgcttctgggaagagatcgccaaccgcgccctgctggaccaggtcacgcttttcctttgtttttttccccagtttctgtgctccgtataaaatccggtatctattgcttgcgctaacaagtacagtagtaattgaagttttggtttcgattcgttccaaattgccctgaaccccaccctcgatagtcaacccaccaagctctagcagtactgcagcttcactagtcataattataatcaaacttttattagctatcaccttcg

SEQ ID NO: 15992 - DNA, 2143 bp, Zea mays
  Clone ID: MRT4577_114584C.1
cctcgaggccggccgggaggcttgcgttgcagcatccactgcgtatatagccaacagagccattctctaccgatcgactaaacgcaaggcaagcaccccagcttgtggctctgtgcgtctgattgggaaattgcttggtcgctccaccgatcctctgcggcggccctgcgcgtgctcgtctcgtccctctgtctcgggagcgcctggatttcggaggtgcgtggaaattggatggcaacaaccggtagcccatcaagaactgcgctgccgtcgtcgccgccagctccgtcgtcctgcaagctcgccgccgcctgctgcttcgtcctgatcgtccccatcctcctcacggatgagcatgtggccgtcgccgagtccctgtcgatcggcgtcaactacgggcagatcgccaacaacctgccatcgccggcgcaggtatcgtggctgctccggtcgatgcgggtcagcaaggtgaagctgtacgacgccggccccaacgtcctgcgcgcgttcctcggcacgggcgtcgagttcgtagtcggcatcggcaacgagtacgtgccggcgatggtgagccccgcggccgcccgttccgctcgggcgcgcgcatcacctgcgtcaccgtgggcaacgaggtgttcaagggcaacgacaccgccctccaggcggcggtgcttcccgccatgcagtccgtgcacagggccctgggcgcgctcggcctccagggccgcatcaacgtcaccacggcgcactcgctggacgtcatgggcgtctccttcccgccctccgccggcgccttcgcccccgcggcgctggcgcacctgcagccgttcctgagctttctgtcggcgacgcggtcgccgttcctcatcaactgctacccctacttcgcgtacaaggacgaccccggcgcgggtgccgctggactacgtgctcttccgtgttccgtcccaacgccggtgtcgccgacgcccgcacggggctccgctacgacaacatgctgtacgcgcaggtgtggacgccgtgtacgcggccatccaggggctcgggtacacggacgtggaggtcaaggtgtcggagaccgggtggccgtcgcgaggcgacgccgacgaacccggcgccacgcccgagtacgcggggacctacatccggaacctgctgcagcggatcgagatgaagcagggcacgccgctgcgcccggcgacgcccgtcgacgtctacgtgttcgcgctcttcaacgagaacctcaagccagggccggcgtcggagaggaactacggcctcttctaccccgacggcacaccggtgtacaacgtcggcctgcacggatacctcccgccgatgctggtgtcgtcgactgcagcacgacagctgattcgttattttgcactagtcgccatcgcgtccgtcgcatattcgtctgtcttatcctgacagtgtagcctaccgacggagcactaaacagctaagcatctcatgctactcacgactcaaggaacttctgagtaatctgctggccatctcaacttgggtacctttactgcatttcggatagcgatcacaagctcttactgtacacatactgacaataaggtagaactgactgaagcatatgcagcatccattcatcacagcttacattttgacccaaaaaggaaaggtacaaacagtagggagagctgcatggacagcacctattttgttgttcactccttttcaaatgctatgaatcaagaacaagtcaacacaattattaaagattaagggtcttcgtcttccgaagtattatctccacaagaagataatattcatcagacgaagaccatttgagacgaacattcattatttaatatgtcaatgggaatgcaaaagggtagagatggaactggatcttcattaattcatttatattcatgtcccacaaaatataaatgaatattcaacaatattgacattacagtggtacttttggcttgctcgaaggcgaggatacaagagagtgattatcattcagagtgagcagtacggtgttatttttcatctatttataggcacgagacatatcccaagcaaaagtacatttatgtcctcaagaattacacatgatcgtagtacaagttattaaggactaaatatcttttcctcc

SEQ ID NO: 15993 - DNA, 1045 bp, Zea mays
  unsure (1)..(1045): unsure at all n locations
  Clone ID: MRT4577_114585C.1
aggcttgcgttgcagcatccactgcgtatatagccaacagagccattctctaccgatcgactaaacgcaaggcaagcaccccagcttgtggctctgtgcgtctgattgggaaattgcttggtcgctccaccgatcctctgcggcggccctgcgcgtgctcgtctcgtccctctgtctcgggagcgcctggatttcggaggtgcgtggaaattggatggcaacaaccggtagcccatcaagaactgcgctgccgtcgtcgccgccagctccgtcgtcctgcaagctcgccgccgcctgctgcttcgtcctgatcgtccccatcctcctcacggatgagcatgtggccgtcgccgagtccctgtcgatcggcgtcaactacgggcagatcgccaacaacctgccatcgccggcgcaggtatcgtggctgctccggtcgatgcgggtcagcaaggtgaagctgtacgacgccggccccaacgtcctgcgcgcgttcctcggcacgggcgtcgagttcgtagtcggcatcggcaacgagtacgtgccggcgatggtgagccccgcggcggcgcaggcgtggctgcagcagcacgtggtgccgtacctccgctcgggcgcgcgcatcacctgcgtcaccgtgggcaacgaggtgttcaagggcaacgacaccgccctccaggcggcggtgcttcccgccatgcagtccgtgcacagggccctgggcgcgctcggcctccagggccgcatcaacgtcaccacggcgcactcgctggacgtcatgggcgtctccttcccgccctccgccggcgccttcgcccccgcggcgctggcgcacctgcagccgttcctgagctttctgtccnggcgacgcggtcgccgttcctcatcaactgctacccctacttcgcgtacaaggacgaccccggcgcgggtgccgctggactacgtgctcttccgtgttccgtccccacgccggtgtcgccgacgcccgcacggggctccgctacgacaacatgctgtacgcngcaagtgtggacgccgtgtacgc

SEQ ID NO: 15994 - DNA, 362 bp, Zea mays
  Clone ID: MRT4577_114586C.1
cccatgcgtccgtaactagcacctttgaatgcccactagggcaccaacaatggcgggcaaaatattgcgcctggttatgctcctaggtgctgctgcaggggctgttacggcgaccagcttgcaggattgcttacatgctcctattgcttccctcctttcaccatacctgtcaccagcgggggattacgcatgtgaaaacccattccttataccccacgcgatcccacatgcaatcacagctggcataccacctttattacccctgttactacaacaatcaccagacctaccacatgagcatcctttggcgcatttattggcgcaaaacattatggcacaacatctgctacaacttgtggttg

SEQ ID NO: 15995 - DNA, 317 bp, Zea mays
  Clone ID: MRT4577_114587C.1
cccacgcgtccgatagcattcaatcttcatgctgttttcaaagaagtatgcaccatcagttttctaatactctttccgttccaggttctaggttactttagctttgctctaagtcaaactctaactttggccaagtttttagaaaaatatgtcaacttctacaaattaaaataaatgcactaacaagacatgttatggagaattcatgtgatgttattgttggtgtatttttctataagtttgttcaaagttagagaaattggacttaggtaaagaaagcgacttgtaattagtaacagagggagtatcaaacatct

SEQ ID NO: 15996 - DNA, 600 bp, Zea mays
  Clone ID: MRT4577_114588C.1
cttccccccccccttcctctactcccgctccttttgcgcatcttacatgccgccggcgcggcctccgcctcccgattcctgacgtccgagcgcggcacggcggcagtcgcgggagccccaaactcgagcgcggcgacccaagcgctggcctctaccctttctccttcgactcgttttcccggctggcctgctaccgcggatccggcctcaaggcgggtgcaaaacatcgccgcccctgcccccgcttcgttgtcttccctgacgaccctccccacacggccacaccgtctactgctgctgctgaccaccgtacacgcggggaagaatcagactgccaaacgatgcactccactgaattaaaagacaaaggttgggccggtccactaacagtctaccactcataggcaggacaacggtatggcacatccgaggccgtggttttcctaagcccattcctcgttcaacagcaggcgagcagattcggcatgcatggtcttcgatgcccgctgcgggaggggccgaattgcgtcatactgcacttaccgttctgtcgcctccacgctcctccctgccatgcctgtgtactgcctggggacggcc

SEQ ID NO: 15997 - DNA, 460 bp, Zea mays
  unsure (1)..(460): unsure at all n locations
  Clone ID: MRT4577_114589C.1
ttaaatttaggagtacacccttatgtatggccttgtnttgacaatgcttatttatgatatattgaatgggaccttatttataataacaaaaaaaaaaaaaaaaaaaaaaaaaaaaaaaaaaaaaaaaaaaaaaaaaaaaaaaaaaaaaaggggaaaacacaaaccggggaccagccgaccagaaagggggcggccaaaggacgagaccccacccaaagagagacccccacaaaagacagcccgcgcgcggggggtccccgggcgggggggggggcccccccggggggcccccccccctcccccccgccccccaaaacccgcacgcggcccggaagggggcccccccccacaagaggcccccgcgcgcgcggccccccccccccgggccggggagccccaacgcggggggcgcccgcccccgcgnggggggcggcccccccccccgcggcgcggggggggg

SEQ ID NO: 15998 - DNA, 213 bp, Zea mays
  Clone ID: MRT4577_11458C.1
cggaccgacccacgctttttttttttttcttctcgacttccgttttgagttttgaacaaacacactgccagtcagggaaggtgtataattttactgctccttccaccaccacccacacctatccaaatggctgatgactttgacaaccaccaacgtattaatatttatcgccgcctttgacatttccaacctcgtatcaactaccacctactt

SEQ ID NO: 15999 - DNA, 605 bp, Zea mays
  Clone ID: MRT4577_114590C.1
ccggccgggctgaacgagcatgcctgaccccgtgcacttgccaactaaccataccattaccaccagccgctgcagaagttcgcgcaccgtcgtcgcgcgtccaccgggaagcgggtgtggctgggctcgctcctcgttagggttcgtcgtgatcgctacagaatcgggtgtggccggatcggagtctcgacgtggatctcctcagcgagtagtggttgaagtctgctcggtctaccgcttgtccaggggtgagtttttccctacctgttgattgtagccatgtaggctaggagcagtggtgtccaggcggtagttagggctcgaatggtgagctcggtgcagctcgttgccgcgtctgtggagctcgtccacgatggaataactgaggaaagaaatagaagagagagggaggatcgggaggttgaagatgatggcagggccgtagattgtaaagccaatggtgcagattaagtcaaggcgcgcagtgttgaccggtgtaggggaagagtgcctgcggcgtgcgggccgtcgactctgtgatgtagggccccggattagatgatgacataaagtttcgccgggtggtttgtgaccgttgatctgat

SEQ ID NO: 16000 - DNA, 567 bp, Zea mays
  Clone ID: MRT4577_114591C.1
attgggtacctcgaggccggccgggaaaaaggggttcacaaacccctggcgtgcacggggctttcacggttcgcggtccagacgaccgtcttgttggccgagttggcgtaccatatcgagaaggtgaaggcattgtgatagatgctgtggaaaccgctggagaaagtaccttccggcgatcgcagaacgtctgtctggtgctcctcgacagagagcgaggatcccagcggtagagtgtcgcgaggcgcggcgctcgagtggaggggaagcagtgatggaaatagcaggatcatgaagaagcttgccatgactgaagtctgaacagatggttggcctggtgaggggactgctgcctcgaggtctcatgtgaccaagctgtacttctccattctcctctatgctatgggtgtgtccttaggcatgaaggacgcgtctgtgttcaacatatgacacttctccgttctcctctatggttgtctccttatgtaaccaaggacactaatccatccaggattactgtataccaagttactcctcatgcttaaaaaaaaaaaaaaaaaagcggcc

SEQ ID NO: 16001 - DNA, 544 bp, Zea mays
  Clone ID: MRT4577_114592C.1
ggttccatctatgtggtaagaaaagctacaaaccacataaacaataaaacaacactactaaaatttgaatagacaagattgtccgtttgtcactaacaaatttaccatgtcaataggaatagcatgagaaagaagaaggatgtggatacattacatgtttgtggaaggagtttacccatttagatactctgtggcgacagggatggtgggaagttggtatatacgtaggcacgcataatgtggtggttcaattcgcacaccctctcaagctgcaaagtcttggtgtccatggaaaaacattccaagtcttctatcactgccgatgagcttacatgcacccctgctaagcttaggtgttcaggaaaccttagcaggagcgtgtacctctccatcgcacccctgatgtaataccgaaatccaggatccagcggaattatcttctccacctgccactggttggaattggaaccgtcggcatcgtctcgccttacagtataatggaggctaaccggacgcgtgggcgggtggtcggggagcgccaaca

SEQ ID NO: 16002 - DNA, 891 bp, Zea mays
  Clone ID: MRT4577_114593C.1
atgaataaatccatgaagtgggctgtcatcaagcgctctggtggcgcactagacagtgaacaatggatgtacggtgggacatcggacagtctacgcagagaggcccgcaactacgcgctctcgggctgtaacaccggattgtccggtgtgcaccggatagtctgggtaacggtcgactcctacagaccccaacggtcggctgccgtggccagggcatcggatgaacagtggatgtctagtgtacactggactgtccggtgcttaatgcaaagcttacagggttcaacacaagtgaacaagtgtgatggtccaaagactggaatatctatagataatggacatcacaatggagacgaaagtgacgatgaggaggaacatgatgatagcaaggatgaatctacatcatcacaaggtacattttcccatattgcttccactaataatgatgacatgcaaagaaataataatgatgtattatatgatgttgctcaacttaaaactgaaaactccatgcttaagagtcaagtagaaatgataaacttagaaaaacttgctctaagtgaaaaatatgatatggtgtcttactctcagaatgaattagttgatgatcatatcatgtttgacattgctcataagaagcttgagaaaagagaaaccataacaagcgtcaaactccatgagaaagaagttcctagagcaataagtgaagcaatcaacatgaacaaggaaaaagggtcaaaaagaaaactgcttgggaacaagaaaagaagacgattgaggagaagacgacatgctcgatttcctcaagatatccaagaacacgtggtgaagaagcttgagaaaagagaaaccgcagcaaacatcaaactccatgagaaagaagttccttaa

SEQ ID NO: 16003 - DNA, 543 bp, Zea mays
  Clone ID: MRT4577_114594C.1
ggccgcttttttttttttttttttaataagtacgaacatattgtccttatacttcattaaggatgtatttggtttaagatcaaagtaggataaggcggggacaacaccatcccctcgattttttaggaccacaccgccaccaaaaattgctccggtgttcactctcccccgcgtgactctcatccaaacaatatagaaaatatgactatctcctttcatccctccttatacatccaactaaacacaccacaagttgatctttccaccgccaccctaacataaatgttttgtgtagtgtatgttacaattatcttgatttccttgttttgtcgactccttggtgatcgatgtgcctaactggctcgaagggacgcgcagctcgcatgtaattccggcgattgcacgtctttacaaaataggataattatatcatggtctcaaatttgtcgagcttcttcactctttgcatagatctgaccagcaatgccaaaaatattcctgcaccaatgaaagagccgtttgcaattatctggttcccttgac

SEQ ID NO: 16004 - DNA, 1394 bp, Zea mays
  Clone ID: MRT4577_114595C.1
ccggggatcctcatcctggaaatcttgctgtagacaaggatggttcctctaatatattacgattttggaatgatgggtgagataaaacagttcactcgggagagattactctccctgttttattctgtgtatgagaaggatgcaaacaaggttatgaaagctctaattgatatggaagctctccagccaacaggagatctctcaccggttaggaggtccatacaatttttcttggataatctgttgagccagacaccggatcagcaacagactctggctgcaattggagaggacttatttgctatagcacaagatcaaccttttcggtttccatccacatttacatttgttataagggcattctctactcttgaaggaattggatacatattagatccagaattttcgtttgtcaaagttgcagcaccatatgctcaagaactgttagacttgaaacagagacgacaaactggacctcaattggtccaggaaataaggaagcaagcaaatgatgctcgtgattctacaatatcaatgccgtacagaatacagagaattgaagattttgtaggacaacttgagacaggagatctgaaacttagggtcagagtactggagtcagaacgtgctgcacgtaaagctactgttcttcagatggccaccatgtatacagccttgggtggtactctcttgaatgttggggtcacactgaatagtcaagggaaccagataattgcaaacggctctttcattggtgcaggaatatttttggcattgctggtcagatctatgcaaagagtgaagaaactcgacaaatttgagaccatgatataattatcttattttgtaaagacgtgcaatcgccggaattacatgcgagctgcgcgtcccttcgaggttgatagcctatgcatggtgtatatagtaaatgatattctttctggaaacaacctaacgtgttgctcttgtaaatttttacaaactatatcattctttagccagttaggcacatcgatcaccaaggagtcgacaaaacaaggaaatcaagataattgtaacatacactacacaaaacatttatgttagggtggcggtggaaagatcaacttgtggtgtgtttagttggatgtataaggagggatgaaagaagatagtcatattttctatattgtttggatgagagtcacgcgggggagagtgaacaccggagcaattttggtggcggggtggtcccaaaaaatcgaggggatggtgttgtccccgccttatcctactttgatcttaaaccaaatacatccttaattaagtataaggccaatatgttcacttttcaactaaaacatttggcacccttttaggctccatctaatgattcgaggataaaattcatatcc

SEQ ID NO: 16005 - DNA, 359 bp, Zea mays
  Clone ID: MRT4577_114596C.1
cttgaggggggaccaaatggagctcctggccacctcgggcacattgtctattcggatgggcttgggagcccacaccttggcgctgccgctgccatgggcactggcgttcctcttcctcccgtcgtcgccgtcccggtcccgcgggtgcttgcccaggcccagccccagggcgtgggagtcaaagtcagcggccccggatgatgatgagactgaaggagtaccgatggtggtggtggtgggcggcggcggcgacgacgacgacgagaggccctgcccctgcgaccgcgacgacgggggctgcggctgcaccggccatggcaggctccaagccccgggaaccatgcagccccagtaccccg

SEQ ID NO: 16006 - DNA, 570 bp, Zea mays
  Clone ID: MRT4577_114597C.1
gggtacccgcggccctctctcgagttttttttttttttttttttttttttttttttttttttttttttattttttttggggagcattttatttattcttgccattctgcattatatttattacaaaagcaacaaacatcgggcccatctctcgttgaaggccagggccgaggccagaagagagcaatttttattaagaagggaaggaggatagccgtacaaagttaaaaaataaggaggacacctgtgtcccgacgcgcccatcatatatgtcaacgaagcgcggccaggcgactgatttactccgctgcccggaccgtaggtagctttcccgacaccggggaaaatgaggctggcgccgaccacctccttgccgaccccggctatgaaggccccttagaagccgaagagctcgcctaggaggagcctgccgcccacctccacgaaggtttttccgacgcactgcctgatgacgacgctgacgttctagcctctctaggccgcgggacacgtacaggttctgcttgaggttgctgccctcctcgccgggggaaggggaacagagaccaag

SEQ ID NO: 16007 - DNA, 465 bp, Zea mays
  Clone ID: MRT4577_114598C.1
aaaaaatcctctacatcacccaccccatctttctattcacccgcctacttcctctctccggctgggatctatacaataggggggcgggatttacttccaccattcctatcccctctacccctactactcttaccacccctcacataacaacccacaattaccattccccttctatcatatcttaaccaaacctattcaacttccagtttagttttttaaaccctcaactttccataaatctgttattctatttcactttctaatatttttatctcttcctcaattatgctctctctcttattcaactttcatttcctaattcttttttacctatattaatactatattatgttgtaaaataacattaatcaactcttttaaccccccactttatctttattatttcacccaactttttattattttttaattaacatttaatcctttcttcttcatatttacatt

SEQ ID NO: 16008 - DNA, 1475 bp, Zea mays
  Clone ID: MRT4577_114599C.1
aaaactcgcacccccactgcacgaaccgcagcctcactcctgctcacccaccggcaccgcatcctcgccgcccggaccctctctgtctctgtctccgccgcggcgggctcctcctccatccccgtcaagatgactgcgcggtcggcgctggacgaggtcaccgacacgggcgccttcgaccggtcgccgtccaccttccggagctccgtttccagggacgggcggttccccgccgtggcggggcggtaccacctctacgtctcgtacgcgtgcccctgggcgtcccggtgcctcgccttcctcaagctcaagggcctcgaccacgccatcggcgtcacggccgtgaagcctatcttcgagcggaccaaggagagcgacgagcatctgggctgggtgttccccgccgccgccgacgaggagcccggcgccgagcccgaccctctcaacggcgcccggagcgtgagggagctatacgagatcgccagctccaactacgccgggaagccaaccgtccccgtgctgtgggacaagcagctgaagacggtggtgaacaacgagagctccgagatcatccggatgctcaacgccgagttcaacggcatcgccaggaaccccgggctggacctctacccggcccacctccgggcctccatcgacgaggccaacgagctggtctacgacgccatcaacaacggcgtctacaagtgcggcttcgccaagaagcaggggccgtacgacgaggccgtgacgagattgtacgaggctctggacagatgcgaggagattcttggcaagcggcgctatatttgtggcgaccagctgactgaggcggacattcgcctgttcgtgactctcattcggttcgatgaggtctacgccgttcacttcaagtgcaacaagaagctgctgagggagtacccaaacctgttcaactacaccaaggacatataccagatccccggcatcagcagcaccgtcaacatggaacacatcaggaagcactactacggaagccatccgtccataaacccatacgggattatccccgctggacccaacatcgactacaatgccccacatgacagggagaggttcagcgcctgactgcgcgtgggaccttgttgcttcctttctctctctctctctctctctcttttctgcaggagccgtgtgcagtgttgttgtgcttcatgagggtcttgtgcttggccgtgtcagaggctgcaagaatccctactgtactttttttcttcttctgagcagttgaagatggaagacaaggttttatttcgcacagataaataaaaggtacaaagggtcgtcgattttataaaaaaaaaaaaaaaaaaacagtagcaccgaacgtggtgttttctttctttccttccttatgacatcccttcaaaccaagttgaacaagatggtgcacagtcgccatatacgcaatataatgctatcgacacactaaatgcttc

SEQ ID NO: 16009 - DNA, 459 bp, Zea mays
  Clone ID: MRT4577_11459C.1
ggaattcccgggtcgacgcacgcgtccggcattttgcacgcgccaaggaattcaatcacctatatctgatctcactgaacgactgggatttgaggatcgtgacccccctgtggttcctctggaatgctcactcgaagcaccatcatttgatgaggttgatgttcaagccctagcgcatgctgttgagttgacaagacaaggtgctgtggatagcttgaagtttgcaaaaggacatttataccaagcttttcagaacgaattgtgccggatgaagctggacctgacacttctggataaacttgtacatgagtattgtgtatacaggggaatagttgaaggcagttcacatgttctttctggaactgctgacttgaaatgtaatcaaaataatgatgttaataatgaaacacagctttattgtgaaatgaccaacaatcagaatggacattgtagcaccag

SEQ ID NO: 16010 - DNA, 180 bp, Zea mays
  Clone ID: MRT4577_1145C.1
ctcaaatgtccatacaacactctaaagtgaatcgtattatactgggacaagtgtcaccatatacagcaacggcatgtccacctatgatgacactcgttctttgcaatacgcacctatcgtattaccatatctcgggccgtgggagtatctctcgctcctgttatggatctaattattcaa

SEQ ID NO: 16011 - DNA, 205 bp, Zea mays
  Clone ID: MRT4577_114600C.1
tttggttgttttttttagagggtgggggggtcttatatttgttatattatttatagaacaaacattttttggaactaaaccatacctgcatttttttcaggcacaaatcctagtgccccagaaatatgtctaaactgggctagtaccatttccaaattaaactatacctactaaaacccgagaatatacaaaccacctctaataa

SEQ ID NO: 16012 - DNA, 707 bp, Zea mays
  unsure (1)..(707): unsure at all n locations
  Clone ID: MRT4577_114601C.1
cgggcattgaacaatcacaggttacgagtataacttaattaaaaaataatgaatccccaaacgacagatgcagaaagcagcaacaacaaacgcgtgaacaaaaggaaacacagtatgttcttatcttgcacattcgtagcagattaaataatgaatatagaaaacagtcagttattgacttggtagatggcctctgctttcagactcttttactccgtatataccactacccacaaatgttgtagaagcacggaaaacccgaagagtgttacctaaccaaaatagactcggcagaagaggtaatgccaacttaaccaaatgtgatggcataaaacgtggttacaattccttcatgaataaataaataaaaattctaattaccttacttcttttgttaaaaaaagactcaatgatgactacaacgacgacttcacagtgtgcctatttcaccaatgagtacatacaatcacttaaaggtaatgtgatatacgaatacctcttttttaagtaggccgtgattatccttattaaaaagaccttgctaacattgtgccattttttctctgcnaaagtgcaaatccttaattcaattaatcctgcgcgaacttttttgggcttattccaacataactttcttttcccgttgggtcatttcatggggaaacctgattacgaagtgctcacattggccatgctttttttttggt

SEQ ID NO: 16013 - DNA, 769 bp, Zea mays
  Clone ID: MRT4577_114602C.1
cgctccactcacctccctcctgcgctccgccgccttgccttctcccctattcctcggcagccgccgcgctccccgcctccgcgctacggctcttcctcgacaccctccgctccgacaacgccggcgccgccatcacctccagctcgcactattacatctcgccccccggctgcctctcctccgcgctcggcgcctccatggcgcccgcccacgcctactcctccccatccaccccgtcctcctcacctcctctgcctccgagctcctgtccagcggccacgacgctcctgcgcaggcatccagcgagcccgaccagccgcctgcccgggccctggcggaacctagaggggccgcgtcaccaggcgcaagccgcgcccgtcgcggtgcccgctgactacctacatcacggtccaccccgccaactccaacgcatggtgcaggagatcaccggcctccctgtccccgggccctcctccttccccgctgcctcagaggctgccgccgtcgcggcgcacaactggacgcccgcgcccgcgtgcgtgttctcgattcttgaccttggacacgttcgctttcggtctacatttatgttgaagtgttttctcaaggccaagcagtatgttgaaacctccgccttcgctctgttttcccttccttccttcaccgatctgtggtcgcgtgaaactaataccgttgatgtgcttgccgtccaactgcccttctaggatgtcacgtactagcatggaacatgcggcaggatacctggaaa

SEQ ID NO: 16014 - DNA, 634 bp, Zea mays
  Clone ID: MRT4577_114603C.1
ctttacaatgcgcacacttaagataccggtaatggtcattaacggtatcgattgtatcagaagggactgtcggcagcagttaaacaatcagaagggactgtcagcagcagttaaaatgcgcacttgaaaccctctggttgcctaggacaaagtgtgctgtcctagaaatagagggggcttgggtgttctcaatttgaagattcagaacacgaccctcttgcttaaatacattcacaaattctatggcagagaagacataccttgggtaaatctaattgggaccactcactaatctggaggcagggtctcccatggctaccctaaaacaggctctttatggtggaaggatgtttccaggctggttgactatttcagaggccatactatgccttgggctggggatggcagacaattctgttgtggcttgatgtttggaacaatatctcccccagattcactttcccttgtctcttctctttcgccaagaaaaaaagaatgctaaattcaagaatttttaaccaacatgggatctagagcacaatttccatactcctttatcttctcagaccgctcaggaatatctttggtttccacaagcttgtgagttaccttcagaactctacagctgttaaag

SEQ ID NO: 16015 - DNA, 402 bp, Zea mays
  Clone ID: MRT4577_114604C.1
ctcgcgggtcgatacaagcctctagagtgagtcgtctgtatccgctcactctcctcgccgacaggacgagatccatcgctaacagaggatcctagcccacccaggccacgtgaccgacggtggtgccggcgatggcaacacgctactggataggctctcgcgacctggaatctcccggcgccaccgggacatcacgtcggtcacgcctacaggatggaatctcccgccagaccttcgacaccccgcagtgccggtgcaacgtcgcgaacgtccgacgtctgcagacgcgagacactccgcgcgcacagcgatgagatcgtcaactcaaacctgttcgtcaacggcttttcgcagatcatgcggaggcacatacatgacctcgatcgcatcggaggcatcgac

SEQ ID NO: 16016 - DNA, 203 bp, Zea mays
  Clone ID: MRT4577_114605C.1
agacgtggcgaccacggtcgcattatcccatcccctatctcatcccctatttcaaactacactctgcaaaccatgccaagtacagtttcgcgtcccctattttacgaaatccgctgaagacagtcttagctctcttttcttgggcacaaacatatctgtccattctcctttttaatgaataaaattttattctactgcctttt

SEQ ID NO: 16017 - DNA, 607 bp, Zea mays
  Clone ID: MRT4577_114606C.1
gtttgggggttttttttttttttttttttttttttttttttttttttttttttttttttttttttttttttaaagttttttatttttaaaaaaagggggggttatgcggggaggaacaagggataaaggggtcaatggcaaaaaaaaagaggggggggaaaaaataaaaaaaaaaaaagagaaaaaaaaaccctaggaaaaaaggaagggaaaaaacaaaggaacaaccccttccggccaaacccacccgaaaaaacttaaactcttgtaaaaaagggaaaggaggaaacattgggctgaaaaaaaagttaccaaaaatgtaattgaaaccaaccaatggcctcgggccccttgcctcccaaaaacctccgaggaaacggaacggccaatccggggggcccctttggaaccattgtggtttcaaaccactttgcggaatgtaacgtgccaaccggggggggggcccggggcgcaattttaaagggggggccttttggaactccccattcaccagggcccggagaccgggcctaaaccttaaaaccgaggggggaaatttttcctggaaattgggagaaaacgaattgaggggaaaagaaaaggggga

SEQ ID NO: 16018 - DNA, 356 bp, Zea mays
  unsure (1)..(356): unsure at all n locations
  Clone ID: MRT4577_114607C.1
aaacccttgaattanaacccccttttttaaaatatttatattgtgtgtttttttaggggtttttccggggttttacccacaaggggcaagtccaaaaaaaaaaaaaggaaaaaaaaaaaaccaaacacaaacacaaaaaaaaacaaaaaaaaccaaaaaaacaaaaaaaatccccaaggggaaaaagcaaacaaaaaacgaccccggaaacgaaccacttattaggacagggacagcacagtccaaaagataagcaaggggcccatcaagaaacccaacccggaggagccaaaaaaaagcatgaaaaagcccaggccaaccaaaccaaaaacttctcgaaaaacaaagaaggcccc

SEQ ID NO: 16019 - DNA, 280 bp, Zea mays
  Clone ID: MRT4577_114608C.1
cccagtacaactgacaggttacggtcacgggattaaagggacgtacatagcgtacgctctagagatagagtcgccggagctctactgagcagttaaactaatgcccaagggagtgcgatacgtgacactcggcggcatcgtagacgtagccgagaacactttgtagtatggctgtagaggatgtccagccccttgtgtatgccgatggaactgggatggtcatggcgggtttcgctggtgacgacgcaccgagtgctgtctttcctagcattgttggcag

SEQ ID NO: 16020 - DNA, 608 bp, Zea mays
  Clone ID: MRT4577_114609C.1
gtccccgcggtggggcgcccgagaccgaccgcgcggtcggcgggagcttcccacacgtaattgcgtctttacaacggcgatctgcacgagacgcgtgccgagcccctcgttacaagaaccatcgtttggtagtaacatcaccttactttggacgaccctctccagttggtgcgttactaccggtggtagtagtgcttccttactatcaaccgtttggctaacagtagctgttcggcctgccagtggtgatagtggtgcttgcatactactctggatcacactgactggttggtccgttcctactagtggtacctgcttactactttgggtaacactagctagtctgactctagttgcaccgagtggtaccaccagtggtggtacttgcgtgcttgtacggccaacactatctctttagctcgtcccgactggtggtagtggtgcttgcttattactttggacaacgttagctggtcagtctatagttgctcccagtggtaccggtggtggtggtggttgcgtaccagcatgggtaaccctacctgtttgggtcgtacctaccagtagtggtacctgcttattactttggacaacgttagcttgttaga

SEQ ID NO: 16021 - DNA, 286 bp, Zea mays
  Clone ID: MRT4577_114610C.1
gggcgccccgtctaagcccaagcccggcgcccgcattatgaccattgtgcgttcaggaacaatagcggcgggattttcttgggcaggagaggagccaattacccccctgttcccattgtattggggagcattcatggaggtgtatctactgcttgatacaatagcaacctgacctcaccgttgttgtattggttacaaaattttcaaacgtgcgccccggttgcttttggacgaagaccatttaacatgcacatcgctgctccggagctcactgggccctggcggg

SEQ ID NO: 16022 - DNA, 468 bp, Zea mays
  Clone ID: MRT4577_114611C.1
tgctcctccagcctccccgacgtccagccgtcctctctccttcccctatctctctccagccccagctggtggagctccctccgtcctgctcgctcatggccgaagccaccttgtcccacgtccggtcgaccggctcagcttctccaagtgccgcgcagagctctgtggtgttcgccccttctccctgccgcgctgagatccccatggcgcgccagccctccacgctgagctgctctcaagctgcgccctgccgagatctccttcctgcgcgcgcgtccttcgagctcgcccgctgctcaaccttcctctctgcgcactgctctttggccgcgcgcagtttcttcctggcgtgtgcgtgaacttgtccctgcgcgccatgctcctccccgacttcttcccctgcgttcctgtgtcgcgccctggagctcgcccagcgttcttcctcgctgatgatcggtggtctcttcg

SEQ ID NO: 16023 - DNA, 259 bp, Zea mays
  Clone ID: MRT4577_114612C.1
ccagacgtacgctgccgtgtcatctttatcagtccagacagcttctctgaagatttaaaggcactcagacagggtcgggcaactcctggactcggtccacagacaacacgtgtactatatcacgtgcccgcgttcctagtcctgtcatcagacacatgaaactgaactcaggcttactactattctactattgtggattgagtgagcttggctggcttaaatccaatcaaatcaaactttttataaatatatcttaatc

SEQ ID NO: 16024 - DNA, 223 bp, Zea mays
  unsure (1)..(223): unsure at all n locations
  Clone ID: MRT4577_114613C.1
ctctttctaatcaggaacaggcgcgggtggttattaacagtagtgtangagagacaaccantcaaatcgatacaagaagaaatgcgtgaatgaggcacaatttagttgcaaaaggcacgatgaacatggcgtctcgacccaccgcaacatgtgcgtggcacgcagtatgcggtactagcacagtacttggctggtaccaaaacgttggacgggaaccgagtca

SEQ ID NO: 16025 - DNA, 459 bp, Zea mays
  Clone ID: MRT4577_114614C.1
ctttagaactcgatcttaattctcatcaactcacttcccagctgtcggaaaatttgtggacaaactcccaggactcgccgtttattgttgctcccaaccaccagaaaaggaagcacgtcacccatccttttttcacgttactatcggcaccgcccatccaacatgtcgggcaccgcgcacgactccagactactgtacaaggtgaataatattcgagccttccatatccaagatggcgaggagcaagagttgacgccttcgggccctcaaattctctcgctgttgatggttcccaccgctgcgccggcaaacgcctccgctggtggcacgcagaccccagaggaggatttctacttgcatctctctattcctcccgagctggaccttgccatcccagctaccacccagatcttccaccaaccacccgatagctacctcattcctcgctgggacgtgggt

SEQ ID NO: 16026 - DNA, 275 bp, Zea mays
  Clone ID: MRT4577_114615C.1
ctggggagatatgagagacatccgggtgtattactcactgaggacatggatgccacaactcaaacccgggctggcccaacagaccgctattttgccgtggccggctgaccatttgcaccacaagagtgacggcgcgaggtggtacacttaatccccttttgagaaaaccctacatagggacccaggcctcttcatgacggagaccgcattttgtgggaatcagcatcaacagtttgaccacccactcatacctgatgacttgtatgaacagacac

SEQ ID NO: 16027 - DNA, 627 bp, Zea mays
  Clone ID: MRT4577_114616C.1
tagttctctctccagaaacgacgcgtcgactctccctccctctcctcctcccccctctctagcaatcggcgagcgatggcgtgggcgacacggttcctgtcagcagtgtgcttcttcgcggcgggcgtcctcttcgccccagatgtcttcatcggcgaccgctccggctccggcgccaccgccgtcacggccgccaaggtgtcccacctcctctgcttcgccacctgctggggcgctgcgctctgggctaccttcatcggtggaatcatcatgttcaagaatctgccgaggcaccagttcgggaacctgcaggggaagatgttcccggcctacttcacgctcatctccgcctgcgccgccgtctccgtcgctgccttcgcctacctccacccgtggaaggccgcctccgccgtcgagcgctaccagcttggcttcctcatctccgcgctcggcttcaacctctccaacctgctggtcttcacccccatgaccattgagatgatgaagaagaggcacaagatcgagagagagcttagcatcggtgacgaggtcgggtggtcgaagaacgtcaggacggcaaaaagcaaccctaccctcgctgcgatgaacaagaagtttgggatgatc

SEQ ID NO: 16028 - DNA, 253 bp, Zea mays
  unsure (1)..(253): unsure at all n locations
  Clone ID: MRT4577_114617C.1
cgggggacggcacgcgtccgatttccttctttagccgcctcctccgatccccttccgaggctacagaaccagttcatccgancgctaatggcggcggcgaggagcctgcttctgaggcacctccgcttgtcggcggccccttcagcggcgtccgtgaggccgtcggcgtctatgcatgaggccctgtgtgggcagcggtggatgtcttctgaggattccaatggctctttcctgtacaagagcgatgtcactg

SEQ ID NO: 16029 - DNA, 1019 bp, Zea mays
  Clone ID: MRT4577_114618C.1
tcgggagacagcggctgcccaaccatataactgtaggggagactaggagagcaggagtacattacaaccgcgcgcggagcacgcggtgacagaagagagacgacggtcgacggagagctgccatggccgcaggagccgcgttgtactactaccacccaggcgccgggaaggtgagcctcgaggcggtcgccccgtcctctccgtcgctggccctgaggccatcgcagagcaaggtgctgtgcgtcagcagcagccggtggtggatgaggcgaagatgggaggggaaggcgagcagcgtcagcagcagggcaagggcaagcgcaaggcctgccttgttctcccctgtggccatggactggcaggagtgcactaccgagcttgaagttgatgttccatgctcggtggcctatcagtgttactcagaacgggagagtattcctcagtggatgccattcatctcgtctgtcaagatccttgaagataaacctgatctttcacggtggactctgaagtacgaggtgcttgggcgggatgtagaattttcttggcttgcacgtaacatgacacctattaaaaaccagaagatccattggcgatctcttgaaggtcttgctaatagaggtgctgtccggttcttccccaaaagctcatcctcctgtagagtacaactgacggtggcatatgaagttcctgaaattttggccccagttgcatcagcactgaaaccgtttctggaaagcttgcttctcaaaggtttagagcgctttgccacatttgccaaggagcgtaatagcaagatacctcaggcttaacagcgccattactagttccattctagtgaagccacatcacaatgcatgtaaagaatgatgtcattatggatgtgcccaaataatgtacccaaagagaagtgaatacaaatctgtcaaaagttggaagtaagcttcttgctgtatgtcattgtagtgttataacgccattataaatcttgaatataattattggtagcatcacatgcc

SEQ ID NO: 16030 - DNA, 259 bp, Zea mays
  Clone ID: MRT4577_114619C.1
cgactccagggacctactcctgaagggcctctacaacaatggcgaaaccagctgctcggccgaagcaatgttccaggtcatgaacgacgaggtggtcttcatcaatgagtactaccactccgttgtccccgtcgtccttgcgagccccttcttcctcgtcctaaactacttcctcctcaacatcgtcgtagccatcctgtgcgtcatgaccgtcatcctctgcgccaacggtgacgtcccctacgcgttccagagcata

SEQ ID NO: 16031 - DNA, 505 bp, Zea mays
  Clone ID: MRT4577_114620C.1
atttgtgtttgttgttgccgccgctgcttctcccgttgccaagcctccatccaattggatagtcgcttcgtgcggtcccgtcccctcgccggccggcggagctcacggcttgccgctgcattgccatcgtgtcacttgtacacaatccaccaatctgattggattcggggggatgcttgggcaaattcgagaatttgctcaggcattcgttccgattgcggctagctagctgatcgcttaatcactcgacacgggcaaatttgcacggcgacgacgatgggcatcttgtgttgtttccagtcccacaccagcgatcacgctgttgcttcgtccccggctacctcttcgtcctctgccccctcgtcgtgccgaaacaacgatcgccgtgctccccccgagcggcaggcccccggcgaggagaagagcaggaggaggaacgacagcgtcgacaacagcaacctggtcgacctcgtcaacgacatcgtcgccgagtcagtgagctacc

SEQ ID NO: 16032 - DNA, 609 bp, Zea mays
  Clone ID: MRT4577_114621C.1
cggtcaagaattcccgggccgacccacgcgttcagcccacgcgtccgaggataccagcagcgacgaagaccccgctagcttcgtcccgccgattccagtggccagcagcatctccagcgagactactgcggtgttagggcagggacgaccgctaccggtcgccgtggtgatcgatgtcatcacccagcaggaggaagaggcgcggaggcaggaggcactggagctgcagcagatagggacccagcggcgagccatgcggcggtcgcggtcggggcgcaagccggttccgacgcagctcgcccggtcgcactctacgggccactccctcgccgtccggctggaccgcgacctggagcgcttcacgctgcggctgccggagcacgtgcgtagggagatggtcgccgccgcgggcgagcacagccacagcatgcagttgcgtcgcgggcgaagagccggggaaggaagcagccgcggcggacgaagcgccccgctcggccggacgcccagatggcagtcgcttctcgcgaggacgctctccgggaagctgtccttcttttcggcgtccagggtaacggtaagctccgaactgggagaagtgtcgtcctggtc

SEQ ID NO: 16033 - DNA, 267 bp, Zea mays
  Clone ID: MRT4577_114622C.1
tgcagaaaggcttccagatgctggcggatccccgctccttcgactccaacgccttcacgcttctcctccgggcggcattccagagtctgctggacgcccaggcggacgaggccgtgttagatcatccagactttcaacatatcgacccagttgttttaaaacattgtcatgcagcagctgcaacttacatactagcggcaggaaagcaccgagctgacaagtcaactctaagcacttatctagaagacgtaaatttgacagagagcg

SEQ ID NO: 16034 - DNA, 320 bp, Zea mays
  Clone ID: MRT4577_114623C.1
acaaaatatgatttttgttatcatgggtgttaatagttttttttatattttaacgggtttactggataaacacatatttattaaaaaaacgcactaaaggaattataggattctagttacagcccaattgttatcacaaagcatacccaaaggactccttgtggtgagaacgtcacaaaagctaaaaagatataacgagtttttttgcctttggtctagatattggagaaacacctgaggattaaccctgtggacgccgaccaaagagaaactgcaggaccaacattgcttttttctattgtaccaactttacaactatt

SEQ ID NO: 16035 - DNA, 466 bp, Zea mays
  Clone ID: MRT4577_114624C.1
tattcgaatgcacccgcgtctccaatgtcatctctttcccctcacgaatgactaataatccgcccgcactaatatggttgtttatctcgactctcctatcctgcccaccacctcctgtcagattcattcacctacaactgagctcccagaacgacatcctgtgctgaggtcgaggcaatacgcctcacccaaggtgctgatgatgtatacataggtgacgatccatcctgcgagggagttgagtatgaaagccttgatgtcacactcgtgaaggtgtatgatattgcttacacattccgtctacctgactcccctccttttgacgataaaacgtttgcctcttacatattagaatacatccaaattctcaatgctagcgatgtatacttacaaagctcctgaatccaaaaagggagagctagttcggaaccataatgtctcgcttaataagagtgaacgtagctgt

SEQ ID NO: 16036 - DNA, 407 bp, Zea mays
  Clone ID: MRT4577_114625C.1
gagtaaacattaatttgctttattcttgattgctggatctgcgtgtagtaaagtaatacatacccatcatcatatcgatcaggtcttattgtgttctctaataataatgcatgcatgcatggtgaggtagctagcttattaattagccgttgaagggcgtctggttggcgcagtccaagttgtcgccgtagctgaccccaagcaagtcacagtatcgtttgtagaagccgatccggtcggcgacgcggctgtcagcgccatggccgcactcgaggccgccgttgatgatgttggtgacgacgccgtagcccggcagcctgccggcggccgtgtcagcgaagaaggcggtggccagcatggccaccaccgccagggctctcatcattgtgatctttagagaagctggt

SEQ ID NO: 16037 - DNA, 360 bp, Zea mays
  Clone ID: MRT4577_114626C.1
attcggctcgaggtgcgacagcagtgctaaaaaaaaaaaaaaaggaagggtaaaaaaaaaaattaaaaaaaaaaaaaaaaaaaaaaaaaaaaaaaaaaaaaaaaaaaaaaaaaaaaaaaaaaggggcgcccgcccactaaaaaaaaaaaaaaacccggggctgaattccgacatggaacctgtagcccccgaaattaatcctaaaccgagccttgtgagcgccccgctttaccattaacaaagccgaataaaaattgaaaacaataatggctaacatttccccccgtcaaaaatgctctgaagcttaaaattcaaaacacaatgcgccccataagctaaataactaaaatttgtggggct

SEQ ID NO: 16038 - DNA, 854 bp, Zea mays
  unsure (1)..(854): unsure at all n locations
  Clone ID: MRT4577_114627C.1
gggaccctcgaggccggccgggacacaccatccaaactaaacaacaccagcttctctaaagatcacaatgatgagagccctggcggtggtggccatgctggccaccgccttcttcgctgtgcccgctcgcgccgagcagtgcgggtcgcaggccggcggcgcgctgtgccccaactgcctgtgctgcagccagttcgggtggtgcggcagcacctccgactactgcggcagcgggtgccagagccagtgcagcggcagctgcggcagcaccccgaacccgccgagcagcggcggcgtggcgtccatcatccccgagtcgctcttcaaccagatgctgctgcaccgcaacgacgcggcgtgccccgccaacggcttctacacctacgcgggcttcatcgcggcggccaacgcgttcccgggcttcggcaccacgggtgcgcccgacgtgcagaagcgcgagctggcggcgttcttggcgcagacgtcccacgagacgacgggcgggtgggcgacggcgcccgacgggccctacgcctggggctactgcttcaaggaggagcagggcggcgcgacggggccggactactgcgccggcatcctcgccaacccggacctggtggccaccgaccccaccgtgtcgtncgagaccgccgntctgggttctggattgacgccgcagtcgcccaagccgtcgtgccacgacgtcatggacggggcagtggacgccctccgccgctgacacggccgncggcaggctgccgggnctacggcgtcgtcaccaacatcatcaaacggcggcctcgagtgcgggccatggcgctgacaggcgcgtcgcccgaccggatcggcttcta

SEQ ID NO: 16039 - DNA, 643 bp, Zea mays
  Clone ID: MRT4577_114628C.1
gccagatatgtaccgtgccaatgctattagagttctttgtagaataattgatggtaccctactaactcaaattgagagatatttgaagcaagctattgttgacaagaacccagtggttgctagtgcttctcttgttagtggcatccacctggcccaggcaaacccagaaattgtgaaaagatggagcaacgaagttcaggaagctgtgcaatcaagagctccacttgtccagtttcatggccttgctcttcttcaccagattagacagaatgatcgtttagctgtaagcaaactagtttcaagtttgacaaggggatctgtccgttctcctcttgcacaatgtcttctgattcgttacacaagccagacataaagcagaaatggtggctttggaagctgcacggaagataacagagatggatgttacaagccgtgaattggcaccagcaattactttgttacagttatacttgagttcatccaagcctgtgcttcgatttgctgctgtccggactctcaataaggttgctaggacacgacctctggcggtgacaaactgcaatgtggacttggagagtttgttgtcagaccagaacaggagtatagcgaccctggcatcactactcttcttaaaactggcatg

SEQ ID NO: 16040 - DNA, 380 bp, Zea mays
  Clone ID: MRT4577_114629C.1
cggtcgttttttttttttttttttttttttttttccaaactttgcaacaccatagttagaactttatggccaaccaccaccaaacggggccaaaaaaaaataaggttcaaccctttaaacggattgctgggaaaatttcatatctgggcgataaaacgaacaagaccgtttgcccccccattgctctgggccgcggactatacacatcaagggtgcaggggtaaatgcttcccaaagattctacgtgcaaaggaaggaagccttcatggcctgcaagatgcttgcggtgtaaaacctcaagtttttaaagctgtaaccagggcggccggaagagtgcttgaactaaaattctcgtttaaaaacaaggattttccactggg

SEQ ID NO: 16041 - DNA, 360 bp, Zea mays
  Clone ID: MRT4577_11462C.1
cgccccaccgaacatatcgggaacgggtccctcacaaagcgacaccagaagctcaaccaagagcggcggcaaacgaggctccaataccatacaaccacaggtgggcgccctgagcctggagcacaccaagaagggacaccgcaaagacaagcccgacacccacatttggtgctgcccaccaacaccatggtgaccgcggagcatgcccctaacaccgtgcaaataatgctcgacaacaagggccaaacgccccacgacccaaaataatatataagcgagacgaccctgccttgtccatgccccagaccttcaaaaaaatatatataccggggctgaagtaatcgattgttctcttcaaat

SEQ ID NO: 16042 - DNA, 3098 bp, Zea mays
  Clone ID: MRT4577_114630C.1
atcgtaacggatcggaaataaggtagatagattccacgagttttcctctcaagaaaggtgggattcagttcagcacaaatcaaaaggaaaccacggaggctacagtacattccaattcccaatattccatgaaatcagtacttgaataaacatcagataatacctgatgttatttgtacagcaaaaaaatttatagaatatgctaactgataatctgagatgtccacgaagagacaaggctgtaagcatcgaagtataaaggctatctacccgctctacacttttggcagaagatttgtatgtcttgcactttatccgctggcgacaatctcatgaatcttatcactgacttcagggtcatctgatctcacagctaatttcattgccacttcgttgggcccgctcagtccaaatgacaacctaactaggaccttcatgttgccaataaatacaccagatagaaggcaggtgtgcgatcttgcatttttcggtacaacctcagtgccctcacacggctgcattccaaggatattaatgacagcattgacagcctcagccaaactttctctaaccccgagtccatactcatcgacacgctcactatctgggtccatattttcccaggcgttcctgaagttggagacaacaaccctcagcatataatcagctgaaacaatttcaaagttctctaactggtattcatcctccacaccatcctcatcagcttcccccgtagttgtgtcaacctctttaactgtaaacttcaacaaatttaaaaacttcccaacaacaggtacacgctctggcttttcaaaagcaacaaaaacttgcccaggtgaattatacggcaagcttgcaagaggctttgaacaaatctctgaaaactcctcagcatctgaggcatcaacgcaaacagtgacatcttctagcagttgttcttctatagtgtttgcacaattgtactgcaatacaatgtagccgtcataaatgtgtttaaccacactaacagcatattcagtttctgcctctgtcagctccatgggttcagaggacttgaagagccttccaaacccagagaactcgggaatgaacgaaagcattttctgataagcatcaacagttgaaacaggggcggcggcggcggcagcaccagcaggtggcctcttgccaggggctgccttctctttaggtggtagcgacctgacttctcttgacaccaaagatatgtcaaatggctcctctgaaggttcataagttcttaggcttgcttccaggttggctaatggcacatcaaaagatccaaataggaagtctttcacatccttctcatcattaccaatggcaacttcaccgctaagggtttggagatagagtgtagcacgatcacgaacctcatcttcagtatcaaacaggcatcgttgcaagagaacaaagatctgaggcttgagcgtatcaaccagggcaccaaactttgccagcgtgctgacagcactagcacgaacagtggcattttccaatatcacacggttgtatatgtagcgaatgtacctgcttggatctgatgtccttggtccttcatttcccaaaaagtgcaaaatctgactagaaagatatgtgaattcacagtcttcgatgaattcacaaagatgaagcaggccaatttctttggcatctggtatttcactgaccaaagtaactatggaatccactatggcttttttatactcaaagcccccttcttccctcaagctgttgctcaaaaaattcaacattgagcgatattttagtgggaacttcaggcacaaagaccgtatagcttcaacaacaactatcttgaattcatctgctatgtcagacatgaaaagggtaatttgtttaatgagacgatccacacttgattcattgccagttttaagaagagtagtgattgccagggtcgctatactcctgttctggtctgacaacaaactctccaagtccacattgcagtttgtcaccgccagaggtcgtgtcctagcaaccttattgagagtccggacagcagcaaatcgaagcacaggcttggatgaactcaagtataactgtaacaaagtaattgctggtgccaattcacggcttgtaacatccatctctgttatcttccgtgcagcttccaaagccaccatttctgctttatgtctgagggatgattccagaaaatcaaaaaatggacggtcaccattttgagtgttcatgcttgactcacacataacctggcttgtgtaacgaatcagaagacattgtgcaagaggagaacggacagatccccttgtcaaacttgaaactagtttgcttacagctaaacgatcattctgtctaatctggtgaagaagagcaaggccatgaaactggacaagtggagctcttgattgcacagcttcctgaacttcgttgctccatcttttcacaatttctgggtttgcctgggccaggtggatgccactaacaagagaagcactagcaaccactgggttcttgtcaacaatagcttgcttcaaatatctctcaatttgagttagtagggtaccatcaattattctacaaagaactctaatagcattggcacggtacatatctgtcttgctattcatgtccttcatcaatgagcttgtgactatgatgacctcatctgacgatggagaaagttctttgatcattaagtacactagcctcctaagaccagcatcactagactggaataactttgttactgcaaagaagacttccgtggcctcaaccttggtgaatgtctctccttgattaagtaaatataatagcttgatgatgacttgcgaacatcgtctcacatcaagctgtggatcatggaaagctcgtgcctcctgcagaacagaccccttctcgatcccaaagaatggtgaatactcgacatcttcgtcgtcgtcgtccttcttcatgtacggatgcgccatctccggtacggcgaggtcgccgacgacgagtgagcgaggcatgcgacacagccgacgtatacactggggtgctggtgggtggcgatgtgcagtgtgcttggctgggaaagggtagggccgtagggcaat

SEQ ID NO: 16043 - DNA, 774 bp, Zea mays
  Clone ID: MRT4577_114631C.1
acgactcactatacacccaccctgctcgttccttgacttatcgttcaatggacggagtgcaaggaggcgattccatggcgccggcgcggagccgcctggaaatcactccggcggacggcgatagatccaactccgccgccggcaatccaatcttctcaggcagtccggtaatgaagggggcgctcgagaatcccggaagatgcgcatatccgagatgcgacggcagaccccaatgtgcacaccggattaataacgcctccggctacattgaggggcgctaattcatgtgcttacggccctgtttgtaatccacatgtacctgctcctgattctgaaaacctcatagttgtgcctggatggaagaacagtttgttccatgctgcaacaggcaagtgctcggcgcatatattgaacatgtgcaatccgttgtggccagagagaataagcccgtgggtgcgccaatctttgtaaccagagaacaactgggagtatgaagtcatgatcgatcatggggctattcggaccaggattctgggacctgggctggcagaggtttcttgacgagtacgcagtgcggcctggtgacatggtgtatatatgccttactcgcggtgatggaagatttttcgtggaagttgagatgggtggcataaggcaaaccccacttccttatatcgctctgaatggcttatcccttgtgcatcgcgagctcgtcgaccagtgtgtgtacactagggggatacggttggaaattccagagatgagaaagatgat

SEQ ID NO: 16044 - DNA, 639 bp, Zea mays
  Clone ID: MRT4577_114632C.1
aaacattaatttgctttattcttgattgctggatctgcgtgtagtaaagtaatacatacccatcatcatatcgatcaggtcttattgtgttctctaataataatgcatgcatgcatggtgaggtagctagcttattaattagccgttgaagggcgtctggttggcgcagtccaagttgtcgccgtagctgaccccaagcaagtcacagtatcgtttgtagaagccgatccggtcggcgacgcggctgtcagcgccatgggttgcttgcactcttcatcacaacggcgacggcctcactcccatgccaatgctgctggctggtgcagcatccgaaggtgacatgcggccacgcctgctgcggcgacaactgttgcccgcccacgccaccaccgtccacccgctgaattcgagatagatcataaatacagtctcatgatgatacataataaactccgccggaaagttggtatagtatcccgccacttttctgtgagcatatgatatatatgctgcagcatgcctgacaataaaacatttctttggttccatcaggtgctacaacaaaaggagaatttaccatagctttaatatagtatattatctcagttctcgaaaaaaaaaaaaaaaaaacccgcggcc

SEQ ID NO: 16045 - DNA, 3648 bp, Zea mays
  unsure (1)..(3648): unsure at all n locations
  Clone ID: MRT4577_114633C.1
attatttgtttttttttttccaattcccaatattccatgaaatcagtacttgaataaacatcagataatacctgatgttatttgtacagcaaaaaaatttatagaatatgctaactgataatctgagatgtccacgaagagacaaggctgtaagcatcgaagtataaaggctatctacccgctctacacttttggcagaagatttgtatgtcttgcactttatccgctggcgacaatctcatgaatcttatcactgacttcagggtcatctgatctcacagctaatttcattgccacttcgttgggcccgctcagtccaaatgacaacctaactaggaccttcatgttgccaataaatacaccagatagaaggcaggtgtgcgatcttgcannnnncggtacaacctcagtgccctcacacggctgcattccaaggatattaatgacagcattgacagcctcagccaaactttctctaaccccgagtccatactcatcgacacgctcactatctgggtccatattttcccaggcgttcctgaagttggagacaacaaccctcagcatataatcagctgaaacaatttcaaagtcctctaactggtattcatcctccacaccatcctcatcagcttnnnnngtagttgtgtcaacctctttaactgnnnnnnnnnnnnnnnnnnnnnnnttccggcacgaggagagagagagctgacgcattcccgtgctggcgagggacagccggacggggagatccgatccgattccgtgctagctgctgcggagtgagtgaggtgacgcgggagcgggatggcggcgccggggcggaggacggcggacgtgtcctcgtcctcgcccgccccctcgccgtccccttccaccggtaggcgcctcctgcgcacgcagaccgtcggcaacctcggcgagtccatcttcgacagcgaggtcgtgccgtcctcgctcgtcgagatcgcacccatcctccgcgtcgccaacgaggtcgaggccaccaacccgcgcgtcgcctacctctgtcgcttctacgctttcgagaaggctcaccgcctcgacccgacatccagtggccgtggtgttcgtcagtttaagaccgcacttctgcagaggcttgagagggaaaatgatcccacgctcaagggaagggtccaccagagcgatgctcgggagatgcagcgcttctaccgcgaatactacaagaagtacatccaggcactgcagcatgctgctgataaggctgaccgagcactgctcactaaagcgtaccagacagctgctgtcttgtttgaggtcttgagggccgttaatgtctcgcagtccgttgaagtcgatcaagcgattttggatacacacaataaggttgaagaaaagaaaaagttgtacgtaccttagttctctcccccgcccgatcctgaaagtactggtcaagccattatgcgatatccagagattcaagctgctgtttatgctcttcgcaatactagaggtctgccatggccaaaggaccaagacaagaagcctggcgagaagaatactgggaaagaccttctcgattggcttcaggctatgtttgggtttcagaaagacaacgtgtccaaccaaagggaacatttggtactgttgcttgcaaatgttcatataatgaaagtacccaaggttgaccaacaaccgaagttggatgacaaagctctggatgctgtaatgaagaagctgtttaagaattataagaagtggtgcaagtaccttggccgcaaaagcagcttatggttgccaaccatccagcaggaagtgcagcagcgtaagcttctttatatgggcctctacctgctgatttggggtgaggcggctaacttgagattcatgccagagtgtatttgttacatctaccatcatatggcttttgaactctacggcatgctggctggaaatgtgagcccaatgacgggtgaaaatgttaaaccagcatatggtggtgatgaagaagcctttttgattaaagttgtgactccaatatacaaagttatagagaaggaagctgaaaggagcaagaccatgaaatcaaagcactcccattggagaaactatgatgatctgaatgagtacttttggtcagttgattgtttccggctaggatggcctatgagagctgatgctgactttttcaaaactccaaaagatgcttatctgaatcttttgaatggagagaacagatctgcaggtaatacccattggatgggaaaagttaattttgtggagatacgttcattttggcacatattccgtagtttcgacagaatgtggatcttcttaatattgtccttacaggccatgataattattgcttggaatggtggaacaccaagtgatatttttgatgctggagtatttaagaaggttttgagcatatttattactgctgcaattttgaagttgggtcaagcaatcctagacctcatatttggttggaaagcaagaagaaacatgtcatttgcagtcaagctgcgatatatcttgaagttaatatgtgctgctgcatgggttgtgattttacctgtgacttacgcgtacacttgggagaatcctactggacttgcaagaacaataaaaagttggcttggtgatggtcagaatcagccatctttgtacatattggccatagtgatatatatggcaccaaacatagttgcttctatgctatttcttttcccatttatgagaagattcttagagagttcaaatgttaaggtcataacgatcataatgtggtggtctcagccccggttatttgttggcagagggatgcatgaaggtgcattctccctcttcaagtataccatgttctgggttcttcttttagcaacgaagctgactgtaagcttctatattgagatcaaacctctggtacagccaaccatagatataatgagggaacctatcaggactttccagtggcacgaatttttccctcatggaactaacaatattggtgttgttatatcactgtgggctccaataattctagtatatttcatggacacccaaatttggtatgcactgttctcgacattaattggtggtatctatggggcttatcgtcgtcttggtgagatacggacattaggaatgttgagatctcgctttgaatctttgcccgaggccttcaatgaacgcttgattccttctgatgcaaataagagtaaaggtcttcgtgctgccttttcaagtagacccaaggcttctggtgacgaaagacagaaagagaaaagagctgcaaggtttgctcaaatgtggaatgtcattattacaagtttccgtgaagaagacctcatagacaatagggagatggatctgctactggttccatactgtaaagaccatggcgctgacagccgcgtcgccgaccggatcggcttctacaaacgatactgtgacttgcttggggtcagctacggcgacaacttggactgcgccaaccagacgcccttcaacggctaattaataagctagctacctcaccatgcatgcatgcattattattagagaacacaataagacctgatcgatatgatgatgggtatgtattactttactacacgcagatccagcaatcaagaataaagcaaattaatgttt

SEQ ID NO: 16046 - DNA, 1577 bp, Zea mays
  Clone ID: MRT4577_114634C.1
gggtacctcgaggccggccgggacacaccatctctaactaaacaacaccagcttctctaaagatcacaatgatgagagccctggcggtggtggccatgctggccaccgccttcttcgctgtgcccgctcgcgccgagcagtgcgggtcgcaggccggcggcgcgctgtgccccaactgcctgtgctgcagccagttcgggtggtgcggcagcacctccgactactgcggcagcgggtgccagagccagtgcagcggcagctgcggcagcaccccgaacccgccgagcagcggcggcgtggcgtccatcatccccgagtcgctcttcaaccagatgctgctgcaccgcaacgacgcggcgtgccccgccaacggcttctacacctacgcgggcttcatcgcggcggccaacgcgttcccgggcttcggcaccacgggtgcgcccgacgtgcagaagcgcgagctggcggcgttcctggcgcagacgtcccacgagacgacgggcgggtgggcgacggcgcccgacgggccctacgcctggggctactgcttcaaggaggagcagggcggcgcgtcggggccggactactgcgagcccagcgcccagtggccgtgcgccgcggggaagaagtactacggccgcgggcccatccagatctcctacaactacaactacgggcccgccggccaggccatcggcgccggcatcctcgccaacccggacctggtggccaccgaccccaccgtgtcgttcgagaccgccgtctggttctggatgacgccgcagtcgcccaagccgtcgtgccacgacgtcatgacggggcagtggacgccctccgccgctgacacggccgccggcaggctgccgggctacggcgtcgtcaccaacatcatcaacggcggcctcgagtgcggccatggcgctgacagccgcgtcgccgaccggatcggcttctacaaacgatactgtgacttgcttggggtcagctacggcgacaacttggactgcgccaaccagacgcccttcaacggctaattaataagctagctacctcaccatgcatgcatgcattattattagagaacacaataagacctgatcgatatgatgatgggtatgtattactttactacacgcagatccagcaatcaagaataaagcaaattaatgtttacccaaaaaaaaaaaaaaaaaagcggccaaaaaaaaaagcggccttggctctcatcactagactgggttaacgtcgttacggccatgatgtcgtccgcgccccctcccttggtggttggctctccgtggctcggtggtgctttctccctcttcatgtcttccgtgctccggctcactccttgcgctgggtcgtggattgctcgcgcctcctgcgggaccgaccccctcgcgctcccaaccaatggtgtattctcggcaccttcctcgtcgtccccctgcctcgtgttcggcccccccggctccggcacggcggggtcgccggatgacgagtgagcgatccatgccacaagggcgaggcatgcactgcagtgctctttctgcggctcatgctcagagttcttcttg

SEQ ID NO: 16047 - DNA, 1907 bp, Zea mays
  Clone ID: MRT4577_114635C.1
gggtaccctcgggttttccgggccgggactggacctgcttagtaccacatccattaggcccgtttccagtttccaccgtcaacagaggatggctatcgccgccgttcgccggctcttgtggcgcgaggtggggactgcggccgccgccgcggccttggggacggacgggaatctgttcgctcgcctggtctcggagccggagtgccgtgtcaaggcgaccatggaggaggctgcctcctccgggacccaccgcgacggcgccttctgggagccccccgtcaccgcgctcctccgcgcgtcgtctcctaccaaggcgcacctcatattggaatggaaactagagaagctgctgaaggaagacattcaagattgcgagccctactccaggataattcgtttctgtggtcagacaaggaatgcaacgtttgcaatgagagttttcgaatgcgtggaggcgaagggaatccagctgaacactaacatttgcaatgcccttgtcgatgctttcttgtcagccggagacctcctttctgcaatgaccttatacgagactatggaaagcatggacgcttgcagtcccaattccgctacatatgatgcattcatctgtgcattttcgctgcttggaagtggccatgctatgatgagctggtatgtagctgcaaagaacgccgggtttacgccaagtattcaagcttttgaatctttgatcactgggtttgttcggttgaacatgctagacgatgccaaaacggtgtttgaggaaatgattgccttggagattaagccaaactctactattttggaggccagccttgagattctctctagaaaggaggaggccagcagagtaggagactttttaaaacgtgcaagggatgacaattgggagttgaacaaagccacagttgtgaggttgacaagaatatgcctagatggaggggtaatagatgaaatggagcagctgcttgccctaatacaaaagggaacacacttgaattctgaaacacaactgcaccatggaattatcaggttctatgctaatgcagatcgattagcggatatggaggatgcaatttaccggatgttggacaatggtgtgatgtttacgtgcccggaggatgttgatgacgtaatctgttgttattttcgtcacagggaatttgataggttggatctctttttgaatcgcatccgaagtttgttcaagctcaataggtctacatatgacatactggttgctggataccgaaagtttgatttacatgaaagacttgattcaaccatggctgatatgatgagggaagctggatttgcatgagataacaaagaactatctgtgcaccatgactttccacggtaaggccatctccagcggaacgtggatataggcgtgcaaaacactgttttgcactatagagtgcactgtttataaagtgaagtttgaaataggaagtgggataagaagtgttctgagaggctgctggagatagcttaatatttccataaccttaagtgcattgagcctgaaaaatgaaatccagggtgggatattttttataacagttcagttcaaaattgtttgatcagttctgtgtttgacttggaaaatatctcagattaagatacattatcatgtcatggatgcatttgactttgacaagccgtaagcgtgaaattacatggatgctgtgctcaggctgcagaaggtattatttagaaagaactaaagaagatctatgtgatgtttattgtcaacttgaaaaaatctctagtcacttgacttgtcatctagttatgtaccctctgtttttctctagtcacttgacttgttatctagttatgtaccctctgtcccgaaacaaataattttctgaaaattttccagacagtgcttttggttgttc

SEQ ID NO: 16048 - DNA, 573 bp, Zea mays
  unsure (1)..(573): unsure at all n locations
  Clone ID: MRT4577_114636C.1
atacgaaatatagtactagtatccaacagtatatttggttaccagaaaattgtgtaacaagattctcagatgcgaaaagatcgagtatcaacacttggaagattgaacagattatacggacacgtgtaggagtgggccgcgacagctcctctcagctctcatccttcatcgatccagcacgcgctgacgcgccgtacgcccgccatgcctccgctccgctccaagcctccacgcgctcgtggtagggccgtgcgaattccagcgcgcggcacggaaaaagccatgcacagtctcagcatccccaggcagcggacccagccggcagccggtcagagtggtaggccgccactggccacggccagcacgcgccgctgcagagcgcaaatcccgcccatgcgcgcggggagaggaccacgacaccgcgcgcgcgcgcgcagngcagngcaggcgagaccgcgagagccaccccgcccggtgcaataatggagcgtaggcccagcgcgcctcgggcggcgctctcgatcctttgctggntggctggctggctgcctgcctgcttgctcggactgggct

SEQ ID NO: 16049 - DNA, 488 bp, Zea mays
  Clone ID: MRT4577_114637C.1
aaaaaggaaaaaaaaaaacaaaaagcacccgggggaggcaaaaacagacaaaaaaaaagcaatctttttccttcccaaataaacaaaaaccccaaaatacatttatttttggggcccaaaacaaaggacaggggggggcgggtaaaaaggggggcagcgcccaaggtcccggcccaaaccataatccccagcgccccccaaaatacctcctgctccggcccgggcaggtcgacggacccaaggccggggtcggcttcctagctgacccccccttccgccggggccaaaaaacccccccccggcccccgggggcaggacccgcccaacccaccccccccggaaaccctgaaagccatggccttgcccccccctttgtttaccacggggcccccctggggggggcccccaggggggaacttttggggcggcccgacgggcccgaaagaaaaccccgggggggggggggggggggggcccccgggggaccc

SEQ ID NO: 16050 - DNA, 284 bp, Zea mays
  Clone ID: MRT4577_114638C.1
aaaaattaaagaaactggcatcttctagctaaaagataaaatctggtttcttaaaaactgagttggttctaaacatagcctaaatttagctaggatttatagctagaacgttggattgctcctacccctcaacgtgtcggcgcggacggtcggacaaaagacttggtggatagctagtgttgtgcagtcggataagccttcaagcactcctacacatgtggccacatttcactcgcaaaaagctcacgagaattgaacgaaatagataatatctcagaaacata

SEQ ID NO: 16051 - DNA, 166 bp, Zea mays
  Clone ID: MRT4577_114639C.1
ttcttttgaggaaggcgttcgccacagacgctgattgccctggggaagagatgggtctcttctttgggaagctgttcagtcgcctcttgtcaagaaggagttgaggatactcatggttgggctcgatgccgtctgcaagaccaccatcctttacaagcttaagctt

SEQ ID NO: 16052 - DNA, 3309 bp, Zea mays
  Clone ID: MRT4577_11463C.1
gccggccgggtcgggatccggaacgacgagtccgcgagaccgccccctgagggccccgaggaggcggcgccaattctaggctgccatcgtcttcctccgtcacacccggctcgcaaaccctagctcgccccggccccacctccggccccgttcgtcggtgctatgtcgaagcggccgaagctcgagggtttcagcatcccgcggcccacctcctacaacttcgagcgctcgcagtccgtgcagcggctctaccgtccgaccgatgacccagacctcgacgacatcgccttctccgacgacgccccctcagatgcccaagccagcaccgcggtggaaggaaaggccgagaatgaggaggagatggacccgctcgacgccttcatggccgagatccaggaggagatccgtgcgccgcccccgccgcccaagcccgaggcgcttcgccgcacggattccgacgatgacgaggatgaccccgtcgagagcttcctgcgggccaagaaggacgctggcctcacgctggccgccgacgtcatgcgcgctggttacgactccgatgaggaggtctacgccgctgccaaggccgtcgacgccggcatgatggaatacgactctgatgacaaccccatagtcatcgacaagaagaaaatagagcccataccagcactcgatcactcgaccattgagtatgacgccttcacaaaagatttctacgaggagaagccatcgatttcaggtatgagtgaccaagaggtaacagattatatgaaaagtttgtcaattcgtgtttctggttttgatgtgccgaggccaataaaaaactttgaagattgtgggtttcatgtacctctaatgaatgctattgccaaacaagcttatgaaaaaccaactacaattcagtgccaggctttacctattgtactttcagggagagatatcattggtattgcaaaaactggctctggtaaaactgcagcttttgtgctccctatgattgttcatattatggatcagcctgagcttgagaaagaagaaggtccaataggagtcatttgtgctccaacaagagaattggcacatcagatatatctcgaagctaagaagtttgcaaagccttacaaccttcgagttgctgctatatatggtggtgtttccaaatttgaccagtttaaagaactgaaagcaggttgtgaaatagtcattgcaactccagggagattaatagacttgctgaagatgaaggcattgaagatgttcagggcaacttatctggttcttgatgaagctgatcgaatgttcgatcttggatttgagccacaaatacgatccattgttggtcaaattagaccagatcgacaaactttacttttttctgcaacaatgccatacaaagtagagcgtttggcaagagaaatattaactgatcctattagagttacagttggtcaagttggcggtgctaatgaagacattaaacaagttgttaatgtactcccttctgatgttgagaaaatgccttggcttttggagaaattgcctggaatgattgatgatggagatgttcttgtattcgcttctaagaaggctagagtggacgagatagagagagagttgaatcagagaggattcaggattgcagcacttcatggtgacaaggatcaagcttctcgtatggagaccctgcagaagttcaaatctgggacgtaccatgttctggttgcaactgatgttgccgcacgaggtcttgacatcaaatcgattaaaacagttgtcaactttgatatcgcaaaagagatggatatgcatattcaccgaattggaagaactggtcgtgctggtgataaagatggcactgcatatactctgattacacagaaggaggcacgctttgccggtgaactggttcaaagtttgattgctgctggccaggatgtacccaatgaactcatggatctggctatgaaggatggaagattcagagcaaaacgagactccaggaaaggtgggaagaaaggtggcaaaggaaaaggtggtgttggcggtgctgggcgcgggcgcggtgtgcgtggagttgattttggcctcggcataggttacaatgccgaatctggttcacaagtgcctgctgcaagatctgctgctgtaaattctctgaagacagggatgttgcaacgatttaagagcagctttgtctctggatcttcaaatacaccaagcagcagtgcaccttcctttgtaagaccagcactccgtggctttgtgtctggcggcaccattggaggagacacacggcctgcacaggcagcccccactttcatccctgcatcccggcctgcacagcctgcccccgcggtccctgcatcccagcctgcaggaaataacaacgaaaatgggaacccgaatccagaaagttcacgggatcagttcagggagagaaaacgaccatcaggttgggatcgctagtccctgctaactggtatgcccaattgtgattccttccccgctttgttatattgatgtagtctcttgggagacatcctataaaaaagcactgtagattacatgatgtcaggtaagtgttgttttagttagtttggcctttattctttatccttcaactactgttgtatctggccgttgtttcacatttttcatcagagcaaaatttaccatttgtattcgaagttggcaccgaggcctcctttggttcatagaaaaaacagaggaaaaacttagttcatgcttttagttcatagaaatggagtatgtgaatagtgtatgaagttttccagtgtagcactagtgtttgatgggatcctgagagatagggaaggccagagttgacatgaaaatgaagacatccagatagttgacatgaaaatgaagttctccagaggcatcatggatcctggtaagagaagtaggaaaagttgacgttgacatgagaagatgcaatataagcagacttgaaaagatgaaatatacaaaacattcttcaaagtcactatgtgacatctccgtttacaccaccttttcctttgccacctttcttcccacctttcctggagtctcgttttgctcttaatcttccatccttcatagccagatccatgagttcattgggtacatcctggccagcagcaatcaaactgtgaaccaatttaccagcaaaatttgccttcttttttgtaatggtctaaattcgcagcggcccgcttttttttttttttttttatttaacaacttatttaacaccccattttacccttaaccaatcttttcttaaatattaccctctctccattcttt

SEQ ID NO: 16053 - DNA, 268 bp, Zea mays
  Clone ID: MRT4577_114640C.1
ttttcctgcagatcgaccgaggatctatggccatattaggtcaaggagatgccctaccatcactgggagttgagaagagcagagcaactagcagcatatgttgcggctacagaagaatagcatatatacattctgctgtacggaaagaaaatctataactgttacattgtgtcttcgtaccctgacgtaacactcgttgagagctgcaaggcatggccatgctggctcgggcaccagataccacagtctagagtctcgttcacgcgca

SEQ ID NO: 16054 - DNA, 1497 bp, Zea mays
  Clone ID: MRT4577_114641C.1
gagtttgcgctcgtctgcttggtaaaggaaaggagaagtttccgaaataggggcggcgcgccgggcgcattttggttgctggattggaaccgagcgaacgcgccggagtccggatgggctcctcgtccgctccggcggccgcagccgcggccgcgccgagccggcgcaaggtggcgctctacctggccctcctcaccctgcagtacggcgctcagcccctcatctccaagcgctttgtccgcgaagatactatagtgacctcactagttcttgcaacggaagcagcaaaggttatttgcgcaatcattttattgattgcagagggtagtctgaaaaaacagttcagtaactggactctcactggatcactgactgcgtctggactgcctgctgccatttatgccctccagaatagtctgctgcaagtatcatacaagcatctggattccttgaccttttcaatccttaaccagactaagcttttgtggacagcatttttcacatttcttattttggggcaaaagcaatcttccaggcaagttctagcattggccctcttaattggtgctgccgttcttttaagtgttggggagagcagtagcaaaggttccaagggtggtggctctgactatatcttgctatatgggatcattccagttacagtcgcttctgtgctgtctgggctggcctcttcattgtgtcagtgggcatctcaggttaaaaaacatacctcttatatgatgaccatagagatgtcatttattggaagtatgtgcttgttagcaagtacctatcgctcaccagatggagaggccataaggaaatatggggttttccatgaatggactttctggaccatgataccggtattaatgaatgccgtgggtggaattcttgttggtcttgtcacaacttacgcaggtggcgttagaaagggttttgttatagtttcagctctccttgtaactgcactgctacaatttatatttgatgggaagccaccgtcactctactgcctgatagcattaccacttgtcgcgtcaagcatattcatctaccaaaaacatccatatgttgataggaagaagaaagactgatccacataattgtcagagacgggaattatcaacaggatgtgatcctaacctcattttctccacaaggctggaatttgcaccgtcaaggggaccaaatttgactcttgaagagttgctgttcgtcaagctatgtttcaattatctactgatctatatatatagaattaattagtaggacactagcctggaatcagtttcagcaggcagttgacatgcttgcatataacttctcgaaggaggcttcgtatcaatgatgatgatgaagtgtttccatgtgcagctatctatacttgtacggttgctgaatctattgtattttttatggatttctatttagactccgactttcgaatatatatttctatgatggcagcaaattaaaaaccaattattgtgtgcc

SEQ ID NO: 16055 - DNA, 732 bp, Zea mays
  Clone ID: MRT4577_114643C.1
cccgccgggaccagccccgaaacttcaacacccaagtcgtcgttgagccaataccgtcaagatgcctttcaagttggtcaagaacagcgcgtactacagtcgctaccagactaagtacaagcgccgccagcagggcaagaccgattactacgcccgaaagcgcctcatcacccaggccaagaacaagtacaacgcccccaagtaccgcctggttgtccgcttcaccaacaaggacatcatctgccgatcgtcacctctgagatctccggtgacaaggtcttcatctccgcctacgctcacgagctcaaggcttacggtatcgagcacggtctcaccaactgggccgctgcttacgctaccggtcttctcgtcgcccgccgtgccctcaagaagctcggcctcgacgaggacttcgccggtgttgaggaggccgatggtgagtacaagctcaccgaggccgccgagaccgacgatggtgagcgccgccccttcaaggtcttccttgatgttggtctgaagcgaacctccaccggtgcccgtgtctttggtgccatgaagggtgcctctgacggtggtatcctcgtcccccactccgagaagcgattccccggttacgacatggagaccaaggagctcgacgccgacaccctccgaaactacatcttcggtggtcacgtcgctgagtacatggagaccctcgccgatgacgatgaggagcgtttccgtagtcag

SEQ ID NO: 16056 - DNA, 450 bp, Zea mays
  Clone ID: MRT4577_114644C.1
ggccgcttttttttttttttttttcggtggtttgttgtgttcattttatatactctttttttttttttttgtttttttttttattttacatagtttagaaaagtaagttttgatccgtaaaagcttgaaaacaatgagccaaagacgaaattatttgaaaaggaaaaaacaccaactccgaggggggggcggcgcaaggacactgaatagctactcctcctgtaggccgctattgctatcagaacaaaggaactgcattgaatataggggaacgggcgaacctgaccattgctgaagggcggagaactccaccaacgcggacccagccaaagcaggcagggagagaccctgagcatgcaatactgcaatggatgatcttgacgctggtctaaaagcccagactggaccaattggaagaaatggaaccagcgataccggggaaccacaggg

SEQ ID NO: 16057 - DNA, 393 bp, Zea mays
  Clone ID: MRT4577_114645C.1
cggacgcgtggcggacgcgtggatgttacaaaacttacttgaagttatttcatcgcttcatgtaagattagctggtgaagttatggcaagatggctgcaatccgaaaggtggcacacactcagcacctgaacacgttcatccattccagcttctggtcaaaacaattgacatgcatgcatgcatgtggaatttccacgtatgtccaacttaaatgttgcaaccggtgtaaggtggttagtaaatatgcacttgactatggcaacatctagtttccagcttacttgaaagttgaaactgcaactacaattggaaccaaacactacccaattgatcttgaagtcgtctttgggctagctcgcattcctttgcagatctgctaccggtggcgagcg

SEQ ID NO: 16058 - DNA, 567 bp, Zea mays
  Clone ID: MRT4577_114646C.1
cctcgaggccggccggggtttcgttctctcgtttcttttctccccctcgcttctccgtcgtatctctagggcgatctcggctgggcgtccacgtctcggtcccagctcgctggtctcttgctcctcgggggggtgcgagggcggtgtgtctaggtcgtacccattgaagcgcggcgtgccacgaggtgggggttgtctcgggaccatctaccctggccggaattttttctggagcgtgatttggcgctgagaacgcatcggaaaagagctaccggagatttactcgtcagaggcgacagctacccgtcgatccctgatctattgctagctcatcctccaggcctctgggtcttaacgacttcctcacatatgtctgccgatattccgcctgacataaactcgttagatcatgttttaagcgtgtatatacattgttatgagatagacctctgaatcaaattatatgtaatgagagctctccctgcggcttcattcttgagcctgagctatgagcctgttccagcgataatttctctttgactatctgatgcactagtgctacctatt

SEQ ID NO: 16059 - DNA, 3485 bp, Zea mays
  Clone ID: MRT4577_114647C.1
tacctcgaggccggcggggggtaattcggcccgacgcagtaaacgacgcttccctccgccgccgtcagatcggagctcgactccgtgccccgcttctccgccgcgatggcggcgccaccgcgccgctccctccttgtccttctctccgggctcctagtcttcgcctcccttgttgccctcaccacagccatctacgaggaccaggtcggcctcgcggactggcatcagaagtacattggcaaagtaaagcaagcagtttaccacagccagaagagtggaaggagacgagttgtggtcttgacagaggaaaatgtgatctcgtctcttgatctacgttctggagatatattctggcgacatgtcattgacaagaatgaccccttggatcagcttggtctatcacttggaaaatatgttctaactctttcttcggggggaactatattaagggcatggaatcttccagatggactgatgatctgggaaactaaccttcgaacttccacagcatcgaactcacagttgcatgttatgtcaaacaataaagcggccagggacaacttagttttagtttcagctgggcgatggatttatgctgtatcaagcattgatggggcaatttcatgggaaaaggagttttctcttgatgacttggaaatcaagcggattctccaatcacctgaaaatgatgttgtgtatgctttaggacttgctggttcctcgaagctagctttgtatcacttgagtgctaaaactggacagatactaaaagatatccaagagtcattccctggtggattatgtggtaaaacagtacttggttctgataatgtgtttgtagcattagataaggccagatcaagtctgttacttattgaattcaagggtgagagaattagctacaacaaggtgctggtttcagatcttgttcaagacttatcaggatcatttgagcttcaatctttgtccagtgacatcatatctttgcaaacatcatcttctatttccctcctaaagctcaaaggtaccgatggattggaagtacttcagagatttgatcagccagctgcagtgagtgattccctgccaatcacagaaaaagaagaagcttttgctgtcgtgcaacatttgggttccgaaattgagtttatcgtaaaatttacaagtgacctaagcagtgagattattagagaaaaggttaatatagaccaaaataagggcaacgttgagagggtcttcttgaatagttatattcgaactgacaagtctcatggttttcgagctttggttgtaatggaggatcattcactcttgttaattcaacaaggtgaggttgtttggagcagagacgatgggctggcttcaattgttgatgtaacaacatcagaattgcctgttgagaaggatggtgtatcagttgccggtgtggaacacaatctctttgagtggcttaagggacacatgctgaaactcaaaggaactctaatgcttgctaatgctgatgaagttgctgcaatccaagcattgagactaaagagctctgagaaaaataagatgacaagagaccataatggatttcgcaaactccttgttgtattgacaaaggctggcaaagtgatgactctgcacactggagatggacgcgttatctggtcaaaattgctgccatctcttcgtgcctccagatttggtggagtgccttctgcattaaggatataccaatggcaggtcccgcatcacagtgtgatgcgggaaaacccatctgtacttgttgttggtagaactggagcagaatcttcagctcctggcgtattctctattcttgattcatattctggagaagaacttaactctatgaaacttgaccattctgttttccaaattatccccttaacactgaaggattcatcagagcagcgactttatctgattcttgattccaattccaatgctcatttatacccgaaatctgcagacaccctcaatgtatttcttcatgaaatgtcaaacctgtatttctactctgtagatattcaagcaaatgttattaaagggtattcattacagaaatcatgtgatctcaattttggtgatgactactgcttcagtacgaaggagttatggtccatcatctttccttctgattctgaaaggattgttatctctgaaacgcgaaatatgaatgaggttgttcatacccaagctaagacaattggtgatcatgatgtgatgtacaagtacttgtcaaagaatttagtttttgttgctactttgtctcctaaagctgctggtgatattggatctgtgctacctgaagaagcttcacttgttgcatatcttattgatgcagtcactggacgcatacttcatcgtgtaactcatcatggtgcacaaggccctgtacatgcagtcttgagcgagaactgggttgtttatcattattttaatctgcgagctcacagatttgaaatggcggtgattgagatatatgatcaatctagggcggacaataaagatgtcatgaagctcatacttgggaagcataatctttcagcaccaattacatcatacgcccgccctgaggtggcagtaaaatcccagtcatactttttcacccattcagtaaaagcaatggcagttacacaaacggctaaggggatcacttccaagcagcttctgattggtactattggtgaccaggttttggcacttgataagcgctatcttgatccacgccgttcagtgaacccgacacaacaagaaaaagaagagggcattataccattaacagattctttgcctataatacctcagtcctttgtgacgcactctcaccaagtggaggccctgcgagggatcgtttctattcctgcgaagctggagtccacgactcttgttttcacatacggcgtcgatctattctacacccagcttgccccgtcaaggacctacgattccctcaccgacgaattcagctacgcgctgcttctaatcacgatcgcagtcctggttgctgccatcatcgtcacatggatttggtccgagaaaaaggagttgggggacaagtggaggtgagcgaggtctcagtgttctgacgctgaggaaattttgggccctagtcagctaccttctcctcctctcccccttttcattgtagtgctagagttcgtttcactttttgactaggactttatttatgtaaccgtttgacaccaaagcctatctgccgtgaattgacacactgcggaggccttatagaaagccacatacgcaattaaagattcaggaaatgacatcgaagggttagcagagtgcagatggcgtgaatgagggttgcctataacgtgtaatctgtaccactgcagccaaacacttcacagcagattttgtagctattgttgttggtaaagggtttccgcttctcttgtgtacaatgaaacctcatttttatttcaatcactaaacctttcttgccccaacaaccc

SEQ ID NO: 16060 - DNA, 366 bp, Zea mays
  Clone ID: MRT4577_114648C.1
acaccaccaaattccaaaacgaaaccacagccggagagggggctagcatttatttacagaggcaaacaaagaaccccccacccaagcgaaggcgacaaaactactgcacaccccactggggctgacgaaaaaacaaacccagacacgcgcacagtctacttaaacctctacccaattcacgtaaaaactagcaagcctgaagcaaaaacacacctacatctcctacaaccagtcaacaaagcaaaaattcacctacacgcacctgggcaaagcaaagcacacaaaccccccgtgcctgcccacaggcacaaaccgcgccgaaagtatcgccgggccacaccgtcaaccccacccacacgctgggcc

SEQ ID NO: 16061 - DNA, 182 bp, Zea mays
  Clone ID: MRT4577_114649C.1
tttttgggggatttataaagcgattgcgcgcctcataaccgggggacaatgtatacagctagtctccgacagaatggcgtacccatatccagacaagaagccgcataagaaaaacaaccagtcgttcaaaggagcacctatacacttgctacgagaaaaatgaaaagtcccacagcccgggc

SEQ ID NO: 16062 - DNA, 1034 bp, Zea mays
  unsure (1)..(1034): unsure at all n locations
  Clone ID: MRT4577_11464C.1
ctgtgcggcgctcgaggcggccgggtcaaaaacagcctacacggcccagtctctttccagaccggagcgacgagtccgcgagaccgccaccgccacccagcaagccgagcggcgccaattctgcgctgccatcgtcttcctccgtcacacccggctcgcaaaccctagctcgccccggccccacctccggccccgttcgtcggtgctatgtcgaagcggccgaagctcgagggtttcagcatcccgcggcccacctcctacaacttcgagcgctcgcagtccgtgcagcggctctaccgtccgaccgatgacccggacctcgacgacatcgccttctccgacgacgccccctcagatgccccagccggcaccgcggtagaaggaaaggccgagaacgaggaggagatggacccgctcgacgccttcatggccgagatccaggaggagatccgtgcgccgcccccgccgcccaaggccgaggcgcttcgccgcgcggattccggcgacgacgaagatgaccccgtcgagagctttctgcgggccaagaaggatgccgggctcacgctggccgccgacgccatgcgcgctggttatgactccgacgaggaggtctacgccgctgccaaggccgtcgacgccggcatgatggagtacgactccgatgacaatcctatagtcgtcgacaagaagacaatagagcccatacctgcactcgatcactcgaccatcgagtatgacaccttcaccaaagatttctacgaggagaagccgtcgatttcaggtatgagtgaccaagaggtagcagattatatgaaaactgccgtcgcctgtccactttccccgtgcttctccgccgtcgaggccgcgtcccagtgcgaagagactccgactcagatggccagccgctgggttccggcccgaggtgtacccgctgtntcgcggcgacgcggcgtggccgtcggcatctgcgggtttcagctcttccggacatcactggcacccgggagtcagggtaacaaggcagggagggcagc

SEQ ID NO: 16063 - DNA, 267 bp, Zea mays
  Clone ID: MRT4577_114650C.1
cgccttcctttttttttttttaatataaacggttaaaatggaccacatgcaatgggttagcattttatttacccaaaaccaaaccgagcaaaaaacaggccccccttaatgatttaaaccccggacaacgagagggggtttgattccggccccctttgtggggcggggcggtcagacccacggataacaaataaacttaacgaaggccccagggggggggggggggcttgaaacaggtgtcctttgaacaaaagcttaggggggggg

SEQ ID NO: 16064 - DNA, 111 bp, Zea mays
  unsure (1)..(111): unsure at all n locations
  Clone ID: MRT4577_114651C.1
tctttctcacttctccagataaagaaatagggggtgctcatatattccaacgcagccggactataaccactcctnttacattaacaaattccattacctcaccaaacacta

SEQ ID NO: 16065 - DNA, 268 bp, Zea mays
  Clone ID: MRT4577_114652C.1
ctcaagtttactgtcttctcccctacctcgatttgacgtacggcgatatatgcaggggccgagctggacttagtgcggcggtacaaaagatgcggtcgtattacaaacatactggacacgctgaggctactactcctgatggatacgttcattctaaaccgggcttacggggctgatgtgttacctctagcgcaagtagagtccaaggctgacgacctcgtcgcagaagggggcgtgcactgggggtacctgctgtcgcaccctctaa

SEQ ID NO: 16066 - DNA, 402 bp, Zea mays
  Clone ID: MRT4577_114653C.1
gggggggggggggggttttttttttttttttttttttttttttttttttatttttttttttttgttttttttttttttttttaaaagcaacagggggacccttaattttttccctaaaaaccacagccccaaaaaggagccatccattggggggggggggggcaaaccaagcaaccaaataccaaggtaggtaacaggggaaatctttccaaaccccgaccattgaaatggggagggggccccaagcaaacaggggcacaacccaccagcaaacggggcgtaaacccccggggcaaaagggggctgggcccacggcctaaaaaaacggcccggcccaaattggaggccaaacccaatccaacaaagctaatcgcaggggtgggggggggataccgggaaaaa

SEQ ID NO: 16067 - DNA, 118 bp, Zea mays
  Clone ID: MRT4577_114654C.1
tgagaataacctaggtaaagcaggtgatgtgatgccactgttcatgtggcgaagcgccagcctcgctatcgagctttttaacacatttgccgctctccagtcaaacttttatgggtgg

SEQ ID NO: 16068 - DNA, 511 bp, Zea mays
  unsure (1)..(511): unsure at all n locations
  Clone ID: MRT4577_114655C.1
accacagcaatgtgttacaggcagagagctgaagcccttcaatgcacaccggtctagtatctgaacgtttctcttgaagccgtcaggttatccgcgtaagcacgcttttgtatgctatttcccaagaataataataagacctacagctgatcttagaattgtcatgtgacccagacaagacatatagtcaagtgtatgcttcgagtgtaggaggcagtgcactcaaagcttacttgattgcctgtttcggtatggtcgttgctgctctagcatgcatttggctcacttggcattttctttctgtgtgattgagctgtttgaagattaatgcaagtgcctgtacgctatagcctgagttcggattcaccagatacatggataattgaatggccttantttgggtggaaagcgatatgttgataggcgtctttttgnttcttgctaaaatttttctgcaccctgcttgggctggcccggctgtagaagccggcattgatgcaggtcccaccgc

SEQ ID NO: 16069 - DNA, 355 bp, Zea mays
  Clone ID: MRT4577_114656C.1
gcggctggctgtaggagagaaaatatcatttagcctataatcctggagaaataccagagggtattctctaatcgttctgggaacaaatagactgaatatatgctcttgcctagacacaataagggtgttgaaaactttgaactatttactattatcgggagagggtcatttggagaggggcgtctcattggagagtaaacatctaataagtgtgtctcacagtgtaatctctagaaacctgtgatgcttcgtatgggccatgtagtacatgtcaaagctgaaatggaccattttgcttaaggcgatagtgcttacctagtttaagctctattattcttctcaagaccaatagttc

SEQ ID NO: 16070 - DNA, 275 bp, Zea mays
  Clone ID: MRT4577_114657C.1
accgaattccctgctattcctctcccctcgtctgctcgtctccccctacttgagggtcggagaggaattttatagaggtccggctcatcctaattaattaagccttggagcacattgagtctgggtgccagtcccccgaattacccttcctttgcattaatatctgtggcttttttatcaattcatctaccattatcattttctctaatttctcacaacgagatcattactattcatgattcttgctcatctttcttcctcctctattgacatca

SEQ ID NO: 16071 - DNA, 441 bp, Zea mays
  Clone ID: MRT4577_114658C.1
gggggggggaaaaaaggagacagcaactggaacattgttcccaggggtgagacaggcaaggcacccttctggggggttaagggggagacatttttttagcaagggggtgaatttttcgatcaaaaagcaaccaaaaaacggcaactggttttatcccccatccatttccagtttttcaaaggggggttgggccctaacccttgaaaaaaaccagccttaaaaggccttattaaagggcatcttaatccccattttcataaattcccccccagggggggaagggaaacaggaaccccttgaagggcaacattccgtttttggcccaagccatttcctaaaaatttttaaagggtataggcccaaaaaaacgccttcctggggggggctcggtaaagggtggggaaaattaatcctgggtaaaaaacccattttttttttttt

SEQ ID NO: 16072 - DNA, 348 bp, Zea mays
  unsure (1)..(348): unsure at all n locations
  Clone ID: MRT4577_114659C.1
cgcaaaactaaccccctaataaaattaattaaccactcattcatcgacctccccaccccatccaacatctccgcatgatgaaacttcggctcactccttggcgcctgcctgatcctccaaatcaccacaggactattcctagccatgcactactcaccagacgcctcaaccgccttttcatcaatcgcccacatcactcgagacgtaaattatggctgaatcatccgctaccttcacgccaatggcgcctcaatattctttatctgctcttcctacacatcgggcgagccccatatttacgggatcatttctctactcagaaacctgaaacatnggcatatnctcctg

SEQ ID NO: 16073 - DNA, 571 bp, Zea mays
  Clone ID: MRT4577_11465C.1
tctcggatcctccatgttcgcctgattcatcacttacagggatcgccttgctcggactcggaggagcaccgcttctaatcgaaggccgactctggaacgaccgagacctacccgctgcaggatgtcaccgtccgtattatcgatttcgtcgacctcaagaaccgtccctgcacgctgtggaggtactacgtccaagactggtaaggatgaccgcgccaaatgtcactttgtcgccatagacatattccatgggaaacagcttgaagatattgttccttcattacacctctgtgacattgcgcatgtgaaccgtactgactatcagatgatccatatttctgaggatgcatttgggatgcttcttgcttcatatggcaacactaatgatgatcttatactcccaactgatgagactcttgaggtccatattatagaaagattcgagagatgcgaaagatcttgttatagactgtccaaactgacatggataaggatcagagctgctccatgaaggatgttgagcccaatattcttcattgtgtattcagacggaaccctactgtatctcgac

SEQ ID NO: 16074 - DNA, 304 bp, Zea mays
  Clone ID: MRT4577_114660C.1
ggttaattcttttcgccatatatccattgcatcgaatttggctgtgttcgtgtatttgcctgctctcaatttatagcacgtgaggacatgtactctacattcatgttcttgtcaactggactggcataagtgttcttcacttctgcacaactaggggctcagcaggacagcgtgtatagcctttatgctaacttctatgcatttagcgctgaaagtgtttcctgctatataaatcgaacaaagtgagcagacgggctagacttgtatcatgtcttctccaacaatcattttactctcctgaaac

SEQ ID NO: 16075 - DNA, 414 bp, Zea mays
  unsure (1)..(414): unsure at all n locations
  Clone ID: MRT4577_114661C.1
aaannccggggcggcccaacccttccaaccaaaccagccaccctaaaaaaacttattttcctcccctgtcaagtttcctttgccttgtccccaatcccgttttgcctgccagatccaacctttcaaaattacccaaccaattcccttttttgtttcccccaatgccgaagaaccattcaacccccaattaccatcaacctaagaaaaggaagtttttgttgaaccaccaccacccaagaaggcccccaaacttaagttacctgaatttcttccagttgccggttccccagcccgcgttttccttcgttggcttttacggcttttcaaaggacaaccccttcctcttcctcccaatcgttaaccccttcaattttcccttaaaggccttctttagcccctttatacaaccttttg

SEQ ID NO: 16076 - DNA, 276 bp, Zea mays
  unsure (1)..(276): unsure at all n locations
  Clone ID: MRT4577_114662C.1
caaccactctttctcccacacgttctcccactctttcttacaatttcatctcttctaggtgtngagtgtatatgcataaccagtacatancctcccaatcttccatttacaccccatgaagaagcacaatcagtctggcatcttaaggaagtctcaaataaagcacacaattctgagctgaaactgtttcttgaaattgaacttggaccggagttatttccaattcttccacctcataagagcaaagaagacatacttcttttcttcaaactttat

SEQ ID NO: 16077 - DNA, 211 bp, Zea mays
  unsure (1)..(211): unsure at all n locations
  Clone ID: MRT4577_114663C.1
gctgtagcgtacaacgcagtctcatgacggtcgtgaagccgcctccggtgcaagagatgagcatgctggangagaagggagcagagcagagtcaacacgatgatgtggacgtcattcctctatagatatgcgaggatagcactagcagcagcagatgacgatcacgactgtctggccatgcctctatcagtagttacgtcatgatctttca

SEQ ID NO: 16078 - DNA, 278 bp, Zea mays
  Clone ID: MRT4577_114664C.1
ctccacgtatgtcaccggcgggtgctcggtgatcaattgggctatttcgtcggaacacaacgagctcgtccgtgacagttggagaagcgtggaacctctgtgaccgcgtaggacttcacgcagtggagtcgtcaccgccgtggccttgtggacagccatcccagacgcttcaattgtccgtgaagagcaagtactgctggagaaggactactacgatgaattcgatgaaatccaggggtcgtctcccagtcaactattggcaccgaggagatatttat

SEQ ID NO: 16079 - DNA, 163 bp, Zea mays
  Clone ID: MRT4577_114665C.1
tggacatacccattattttacacaatttgacctgtctgaggacactgagtgatttacataaacaattgtattcataacagagagtagaacataaagccagctctttcagaacatcctatctcagtcatggatttggatacattcactccattgcttatggttc

SEQ ID NO: 16080 - DNA, 155 bp, Zea mays
  Clone ID: MRT4577_114666C.1
cggacccaccacgccacactcccttctacaacagcgcgccgcgaagccggccgcgccgtatagggcgttcgccgccgactaacccgaacgcctcccagtccgcgccggcaggatctaaagcgcaagggcggacacaccgtcccaggccgcaggcg

SEQ ID NO: 16081 - DNA, 404 bp, Zea mays
  Clone ID: MRT4577_114667C.1
aaagaaccttataccagaagttcttttatgctgtgggaactaatttctctacatagttaagcacatggtcgtgaccacgtatgtcgtggataccatttgcgcttccttttcccattactaaaaatattatggtcacaatttgcactttaagttataatgcagcacagtgcttcactgtctgagtctacaacaacaacaacaaagcctttttgtcccaagcacgttggggtaggctagagatgaaatcccatatgaaaacctcagagctcaaccccaaagaaaagaaaagggagataaaggcaaaggagaaccgaaaaacgacgaaacggggaaacacataaaaagaaataaaacccacaagaaccagcaagatctaaaggggcacaagaaaaggtcaaacgatt

SEQ ID NO: 16082 - DNA, 740 bp, Zea mays
  Clone ID: MRT4577_114668C.1
ctcgaggccggccgggcagtgcatggctgaatcatgtcgatggagctccaagggttagatcagttgtgagcatacccgctagggaaaggcttgatggtagcacacatactacaccccttaggcccagtgaggattcttcccctgttgaaagcggcggcaaagttggactgcctctgaatgacactaacaaggctgaaggaaccaatggagagaacggaaaaacaagtgaagcttcggcctctgacggttccgtgttgtcacctaccgaagacaagagccaggtgagctacaaagtctacatacccaagaggaccccagcccttgcaaggaggaaactgcagcgctgaaaacgccaaacgccaagaatagacaattcatcatcggtcttactatctgcaaaaactataggttttggctggatatacctattctgtgaaccacgagtgcccagcatacatgccttgtggaatctggatatctgttgctcaactaaataaacagttttcgtacagcaaatgtattaattgcctgggattgggtgattgagtcgttgtaatcagcaaacgtgccgtccaatactgatgaaactgtcacctgcatctatcgctggttggcatagtagtcttttagacatgcagtagctaccttgctgcaagcggacgttggacagacactgcagaatgcagatgtgcctgactgtactctacaacaacaacaacaacaacaaagccttttgtccc

SEQ ID NO: 16083 - DNA, 465 bp, Zea mays
  unsure (1)..(465): unsure at all n locations
  Clone ID: MRT4577_114669C.1
tttttttttttttnnnnntttttttttttttttttccaacatgtatttatgaatgaacgaaaagaatcacacatcaaattaacatgcatctattacctagctactacatacaagtatgaaccctagcttaatttcctgcaaaccatgtattctaaattctgaattgcatccgaaccggctagctagaccgtatgctggtggcttttggtggggagtagtactggtgtcgttgcatcctcctcatccgatgccttttggtgcggggtggtgtcgctgtacccgatgcccttcctggtggcagggaacatcaagaacacgaagctggacaggaaccccgtcccgagcgggaggttcttgaggagctcgctggtgttggcgccggcgtgggggaagaagcagcgctgcaggccgacgtcgctgaacgccacggtgaggaagacgacggcggcgaagatggcgtgcacg

SEQ ID NO: 16084 - DNA, 290 bp, Zea mays
  Clone ID: MRT4577_11466C.1
ccggcgatcatacagagctctctcctcttgccattcgctcgctcgatgctagcttcccttccgagaatggcaccaccacctgctggactggcgactgggtgacggaggcaacgccgtgagagctgggctcccaactcgtgatgcagcccacgctttacacgtctattgttccgtcacgaataagtggaggaattctagagtggtaccgcgatcaccccacggagcggatatgatcatgataaccccagggggacaagtaaccttcactaaagggacaaaacctgtacgtc

SEQ ID NO: 16085 - DNA, 854 bp, Zea mays
  Clone ID: MRT4577_114670C.1
gaggtcagctaccaaatgttaggaagcagtgcagggctgaatcatgtcgatggagctccaagggttagatcagttgtgagcatacccgctagggaaaggcttgatggtagcacacatactacaccccttagccccagtgaggattcttcccctgttgaaagcggcggcaaagttggactccctctgaatgacactaacaaggctgaaggaaccaatggagagaacagaaaaacaagtgaagcttcggcctctgacggttccgtattgtcacctaccgaagacaagagccaggctagtattgagggtaaagatagttttcagaagaagactttctctagaatgcatgatggagagacggtggaggtgagctacaaagtctacatacccaagaggaccccagcccttgcaaggaggaaactgcagcgctagaaaacgccacaattcatcatcggtcttactatctgcaaaaactataggttttggctggatatacctattctgtgaaccacgagtgcccagcatacatgccttatggaatctggatatctgttgctcaactaaataaacagttttcctacagcaaatgtattaattgcctgggattgggtgattgagtcgttgtaatcagcaaacgtgccgtccaatactgaggaaactgtcacctgcatctattgctgttggcattgtagtcttttagacatgcagtagctaccttgctgcaagcggacgttggacttggacagacactgcagaatgcagatgtgcctgactgtactctctagtctgagattgttaagcctgaagttcatatttctgctttatattattgtcgttttgatttgaaaaaaaaaaaa

SEQ ID NO: 16086 - DNA, 266 bp, Zea mays
  Clone ID: MRT4577_114671C.1
acgcgtacgacaacacgtacatgcactacatgacgtacttccacagccactacacgtacctcgatctgcgcaacgatgtaaatagaaaaggcccgacgcaatgctatacaaactatccttaaacacttgacctggctattatgtactacccgtacgcgtcggacattctcgacacatcttcctcgatcaataactgggatgctcactactgcgccatctactacgacgacacatggctcaaagctgatttacagcactctatatgc

SEQ ID NO: 16087 - DNA, 649 bp, Zea mays
  unsure (1)..(649): unsure at all n locations
  Clone ID: MRT4577_114672C.1
cctagctctgtctccgccacctctcctgtcccggatcgacgctgcagctccgtcctcgagttgcacagtttagccgccagctacatacgcccaccctatctatcgccacccgcgtgccgtcctgcttgcatctgtaaccactcctcgtcgtcgtctctttcgcggtctcgcctcctgcagcctctcgcccagaaagggaaaccgcatctgctcccgtctcccgcctcggcgccgccgcctagtcgacctgagcccagactcccagagagggggggcttcgaggctgtcgggcgctcagatctggggcgcggagtggcaagcgaaggacatgcagatgcaccacgtcggaggaggcgcggccgacatcccggaggcggcgcggccgagccgctacgagtcgcagaagcggcgggactggcacacgttcgggcagtacctgcgcaaccaccggccgccgctggagctggcgcggtgcagcggcgcgcacgtgctggagttcctgcgctacctcgaccagttcggcaagaccaaggcnncacgcggcggggtgccccttcttcggccacccgtcgccgcccgcgccgtgcccgngnccgctgcgccnggnttggngcngcctcgncgcgcncgnccgccgccggcgcgccgc

SEQ ID NO: 16088 - DNA, 386 bp, Zea mays
  Clone ID: MRT4577_114673C.1
tcgtgccttcagtcctactcctacacccatctcattgctttcggaatccggagagctcgagtcgtgcgtgcgcgagtctttgttgcatgctgcggcgaatcaccagcaccaccctttcgcgtcgtgcgcgcgtttcgatggccgacagcgagcctttcatcacgcgctggacctttgaggatttcgtggtccactacgaaacgcgcttcggtctccggctcgaggccgaccgttacggttactgtgatggcgacgattgcacccccgtcgtgcgtattcgatcatggggccagtcgtcccgtcactgtccgtgccaacggtggtcgcataccatgtccgtcttagatcagatctagcggatggagaggaaggtggagattatccat

SEQ ID NO: 16089 - DNA, 274 bp, Zea mays
  Clone ID: MRT4577_114674C.1
cccgtcgacccagcgtccgcggggtccctgcccggtccagcggtcctgccactgtgggctgcctcttgctccttggcaggtccgtcccgctccacgccgctgtggcctgtgcccttgatatgacgcctccgcctatctgaccgcgcccctcctccgctggcctactgggctgcctcgattcacgcctcagagatattcggacagagccaggcgtgtccgtatcgaccgacccgccccactgcatgtcagcaaccagtatcctgccgctcatccc

SEQ ID NO: 16090 - DNA, 1863 bp, Zea mays
  Clone ID: MRT4577_114675C.1
agccggccgggccgggagtagcagcagccgtcagtcatgcccgcggcggccttcttctccgccggggcggcgcccgcactgccccctccgtcgcgcacgctgtcccgccgcctcgtcgtgtcccgcgcggctgcggccgcggcctcagcatcagcatcctcttcctccgggtggcaaggtggcgggggagtggagttccagggcaaggtggggttcctggggctcgggatcatgggcgcgcccatggcatccaacctcatcgaggcaggctgcgacgtcacggtttggaacaggaccaagagcaagagcgatcccctcctcagtctcggtgccaagtatgagcctacaccggcccaagtcgcttcatcttgtgacgtgacattcgcgatgctcgctgatccacaaagcgcggctgaggttgcatgtgggtccagcggagctgctgaagggttggcccctgggaaaggctatgtcgatgtgtcgacggttgatggtgctacatccaagctgattggtgaacgcattacaagtactggagcatctttccttgaggctccagtttcaggctcgaaaaaaccagcagaagatgggcttctcatctttcttactgcaggtgatgagtccttgtacaagagagtggcgcccctccttgatgtcatggggaagtcaaggttttatcttggcgatgtaggcaatggtgcagcaatgaagctcgtggttaacatggtcatggggagcatgatggtttccttctcagaagggttgctcctgagtgaaaaagtcggtttagacccgaatactctcgtcgaggttatttcccagggtgctatcagtgcccccatgttctctctcaagggcccatccatggttaaagctgcatatcctcctgcatttcctctgaagcatcaacagaaggacctgaggctcgcattggccctggcggaatcggtgtcccagtccattcctacagttgcagctgcgaacgagctgtacaaggctgcaaaatcgctcggccttagtgaccacgacttctcggcggttattgaagcgctgaaagccaaagtgcagagccagagctcacaatagtagttgcctgttcagcagagctcacagtagttgttgcctcttcagcagctaccattgaggcagcattttgtctcgatggatgaagttgacacttagggcttgtttggttctaccccaatccatatggattgagggggattgagcgggtttcaatcctcagtaagtcaaaatcctctccaatccgtatcaatcccctccaatccatatggattaaaaataaccgaacaagcccttaagggaaatttctcaaggtcgctacagaaaagtcttagaacaatacaatttctgtattcgtaaatattttctcaaacatcacaacgacgacattgcctcgaaagcatcaacagaaggacttgaggctcgcattggccctggcggaatcggtgtcccagtccattcctacagttgcagctgcgaacgagctgtacaaggctgcaaaatcgctcggccttagtgaccacgacttctcggcggttattgaagcgctgaaagccaaagtgcagagccagagctcacaatagtagttgcctgttcagcagagctcacagtagttgttgcctcttcagcagctaccattgaggcagcattttgtctcgatggatgaagttgacacttaggaaaatttctcaagatcgctacagaaaagtctcagaacaatacaatttctgtattcgtaaatattttctcaaacatcacaacgacgacatttccttaaggaagagaaaaaaaactttcgtcgacgcggccgcggggaacttaaaaaaaaaaaaaaaaaaa

SEQ ID NO: 16091 - DNA, 129 bp, Zea mays
  Clone ID: MRT4577_114676C.1
gtcttcaactggttagtgtgaaatagttctgccacctctgacgcaccactgccaatgctgtacgtactgcatttgccccttgagccaggtggatgtttaccgtgtgttatataacttcctggctccttc

SEQ ID NO: 16092 - DNA, 263 bp, Zea mays
  Clone ID: MRT4577_114677C.1
ctgggtcttcagaccattagctttatctactccagagcgcagaagaacccgatcgacaccatgagggtgttgttcgttgccctcgctctcctggctctcggtgagagcgccacctgcacgcatacaagcggagggtgcagttgctagtcaccgcatactgttaaagtaccgccgacgaggcatttgacagctccgtgtacactcacatctgcgaggctattgctacaacatgcgattgtcgggagcgttttacatcaaccaat

SEQ ID NO: 16093 - DNA, 405 bp, Zea mays
  Clone ID: MRT4577_114678C.1
aacaaacaagaagccgaacaacgcaccaatttaaatagcgatggcgtcgttaacaatgatggcgtcctttgccgccggggcgggggccggcccttttggccggggaacttttgccggggtaaggtccgccaaggtcaaccgttgccagaagcccgcaacgttagcagaaaccaaggccaggcccgccgccaacggaccccgggccttaatcttctcggttgttttgtcggcccaggaagccatcggaggtgccgtttctcccatggcgggcccaaaaaaatgaacccccaaggttaaaaaaaaattacccggaaatttgtttaacaattccaaccgccaagggtttgcacataatttaccatccctcttttttaatttaagggccgtgggggggttttttattta

SEQ ID NO: 16094 - DNA, 255 bp, Zea mays
  Clone ID: MRT4577_114679C.1
ccttctttttttttgttgggcattttaaaactataccctcattcgtccgacataaatgtacttcaggacattgttctaaagcaattaaaacacaggggatctagcagcacaagctgatacggagagagcaggcacagtacaggccacaggatagacgatcgatccgatggattccgttcaggccctgtggacagggtcaatgatggagacggcgactacggtgtcgacagtaccaacgagcacgacccgagggga

SEQ ID NO: 16095 - DNA, 409 bp, Zea mays
  Clone ID: MRT4577_11467C.1
acttaaacaggagcagcttagacagcaagcttattccattgtcattacatggaagaaccgcggcgcatgtttccaaaagagactgccaaaggcgcccggacaaatttcttaactgcacttgtatatacgtacacaaactccagtcggctctttatttgtgacactgactgactgattactgcgcacgagggatgtccttcgagccatgtggccactcatggtctgttggaaggcgaacagtagcattcggtctatgcttctctctgtctcactggtgacaatggaccgtgtactgtgcggaaaggattctttggcgccgggtgagacctgcccaaggaggtccttgacctcgtgaagcacgggtttgagcagggacttttgtgagagccctatcaaataaatggtccca

SEQ ID NO: 16096 - DNA, 379 bp, Zea mays
  Clone ID: MRT4577_114680C.1
attcggctcgtgctcatgccccattttttagcagagactcagcactagccacccagacgccttctttgcgaccacggtgggcactccaactatgcgatctccagcaatacgcggctgaggctccagcgatggcggctcccatagacgaggcggaatacccgaccctggctgacagggcgcgccgccacctccgggccctcatctgcaacaagggatgcgcccccatcatgctccgcctcgcatcggatgatgctggaactgatgacctgaaaacaaaaactggcggcgcaaaaggaacgataagataggaagaagagtccactcacggtttaaatgctggttaaaagattgttatcgatctccttgagcctatcaacgc

SEQ ID NO: 16097 - DNA, 641 bp, Zea mays
  Clone ID: MRT4577_114681C.1
cactccatagggcgattggtttcatcgaggccggccggggtcggggccccttccgtcctcttccccagtgcggccgtaccgtccgtacgccggcggggtccttccgccttgtctggacgcgcggggcccggccggctgtgtgccgcgtacggcgtctctgcgccggcccgaccaccgcgagtgctcggatctgatgacgaccgaccacgacgcggacgccaaagctagatcagctggtggccaccgatcgatcgatggcagtggacccgtcgtccatcgtcggcccatcgatcgccggaggaaacaaatcagtggatccagcactcaccgtgttcatgccttgggacgacgacgacgacgacacacccactttccctgttactactttagttcgcttgctttaatttggcgacgatatccccagcctgcgtgtagcgatatatcactaccggaatccgcgcctttgccgagtgccggtggctttaccgagtactttttatcgggcactcggcaaatcagactttgccgagcgccgcactcggcaaagtcctgcgctcggtaaagagctagtttaccgagtggaggacactcgggacagcaaagaactccgcaaagactgctctgtcgagcgtcaaaccctc

SEQ ID NO: 16098 - DNA, 657 bp, Zea mays
  Clone ID: MRT4577_114682C.1
cgggtctcgtgtgcttcctctgtcgtatttatgggaagggagacgggttctctacatcttcttgcgtctctactgctgacgggagggaagggaacggatctggtgatccgtggtaacgtagttcttaatacgttatcagcacgctctacctcgacgttgctgcggctagatcagatctgcatcaactctccgtcaaaccggcaggtctttggcctagccgaactgtcctacgcgacaggcttcgatttcccctacgcaatcaaacaatgggcatgttcctgctgacgatgacggccggcgcgaatagcctgcacccgccggagtgcagcgtgggcgagacctgcgagaaggcgacgtcgtaccagttcgcggtgctcttcgtggccttcgcgttcctggtgctgggctcggcggggatccgcccctgcagcatgcccttcggcgccgaccagttcgaccccaacacggagtctggcaagcgcgggatcaacagcttcttcaactggtactacttcaccttcacggccgccatgatgatcttcgcccccggcatcatttacgtgcagagcaacgtgagctggcccatcgggctgggcatccccacgggactcatgtgcctgggcatgcgtgctcttcttcatgggcacgcgcctatac

SEQ ID NO: 16099 - DNA, 789 bp, Zea mays
  unsure (1)..(789): unsure at all n locations
  Clone ID: MRT4577_114683C.1
aattcggcacgaggcttcaatggatactttggagctatcaaaggactcgttgtcctcagatgaacagaaggcatcagcatttgaagaaagagagagcggagatttcacggttgatgagggtgaatacgattatgaaactgcctgttcggagagccgtaatgacacagatggtaaccttggtgtgcctcaatcccctaatgcaaagtcaaggtgttcaaacttattcagtacaagatctacaggcagtcatttgtccttgtcattggagaaaagtgcagctaaaccttctggccgaccacattcaaccctaacagatccaaattttgttgagaactatttcaagtactctcgactgcacttcattgggacatggagaaaccggtatcggaagcgcttctcaaatttgctagaagctaaaggcattaagttgagtgctgatcattcagggaagaagaaaacaatcattcatattgatatggattgctttttcgtgtctgtggtcatcagaaatatgccagagctgcatgataaaccagtagcagtttgccattcggacaatcctaaaggaacagcagaaatatcgtctgcaaactatcctgctcgaaactatgggataaaggctggcatgtttgttagagatgctaaagctcggtgccctcaccctatgatcgttcctttatactttgaagcatatgangaggttgctgatcagttctatgggactttgcacaaacattgcaggtaggttcaggctttgagttgtgatgaaagctttttgggatatgactg

SEQ ID NO: 16100 - DNA, 320 bp, Zea mays
  Clone ID: MRT4577_114684C.1
ctgggacataaatgttcgatgggggtgttaaggataggttttatcttataatttggactagctatggccgtcaccatgattaaaccaacgggagcagtattgattggagcgagcataaacccattgccatttcccctggggcgaggggtaactcaccttttataatggcgatcgccctttaatcaccaagccatggccagtatcaacgacaactatctcaaactgaaagccggttacctgtttcccgaaattgctcggcgggtaaatgctttcaccactgccaatcctaacgcccaggtgatccccgggtaccgagctcg

SEQ ID NO: 16101 - DNA, 391 bp, Zea mays
  Clone ID: MRT4577_114685C.1
acgcacccggcccggatcccgggtcgcccacgccccccgcgtgcactcacgaaacacattaagcaatgggaagggcacacatgtggaattttgtcggccgtcgccccacttcatgtgtcaaatgttcaatttgttgatgcagtcactggcaaaccacgtaagattggatacaagcttcttgaacatgggaccaaaattaggtgcgctagacgaatgctcgcatacggcgctgctgttccccggtcagaaattatgggggatttgaggaaaccggggcccacgtaagctggggcgaaggacacacctattttgctggcgcaggacaagaccttccatggaaaagctgggatctgtgtacccgaactataggtgccgagaggtcaatgttatg

SEQ ID NO: 16102 - DNA, 757 bp, Zea mays
  Clone ID: MRT4577_114686C.1
ctcgaggccggccgggaacttttcccacagctaccagcaacggatacaattacgttgatgcacagcatggaactcaacactcgggacttgtacgaagctcacgtcgaggtctggctccggttcctgtgcgtacggcaaatcgatacgcctcgcagagggactgcgacctccgcatccccgacgcgatccaccaccatgtaggatagacgccacaccttcctcatattcttcgcctcatactgtgccaccacccaagtagatgttcgcgctactacgccgcctcttgcgcgggctcagcgtctctggcaccttcactggcgagaaacatatccgcgcagctgctggcgatagataactaccggacacgcacaggacctactggaatacagattcacagcagcctcccgtgtcctcgtcagcgatgaagcgagctcggctaacttgcactcctcttgtgatcctagacgatccatcctatccgctgcgtctcctcacaatatgggtatccgcgcgcgtcttcatcaggagcaggatgaaccgtccccgcatggacaggctttccaagcataaattcccaaagaactgtgaacacgttgacgacgtaaactccctactgaaccaatgcatgtgtccctgacagacacttcctgaagccaaacatgctcagggatcgacatcatgtgtctacgtgagattgaatatctggatccacgtacgccaagctcatggagacgccaccgccaacatccacgctggc

SEQ ID NO: 16103 - DNA, 329 bp, Zea mays
  Clone ID: MRT4577_114687C.1
aatggccgggccgacgtgctttctagccggcgggcggcctcgtgggggccgtttaacgaagaaaaaggaacaagaaggcgcagaggcaacacggcggaccagcacaccgcgaggagaagacaaacagcatcaggcacgaggacaggctcacccacgccaggcgaggagcccagaacggaccagacaagacggaagacaggacgctgagcccgctgcccgacccgaggaacgagaaggagcagatgcggctgagggcagggggcagccgccggacagacaaagaggaggagaggacggacaagagcacctcacaccagagcacacccact

SEQ ID NO: 16104 - DNA, 373 bp, Zea mays
  Clone ID: MRT4577_114688C.1
ggaaattaaaggggttggccccctcacatgtttcacgttacacaaaatccgtcccccggcaaacagactagggcctgttccaaacctttaaaactaatagggggcatctaaaattaacggaaggggtttaaacgggtcagatcagataatagacgggctaattggtagctttccccctcaaataggcattagtgggagctggctcaacccagctaaaaccaactaacaacttattagttagctaacaattagctctaaaggttttaaccggggcctaactttaggaaaaaaaaaaacaccctttgaaattttaaataagcccaaggaatcctggtagagcaaatggaaaggccaatgcttccggatgcctaat

SEQ ID NO: 16105 - DNA, 568 bp, Zea mays
  Clone ID: MRT4577_114689C.1
cgcctgcgtgagccgggatgctatagagcggtcgacctacgcgttcgtctagccggagagaaccctgtcacctacttgcatcagcatatgatagaatccaacccactaggtctcgatagcgtagctcattaccagtgtcatcaacaggtgggacagttcatgccagggctgatgcaactagccatggataaccctgacctgtacctacagctactttcatctatcctgctcggcggagggcaatgcacatacgtacctacaacaacagtggatgaagcaaatggtgccagttctgactgaactcgctagagcaaaccctagctcggctacttacaacagaagctttcattgaacgcaactggctgggtcaaactctgctggctacctacaacatcgaccacagtgacttaatacatggggaggggctaacccattggcatctaccttcctgagcgagctacatcaattgctgccatacaaccaggtatgtttgatcaaccctggcttgctagaacctatcgtaaactgtgccatctgtttagattacatatgatacgtactcgacaat

SEQ ID NO: 16106 - DNA, 289 bp, Zea mays
  Clone ID: MRT4577_11468C.1
ggcggggacccctctcaatgtccaatcgacgacaccactccgccgagatgtggatctcacattccgcctttttggagccctgatcttcctggccatgcgcctctgcctccccgccccctagccctccaccagcacgccttcttcggcaacgcaaccggcggcgacgccggaacagccggaaacagggcagtgccagctccgtctactgcgtcaccgaccccaatgctgaggacctttggcgtggtgctcaattggaggcaacgtttccctctaggcttgactctaaacc

SEQ ID NO: 16107 - DNA, 373 bp, Zea mays
  Clone ID: MRT4577_114690C.1
caaagccactatctattgggtatctttattcagttgctgagttgaagagtggcgcctattctaaagatacaactaacatatctctgcatgccacgtcaacatctgcaacctccaaaatatctgttatccatgataatgctttgccaaatgcattacttggtacagttgaatatgagttgccccatgtgcctccatggtttttttcatgctggtagccagaagctttatggggttcttgctggaataattagacttgttggcctatcaacagtgtcaggatagcatactcatacagtaatattgttgcatgtcgctcttaacaaatttcattcaggaaccgggccatgttgatgttcaaaagagttgccagaag

SEQ ID NO: 16108 - DNA, 220 bp, Zea mays
  Clone ID: MRT4577_114691C.1
atcacgagcgggcgcgctttttcattgatgcgttttcacggtagtacaaggatggaactggagtccaaccggcagcagagaacacgcacggaatccacaccatgcgtagtctaatccaatcgacgtcggcagattgccagccgtcgtatagcagacagagagagagtgagactgcattgatggatagtaacgaatagagggcgatcacgcaggacgcagc

SEQ ID NO: 16109 - DNA, 480 bp, Zea mays
  Clone ID: MRT4577_114692C.1
accggccagagctgaacagcaacagcagtggtgtgttctggcttgtgcggaacctaaaggaagcttacacaacagagaatagtattgtgttagggcagtagcattgtcttcttcaatggaattgccttacctttctgctacaactgatacattagcccaagctcactaggctagcgatgcttcacattccatttctttactttaccgtgtcattcacgacccatcttgttctggtgatgcactgagaacaaaagaagttgccattacttaccttacacactacctcactaaacaaaacagagctgatgagctgcgttttcttttgacccagatcataccatgctttgctgccattcctaaagcctagactgcatgaactggccgtggaataagcgatgctgtcgacaccatacctgtaacatcatatcttcagattttactctgcaaggaaatggtggaccggacccgagcagagaacat

SEQ ID NO: 16110 - DNA, 279 bp, Zea mays
  Clone ID: MRT4577_114693C.1
tggacgcgtgcgccgacacatgctcaaaatcagacttcactggaagatgagaggcaggaagactgagaagcgtgtacaagggggtgtacaacaccataggacgggcgatcgcggagcactgttgatcaggacactagagcatacagacggtcgttacgggcgctatgggcacaatactggaagccaggtaaaaaacagagcatattgttgggcttttgggtactgaggcttgacctaacattgcagaacattaaggcatgggttggaggctgtttgata

SEQ ID NO: 16111 - DNA, 247 bp, Zea mays
  Clone ID: MRT4577_114694C.1
aagcgggcgtagtatttggccagctagctacaacaagccctgctaccttcttgacacaacaacaattgctttcgttctaccagcagtttgtggctaaccccgtaacccttttacaactgcaacagatgctgccatttgtccaacttgctttgacaaacccagcatgcttctaactacaacacataattggcggagccctctcttatattgcttactagaggacattcaataatgaagctttttggct

SEQ ID NO: 16112 - DNA, 566 bp, Zea mays
  Clone ID: MRT4577_114695C.1
gccggccgggtccggaaaccgtcgtcctcctcatactcctctccgcaataccctccctacctcgtcgtcgccggcgcatctgtcatgggggcgtactagtacgtctcggagttatgtacaaggaatcaacccgacgtgatgcggttcgttcaacgcgtgcgctgttgagagtacaggcagttttcggccatcgtccggctcacaaggcccacccgcctcgacaatggccgtcgtctcggcttctaggccaagaagtcgtatgttgtttagcgcgtgagtgtgaggtgtgccggccggatgaggtctgtgaccaatggtattgtctatggcaagctcaagcaccagggtatcgcccagttcgagttccagactaactagatatctgttgctgaggaacactttggacaatagcttggcgaactcatgattcacgactcatactgcgtgattgaggacagtgcctactgttactttgagatcagcctgaatgatgtggcctactgtgccctctgaagctgactcgagaatcaactggctatgtgatcctgtgcacaaacatcctgagc

SEQ ID NO: 16113 - DNA, 201 bp, Zea mays
  Clone ID: MRT4577_114696C.1
ggtcaacgtccatctcctgcggctgctgctgtggctgctgctggtccgccatggctcctgctccttcactgagatcagatcgatgaagcactaacaacaaccatttatatcaaggaacaattcgtagacgacagtataaaaatcgaaactttcatacatgcacaaacgcttcgttctcggcctgcccgggcggccgctcga

SEQ ID NO: 16114 - DNA, 496 bp, Zea mays
  Clone ID: MRT4577_114697C.1
ggggccccttggaacaaaacaaaagggggggggaaaaattataggggggaacggttccctagaaataaacaacatattttttctctacatcaaaatatcaaaaacatttggccaaaagaaggcccccccaaggttagggggacagatcacaccctttaattcaccgggttttttcccttccctatggggccaagggaaaacaacaataatatagggttgatatgggaagacacctatgggacctgggggaggggcgattcgatcgatcaaaagggcaccttaatccaaaaaggtccatgggttttacaccaaaggaggatttgtccggtggaaaaaccatggacttttgaaggaggagctccgatgaaaagaactctgggatgggcacgttttgggacaccccccatttttttgggaggaagggtcctttcagcatcctgatcacctcaaacattttagggcagggagacaggggggactgacttaaccctggcct

SEQ ID NO: 16115 - DNA, 1314 bp, Zea mays
  Clone ID: MRT4577_114698C.1
ggggaggagtgatagatcggaaggcggcggagggaaatacgggttctggggcgcagatagcgacgtcggcggcgggacttgagctcgagcgtggctgcgatttggtctggtggtgaggactaagtgtggagaacaagggcggcatgctcgacggcgaggccgtgaagaacaagggaggtaatcacgatcaggagaactccacgagcttcttcttcttcttggtgacggcggtcgcgcccccggctggccctgggacggtctgcttgcacctcggccttggcctcctcctccgccttcctccctctcttcttcttcttgtgccagcagagagcagatcccagcgcgcggtgctgggtgtgcgtgtccaacgccgaacaaaagagagacagagagcagatgtaacgaaagagaagggatcctaccggagagaagctcgccagcgagtagaggtcgccggcggcggggaggatggctcgtcttcttccgccgccaccgctcctgggtctcacggtctcacaggatttgttccagacccttgcagccttggctccaatccaggaccgtctctggccatgtccttgccgccgtcaactcctcgcccaaccccagacccacccagagaggctagagcgaggccgcaggcggcggcggtggatggccgtgcgtgtataacagtagcttacaataataatgccgatcgtaggcccaccgccagccgcgcgcgccggactcgctgacaaacaaaagtgacggcagagtttgcaacgttatatagtgcctgaaaccaattttaagatatactcccttctcatgttagtatttattttagcttttagtttatatatgttaagggtcttctccgcggaagatccttaaaatgtaaacacctttgacaaaatgccacaagaagtccaccctccttctgccgaatgttctcaagacgaagacgacctcgggaaggagtagcaatgcagaacgccgaagctaccgatagcttcggttcagagcaagaaggaaaagactagatagaacttgttagtttaagttgtttataaacaaatgttcaagtgcatgatgtaatttttcctgggctgtgtcccgtgcgtatacatagatgaacagtaacatcgtattgttcacgcggtattgtaatcattctctcgcgtccacgcggtattgtaatcattctctcgcgtcttcaccttcgagcaaactgaaggtatcattgtaatgttaatattgttagtattcatacatgttttatgaaatacaaacatgtatgaattaatgaaatgcagccactgtctttaatcc

SEQ ID NO: 16116 - DNA, 225 bp, Zea mays
  Clone ID: MRT4577_114699C.1
aattgaaaagggaacttttgaaaggaagcgagaaaaatatacacagatggaattaaagcaaaacaggtaaatcaatgatgaaatcaaaacaaaggcaagaaaacccaaaaggtctggttaaataaaaatgagggcccggataaacaaatttgatcgggcatttgggatctcctttgcaaggcgttgtgcccaaatttgataaaactggcgccgttgacaaggaaa

SEQ ID NO: 16117 - DNA, 471 bp, Zea mays
  unsure (1)..(471): unsure at all n locations
  Clone ID: MRT4577_11469C.1
cggacgcgtgggcggacgcgtgggtccaactttgttgtgcattagtgttcttgtagtcacgcctctatccaagggccaaaatgggaagctggtgtcgtaatggtttattgaaggggaaaaacagattgatacctggttcttggtcaatgttgctgggacgccttcacaccaatctgcaattttcatcatatttggctggtttttcctgctcctgatcagattttgaaagagctaaccattgcccacaatcaacttactgtccggttcggtcagggtgctgctagctcctcccaaagtttctctccaatatctatacaatttgtgccagtccatctaatcaccccgcgcccctagagaataggcattgaagaaactggtagcctgttcctcaagatcataggggggaaaaaagcacataatatataacgaactcatctgctgntctttcaataattgtatggtcatcacgga

SEQ ID NO: 16118 - DNA, 686 bp, Zea mays
  unsure (1)..(686): unsure at all n locations
  Clone ID: MRT4577_1146C.1
gccggccgggttccgaaacgatcgcaaacaatcgaaagaacgacgtgggagagcgagcgataaaagccagagcgagaggaagagcaagagcaagagcaagagaggagcgatcgatcgagaggagaagacgaaagagtcggattgccatggacgacggcaccgtgatcatcctcttcttcttcttggccttcttcatgttcaccttcgccgcgtccctcttcttgtggttcacgatatggtggccctggctctgccgcggtatcaccctgacgcggaacctgctgagtaacctctttaccctgtgccaagccagcatggaggccgacgagtagatccgcacgctctcctgccgccacgtcaagtgcgatgtcatcgacgaatggcttcgcactggacggatgacgtgctaccgtggaagcggttgccgcggacgtcgtcgacgcgggatttgaaggaggcggggctagttgctttccggcgcacaacgacaaactacctgtagcgtcgtttctttttatgcatctatcatttcgtcatttcttttccggcatccttggaactggtcgagggtgggtagtgcgtctttctgatagtcaggaactcaggatctgttcttcacgtactccttagttgtttccgtttttgctgcgttggaactgatcgaattanctaattcctgttctttt

SEQ ID NO: 16119 - DNA, 306 bp, Zea mays
  Clone ID: MRT4577_114700C.1
ctcctcactgccgcgccgccaccccctacaggtaaggaagaggagggcaggatgtcgcaccgtaagtcgagcacccgaggcacggctccctcggcttccttcccaggaatcgctcctcccgtcaccgcggaaaggtgaagtcattccctaggatgacccaaaaagcttgcatctcctaactccttggctaaagctgcatactacatgtcctgaggttagagcaggaccaactcctagaagaactttgagtgttacacatgaacctctctgcatgtggctctgatatgtagatctctgctcgaatca

SEQ ID NO: 16120 - DNA, 515 bp, Zea mays
  Clone ID: MRT4577_114701C.1
ccggccgggttttgaccaaaaaaaaaacaggagcatcaggcgtcacttggccggggccgtcgccacggcgatcattgcgacattgccccggcaagacgcgtcacgcgctcgtttgggttcctcccacgcctgacgccgggtgttgcttccctctgcgctgtcccatctcctggatcgccatcttcactcctccgtcgccgtcgacccggatcaaatcttccatcggatgcgacgttcggggggcgatgagacgatcggtgtccgctccgatccacggctccgttgcttttgcgtgaacacaaccttcttcctgtcgggcacgcacgcacgttcttggggcgagaaatcgtggtcctggtggtggtcgcagtcgcgggagagggcttagggctgacgtggcgatgcttgcgcagccttgaagcaatgtgttaaccgccgcttatgctgaaaatttggcgaatataaacttgcaacttgcaagctcttccaaaaaaaaaaaaaaaaaatttgcggac

SEQ ID NO: 16121 - DNA, 541 bp, Zea mays
  Clone ID: MRT4577_114702C.1
gtgtctgtcaaaatacttatatatatctgtaaagtaaatctggccagtacgctggcagggcgaagagaaggaggaaacgtacacacgaacagtagagttcttgaggtcgcagctcgttgagacatctccttcagatcaattctacccgcgaacagagacggagagagagagaggtacgtacacacgaacagtagagttctttcaagtacccttacactgtatgcgcaagcatccgtctttctcagacagccgcaaccacccctagccactgtccgtgcacaatcatggagctgctgaggagccttgcatcccgtttgcttccagccagctttaatttcgcgagggtttctggagaacaataatgtgtgtgatcctcaggctgccaatgcaataatacttgcagtgtgtcctgcaggaaaccacgtcgccatgtactgttggtgcatggtacagagcaactgagctcactacagcactcagcatggcgtagcaagaggcagttgctatgaatggagatatacaaaggaaaatcaaaattata

SEQ ID NO: 16122 - DNA, 1279 bp, Zea mays
  Clone ID: MRT4577_114703C.1
cgtccggggagagacccaattagctgcagggattggtcgggttcggctccgccttcggagagtcccaagagatgggtggcgcggcggcgggtaccaagtggatccaccacatccagcgcctcagcgcggccaaggtgtcggcggaggcggtggagcggggccagagccgcgtcatcgacgcctccctcaccctaattcgcgagcgcgcaaagctcaaggcagagttgctgcgtgctctgggtggcgtgaaagcttcagcgtcgctcttaggggtccctcttggtcacaactcatcctttttacaaggccctgcatttgctcctccacgcatacgggaggccatttggtgtggaagcacaaactctagcacagaggaaggcaaagaattgaatgatcctcgggtgctaactgatgttggagatgtccccattcacgagatccgtgactgtggtgtcgaagatgacagattaatgcatgtaattagtgagtctgtcaaaacagtgatggaggaggagcctcttcgaccgttggtgttaggaggcgatcattcaatatcttatccagtgaataatggaaggtggttatgccaggagactgctacaggttggattgagatcaatcaccaaagaagggcgtgaacaagggaagagatttggtgtggaacagtatgagatgcgaaccttctcaaaggaccgagagaagcttgagaatctgaaacttggggaaggcgtaaagggtgtgtatgtctcagttgatgtggactgccttgacccagcgtttgctcctggggtctctcacatcgaaccaggaggcctctccttccgcaatgtcctcaacatcctccagaatttgcagggtgacgttgtcgccgctgatgtggtggagttcaacccacagcgtgacacggtagatgggatgacagccatggtcgccgcgaagctggttcgggagctcactgctaagatctccaagtgaaacggtcaggattgcaccactcttcttgaagcaaagcgaaagggtgggttttgatgtcccggtggttattggtcatggtttctatgtatcgagcaccaaattgttcgacatgtgacaggtttatatgttaattaggttgcaataacaccataatggtttatttatgctggattctgaaatctaatctgccggattctagattaaaggattcgattgtcagggatttctcgaacttggatttgattagtgagctggaatgactaaattatagttgatgcagtacataccattatttttttttgtt

SEQ ID NO: 16123 - DNA, 173 bp, Zea mays
  Clone ID: MRT4577_114704C.1
gccgggttcccgcggggtgcgggccgcgcgtcccctgacgcatccgcactggtctcggcgcagccgtccgatcagatcgcaggctctcagcacccctcatctgcgccgcactcagcgctattactttactagtatacagtagtaccgaaaaaaaaaaaaaaaaaaggccccta

SEQ ID NO: 16124 - DNA, 1637 bp, Zea mays
  Clone ID: MRT4577_114705C.1
ccacgcgtccgcagagattcgaagaagacacaaataaaatctcgccaaattcatgaactctctagtctctactcttttctcctggcaacgatttccaaacgcacgcaaacgctgtcacagtttgtcacggcagcggcaagtcggcaacgctgccgcggcacgtctcctccctctcttttccggttcgggtagtcgggtgtaccgccattcgtgatcgaaccagactcgagagggagaggaggagggagtccgaggggagagacccaattagctgcagggattggtcgggttcggctccgccttcggagagtcccaagagatgggtggcgcggcggcgggtaccaagtggatccaccacatccagcgcctcagcgcggccaaggtgtcggcggaggcggtggagcggggccagagccgcgtcatcgacgcctccctcaccctaattcgcgagcgcgcaaagctcaaggcagagttgctgcgtgctctgggtggcgtgaaagcttcagcgtcgctcttaggggtccctcttggtcacaactcatcctttttacaaggccctgcatttgctcctccacgcatacgggaggccatttggtgtggaagcacaaactctagcacagaggaaggcaaagaattgaatgatcctcgggtgctaactgatgttggagatgtccccattcacgagatccgtgactgtggtgtcgaagatgacagattaatgcatgtaattagtgagtctgtcaaaacagtgatggaggaggagcctcttcgaccgttggtgttaggaggcgatcattcaatatcttatccagtggttagagctgtgtctgaaaagcttggaggacctgttgacatacttcatcttgatgcacatccagatatctatgattgttttgaagggaacacttattcgcatgcctcgtcatttgccagaataatggaaggtggttatgccaggagactgctacaggttggattgagatcaatcaccaaagaagggcgtgaacaagggaagagatttggtgtggaacagtatgagatgcgaaccttctcaaaggaccgagagaagcttgagaatctgaaacttggggaaggcgtaaagggtgtgtatgtctcagttgatgtggactgccttgacccagcgtttgctcctggggtctctcacatcgaacctggaggcctctccttccgcaatgtcctcaacatcctccagaatttgcagggtgacgttgtcgccgctgatgtggtggagttcaacccacagcgtgacacggtagatgggatgacagccatggtcgccgcgaagctggttcgggagctcactgctaagatctccaagtgaaacggtcaggattgcaccactcttcttgaagcaaagcgaaagggtgggttttgatgtcccggtggttattggtcatggtttctatgtatcgagcaccaaattgttcgacatgtgacaggtttatatgttaattaggttgcaataacaccataatggtttatttatgctggaaaaaaaaaaaaaaaaaaaaaaaaaaaaaaaaaattctgaaatctaatctgccggattctagattaaaggatccgattgtcagggatttctccaacttggatttgattagtgagctggaatgact

SEQ ID NO: 16125 - DNA, 178 bp, Zea mays
  Clone ID: MRT4577_114706C.1
actggtgccgatgtcagcgcgtcccctgcggatccagacattcctcatctcgttgcaatgatcactgccaatgtgacgataaatggaggatgctgagtgtggagtttgcacggttaatgtccatgtctgtactatctgggtagtcttcaagaccagaaacataggcaattggaggtgt

SEQ ID NO: 16126 - DNA, 1705 bp, Zea mays
  Clone ID: MRT4577_114707C.1
cattgggcatttcgacgccggcgggggctttctgacctcttctggaatcctgcgacgaggggaccgaaatggcctcgtcctcctctgactccggccgcatcgccggaaccctagccttgcgtacgagctcggccttagcggcggcgtcgctaatcccggggctcccggacgacgttgcagctgtcattctctgcctgctcaccttccccgaccagtcccgcctccgcgccacctcgcgcgcttggtgcttgctcctctctgcggctacgctcctcccgctccgccgtagcctccgtctcccgcgccgccaccttctctgcctcttccccaccgacccatccctcgcctccccgatcctgctcgaccccgccgcacctaccacctggtggcccctcccgccgctcccctgttcgccgcagctttacggcctcgccaactttaccgccctcgccgttggccgccacctctacgtcctcggcgggtcttgcttcgacgcccgcagctaccctttggggcaaccctccgcctcggcggcggtctaccggcttgaccttgccaactctcgacattgctgggaacgccttcccgacatgcagctcccgcggggaagcttcgcgtgtgcccacgcgcccagtgctggcgggctcctcgtcgccggtggcgggtcccgacaccccatgttcccctccaacggcagccgcaccggcagcaccgagtggtatgatgccaccacgcactcgtggcaccttggtgcctcgatgcctcgtgatcgggctgggtgtgttgggttcctggcacgcggagcaggggatggtggtgaggatgagttctgggtgatgggcggctatgatggatacaccacgttgggaggagtggtgccaaatgacgtgtactgtcgggacgcggtggcgttgggactatggagtggtaagtggagggtgattggagacatgtgggaggaaggggagaggaggcgtcttggtcccattgcagctttatctgcagatgatggaagaattaccgaggtgttcatgctagacggcaatgatgtcttcaggtatgacttcgcttcaaataggtggctgaaagaggcaaccacgagaagaaagatcccaaacactgaatcttgcggcttcgtaccaatgaacggggaactgtacgtgctcagatctgcaaaagttcgtgttgaatcctctggtccgtggaggcagctgaagaagaagctggctatggagtttcaggtgtacaaccctggggcaaagaaatggagagtgctcaccacgtatccacctgttgatgcacccattgatttcaggactgcagctctgtgtacagttgagttgtagatccattagtagtcaccattaactgtacatattcaggtggcaagcgcaacaatcgattgcaaatatagacatgaaaatgcctaatgcttcaagtgctcccagcagatagtttgttctagcgtgtttatatacagtagagataacattctggagtatatcgcaagaattggtgttttttggtgctgaatgtgattgctgctaacaagatatgaattgtaccagcctgttattattgcgtcagaatcactgtttagctacacagccgtttcgcctatttacatgccgtgtaactggtgtacattggattgtgtctgtttaatcaactgtttatgctgcttaatcattgtttagttcatttt

SEQ ID NO: 16127 - DNA, 379 bp, Zea mays
  unsure (1)..(379): unsure at all n locations
  Clone ID: MRT4577_114708C.1
cgaacggagggaaagccagacagaagaacaggaggacacgcacaggggcacccgcaacccaaacgaggggggcgggcaagaccgggaggccgnccagcccagaaagaaaaaggcgaaagagganggacaagcgacaccagaagaaggggaagcagacgaagaaaagccgaacgacggacgcaagaaagggccagaaagagaaanaaagccgaaaagaaagcggcacaacgaagaagggcagcgaaagcacgaagaccgcgcggaagaaggagaaaaaggagcaccaaaagaacaagacacgagcagggagaaaaaaggaaggaaacggaggcaaaacaaaagggggcagcgcaggcncngccaccaacaaaagaaagga

SEQ ID NO: 16128 - DNA, 365 bp, Zea mays
  unsure (1)..(365): unsure at all n locations
  Clone ID: MRT4577_114709C.1
atatcctaatcttaaaaacaaatgcaccaggttgcatatcgtgattggggggtggcatttctatnacaagaatccctttgaggcaattccaaactggcaattatttgttctgtttgaccgtcccaaatctttaatagttaaacgttaaacacacttatgtttgctcaacttgcgaaagctataaaaaacaatgccctatttaattaaaagaaaatttaaaatataaatgcttttcttgagcaaatcattcaattgaaggatgaacttcaccgaatgaaatctaatggatgcatataaaggaacaacggcagctttgccacttgatggaaccctagtcccagtttgcatcttttgaaaattaattt

SEQ ID NO: 16129 - DNA, 605 bp, Zea mays
  Clone ID: MRT4577_11470C.1
cggacgcgtccgagaagcagaacagaagaggcacgcaagcgtgagaaagaagcgagagacatggcggaggaggggaaggtgatcgcgatccacagccaggagcagtggagcaccaagatcgaggaggctggcagcagcacgaatctggtggtgatcgacttcactgcaacatggtgcggaccatgccgcttcatttctccaatcttagatgagattgccaagaagcttccaaatgttatgttcctgaaggtggatgttgatgaaatgaagtcaattgccgaggagttcagtgttgaggctatgccgacgtttgtgctcatgaaggaaggaaaggtggtggacaaggttgtgggagctgccaaggaggagctgagcgggaagattgccaagcacagtgcaactgcatgcgctaaataaaatggtccttcaactctaaattcgagaataagatgtgtgtcagccgctgcttgctactaccgctcaactcatggataagctggcaccggtgcagatagagtacgtaatgtaatgttaaaccctgttaatcgcgcggcgcacacgtactggcgacaaactgtatgtgatgataacatcggtccacgaat

SEQ ID NO: 16130 - DNA, 496 bp, Zea mays
  Clone ID: MRT4577_114710C.1
ttttttttttttttttttttttttttttttttttttttttttttttttttttttttttttttttttttttttttttataggaggccggggtcccccggggaaacccggcccgggcccgggggggggaaaaacggcccggaaagggggggggaaaaaagcttgccggaaggaaggggaaaacgggccccgggggaaaaagggaaaccggccaaaaacccaaaaaaaaaaaaagccggaaaaaaaaaaggaaaaaacgggggggcaaaaaaagggggcaaacccacaggaataaaggggggaaaaccgccccctaaaaagggggaaaaaaagggcccccacccaaaaaaaaaaaacggccaacccccgggaaaaagaggatggccaaatggccgcaaagagggggaatgtttaaaagagcgaaacgggcaacacctaatagccctaaaaagcggggcccagaaaaaggcgccaaaagccgcccaccctggatggcccc

SEQ ID NO: 16131 - DNA, 1497 bp, Zea mays
  Clone ID: MRT4577_114711C.1
gacaagttcatcatccagccccgcttgcgcttggccggggaccccttaagtccggcattccattccatccgtaccttccttgtcaccttgaccttccccctctccccctagtcccctacgcgccagtccacaggacctcgaccccgctaagcaagctccaagagcgatcgccgcagaagatcccgcgatgcaggccccgccggcgccctcctccgtcgacctgccgctggcggtggcgccgccgccggtgaaggcgccgaccccgcggcccccgccgccggcctcgctgcagcccgagtccccgggggtcttcttctccgccgccgccgccgccgcgcccctgggcaccgcccaccgccgcatcgccatcgccgtcgacctctccgacgagtccgcctacgccgtgcgctgggccgtcgccaactacctccgccccggggacgccgtcatcctgctccacgtgcgccccacctccgtgctctacggcgccgactggggcgccgtcgacgtctccctccccaaccctagcgccaccgccgcctccgaggacggcgacggcgacggcgactgcgagaccgccgccgccgcgcgcaggatggaggacgactacgacgccttcacggccaccaaggccgacgacttcgccagcccgctcaaggacgccggcatcccctacaagatccacatcgtcagggaccacgacatgaaggagcgcctctgcctcgaggtcgagcgcctctcgctcagcgccgtcatcatggggagcaagggcttcggcgccgcgcggaggaccagcaagggcaggctcggcagcgtcagcgactactgcgtgcaccactgtgtctgccccgttgtggtggtgcgcttccctgatgacggctctgccgagggtggggaggccgctggtttgtccgccgcggttggtgctgaggatgtgctgcaccccgtgccggaggaagaaggcgagtaccatgacgctgcggaggagcacaaggatgcttgacctcgttgatgcattgtgaagtcctcttggattcagcatgtagaggttctagcattcgactgttggctgggtgctaagctgggatttgtacttgagtgcatgtgatgtttatgaactcccattaccggtgtctatccgtgctttcgctttgtttgtatcctccgttacctttgttcatgtagcttgtctgacttccactgcgtggtggatatatgtctgaacatttgtagctactttgcgttgcactgtgtttctgatgaaagttacaggttactggtcacttctatagaacccaaaaaaaacaaggatgcaaattcgtcctgaatgctcactatccgtgctttcactttgtttgtatcctccgttaccttttgttcatgtagcttgtctaacttccactgcgtggtgaatatatgtctgaacatttgtagttactttgcgttgcactgttttctgatgaaagttacaggttactggccacttctatagaaccc

SEQ ID NO: 16132 - DNA, 274 bp, Zea mays
  Clone ID: MRT4577_114712C.1
cgcacgagataaaatgaggagttgggccacatatcgacactttgaaattcttctttcctagtcacacataaaccgggcatagacaaaaaggcacccaaaaaggggttgtgcgcctcacaatagaaaggtggggggggcccgaaacaaaaaatgggcataaaaaaacaatgttacaacgggatatatcaaaaaatatacttatataaaaacacgacgttaaagggtgatttttttaatggggtcaaaagaaaaatgtggtgtgtgcccaccctct

SEQ ID NO: 16133 - DNA, 1334 bp, Zea mays
  unsure (1)..(1334): unsure at all n locations
  Clone ID: MRT4577_114713C.1
ccggccgggacgacttcttctttccggtaccttctccccttcctctccctccctagtccctagtcggcagtcccccgaccccgacctcgctaagcaaactcccagagcgatcgccgcagaagatcccgcatgcatgccccggcgccgccctcctccgtcgatctgccgttgtcggcgccgccgccgccggtgaaggcgccgtccccgcggcctccgccgccggcctcgctgcagcccgagtccccgggcgtctttttctccgccaccgcacccctgggcacctcccaccgccgcatcgccatcgccgtcgacctatccgacgagtccgccttcgccgtgcgctgggccgtcgccaactacctacgctccggggacgccgtcatcctgctccacgtgcgccccacctccgtgctctacggcgccgactggggcgccgtcgacgtctctctccccatccctagcgcctactccgaggatggctttggcggcggcgacgccgattccgaggccgccgctgcgcgcaggatggaggacgactacgacgccttcacggcctccaaggccgacgacatcgccaggccgctcaaggaggcgggcatcccctacaagatccacatcgtcagggaccacgacatgaaggagcgcctctgcctcgaggtcgagcgcctctcgctcagcgccgtcatcatggggagcaagggcttcggcgccgcgcggaggaccagcaagggcaggctcggcagcgtcagcgactactgcgtgcaccactgtgtctgccccgttgtggtggtgcgcttccctgatgacggctctgccgagggtggggaggccgctggtttgtccgccgcggttggtgctgaggatgtgctgcaccccgtgccggaggaagaaggcgagtaccatgacgctgcggaggagcacaaggttccaatccagccatgctcgtcactactgatgttcccgcctccctgccttggtggatctgcatgtggaggccactgaggacatcatgtctgctggccttcggcatgatgcttgacctcgttgatgcattgtgaagtcctcttggattcagcatgtagaggttctagcattcaactgttggctgggtgctaagctgggatttctacttgagtgcatgcgatgtttatgaactcccattaccggtgtctatccgtgctttcgctttgtttgtatcctccgttaccttttgttcatgtagcttgtctgacttccactgcgtggtggatatatgtctgaacatttgtagttactttgcgttgcactgtgttnctgatgaaagttacaggttactggccacttctatagaaccc

SEQ ID NO: 16134 - DNA, 244 bp, Zea mays
  Clone ID: MRT4577_114714C.1
ctttcgcgtgggggagcgcttggggccattctggacgtacattttctgcagctagcggccggtgtacagcagctgcgcgagcacgatggtggacgtggccctggtccccagcgacgtcaccatgggcagcgcaagccccacctgcccctgaaacatcatgcatatccccttggagatgctctggccctagcacatacacgcacaaagccgatgtagagacccccgccccggccgaccctggcca

SEQ ID NO: 16135 - DNA, 131 bp, Zea mays
  Clone ID: MRT4577_114715C.1
aaaccccaaacgccaagcattcttgcgggatagtcccgtcccaaaaggaggggtccattgcacaagaaaaatacctacctcaacagggacggaatgggccacgggggggggtccccttgcggacccgtggg

SEQ ID NO: 16136 - DNA, 548 bp, Zea mays
  Clone ID: MRT4577_114716C.1
ttcgtaaaaaaaaaaaaaaaaaaaaaaaggggagggggggggagaaaaaaaaaaaaaaaaaaaaaaaaaaaaaaaaaaaaaaaaaaaaaaaaaaaaaaaaagaaagacaaattttaaaggatcaaaatttaatttacaatgagggggcgcgcttttagatttttttttcgtgaaccctagatttctgtggggggggggggggggggttcaccgttctcctctgggaattcctgggggttccccttttttttggtctgccccaaaataccctttttggccgccggtttaattgcgtggggggcggaacccttcgggtttcccagcttttttgcctcttggggggcttttggttctcccgctggcggggtgcttaaaggggggcggttgggggggccctcccagggggccctttctcttggggggggggggttccccccttcttttgcttttttccttgcggttgtgggaggtcccccggttttccccgttacttttcttttgggggcttccctttggttttcctttttggcttttttgggcgggccccc

SEQ ID NO: 16137 - DNA, 654 bp, Zea mays
  Clone ID: MRT4577_114717C.1
cggagctgctggccccgacacgcatcgactcccgccgccgccgcttccgctccgtcgctcgcctcacgcctccggcgccacctccaccatggccccgaagaaggagaaggccccgccgccatcgtccaagccggccaagtccggaggcgggaagcagaagaagaagaagtggagcaagggtaagcagaaggagaaggtcaacaacgctgtgctcttcgatcaggccacctacgataagctgctctccgaggtgcccaagtacaagcagatcaccccatccatcctatctgagcgcctcagggtaatgctacctcgccttcgtaccttactgccttcctgacgatagagcctcaatgtggtagttgtggcatgtgtgtttagcatctggtgaatgaactcggcatgattcccaaaatgattttatagtacagtaaatatttagcgttgcataatgtagtctcctgtataattagagctgcagtttctgtcttatgtttacatagatgggtttaaacttgcatcatatgttttgcatagataaattttctgtggctcgaaactattcaattcatcatgcttattttgactcgggctgtagattttagctgtctggatttgatcgtaggaaagcagcatacttgtttgtggcttggc

SEQ ID NO: 16138 - DNA, 844 bp, Zea mays
  unsure (1)..(844): unsure at all n locations
  Clone ID: MRT4577_114718C.1
attgggaccctcgaggccggccgggtcctgacctttttgagtctcttcttcccccggcggcagcgggcagcgcaggcgagcagaccaagtcgcctgcagagtgcagactgcagatacagtccgtgctctgacggagcaacaggagaagcagagcgagccgaggcggagtcgacaggcgagtggttccaccgaccgtctcccctgccgcaagcgaacgggtgagcggggcgccgtggatctgatgtccctttgagattctactctgcttctgttctccctacagcttggtgccttatcatggaggaagcggggaggggctgcggcttgctcaaggtggttgtgacgcacggccggaacctagccgtccgggatttcacgtccagcgacccctacgtcatcgtccacgttgccgacaaggaggtgttcgactgggaccggttcaagtacgacgacaagatgggccaggctttcctggacctgcagcctgtggcggcggcaaccaagctgcggagggcgctgcggctcacagctggcgagaccaacctgcggaaagtgaacccggacgccgacaactgtctgctctcagatagcttcgtgacgtacgccaacggggaggtcgcgatagatgctaggctgcggctgcgtgaggtcgagtccggcgagctgttcgtcacaataaagtggattgaacctgacagcgccaacactggaaagcaagcggatcactagctagcgacgcattttgcttgcagcactgcaaatatgtaaatatgacctgatgtgngctgaaatttatgaggattttttttaaatcgtatatttttatatcattaccaaggggaaa

SEQ ID NO: 16139 - DNA, 570 bp, Zea mays
  Clone ID: MRT4577_114719C.1
ttttttttttttttttttttttttttttttttttttttttttttttttttttttttttttttttttttttttttttttttttttttttttttttttgggcaaaagggggggaaataaaaaaaaggaaagggttattccccgggcccagcccaaaaatttaaaaacaaaagagggggccttgaagccccccatccaccccagggggacaggggccccccaggggggggggcctgggtatccccggggatccccccccccgggaacaaaattatggctcccccccaggcccaaggggacgtaaaacagggggggggccaaaaggccccattcattggggggccccccaaaaccaggtccttgaaccgggctgtgcctcccaacgcccccccgaattcccccccctccaaaacaaaactgaacccggaggagccaggggcccccccccaggagctggtgtttatgcccagcccaagggcccccaagaggggttcccgggagggggtcgcgtccaaccccccggaaaaacccaaattttaaaggccccccccaaggacccggggggcttccccc

SEQ ID NO: 16140 - DNA, 306 bp, Zea mays
  Clone ID: MRT4577_11471C.1
ttatcaaattgataacaccatacactcaccggaggcttcctgaattggtgggggcactatcaacaacacctaattggatctacactacacatcactccaacaaacagcaacatttgtgtctcttcgccatactgatcgacatgttacggcctattaacacttctaactgtcacaacatctctggcactattccatcccatgaaaaccatcacgaaacaccctacaccaagattgttgtaatactattcaatatccacccttattacacagtgcttgcgattgctgacatcattaggaaaaaaatca

SEQ ID NO: 16141 - DNA, 1141 bp, Zea mays
  unsure (1)..(1141): unsure at all n locations
  Clone ID: MRT4577_114720C.1
cggncgcgtgggcggacgcgtgggcggacgcgtgggttttgagtctcttcttccacccggcggcagcgggcagcgcaggcgagcagaccaagtcgcctgcagagtgcagactgcagatacagtccgtgctctgacggagcaacaggagaagcagagcgagccgaggcggagtcgacagcttggtgccttatcatggaggaagcggggaggggctgcggcttgctcaaggtggttgtgacgcacggccggaacctagccgtccgggatttcacgtccagcgacccctacgtcatcgtccacgttgccgacaagaccacaaaaacaaaagttatcaacagttgcctcaatccagtttggaatgaagagatgacattctccatgaaagaaccagtaggaataatcaaatttgaggtgttcgactgggaccggttcaagtacgacgacaagatgggccaggctttcctggacctgcagcctgtggcggcggcaaccaagctgcggagggcgctgcggctcacagctggcgagaccaacctgcggaaagtgaacccggacgccgacaactgtctgctctcagatagcttcgtgacgtacgccaacggggaggtcgcgatagatgctaggctgcggctgcgtgaggtcgagtccggcgagctgttcgtcactataaagtggattgaacctgacagcgccaacactggaaagcaagcggatcactagctagcgatgcattttgcttgcagcactgcaaatatgtaatatgacctgatgtgggctgatttatgaggatttttttttaaatcgtatatttttattatcaattacaatgtagaaggtgttgtatgagaatttgagatgcatcatgtcggtcatccagacgccgacatgtctccgctctcagatagcttcgtgacgtacgccaacggggaggtcgcgatagatgctaggctgcggctgcgtgaggtcgagtccggcgagctgttcgtcactataaagtggattgaacctgacagcgccaacactggaaagcaagcggatcactagctagcgatgcattttgcttgcagcactgcaaatatgtaatatgacctgatgtgggctgatttatgaggattttttctaaatcgtaaaaaaaaaaaaa

SEQ ID NO: 16142 - DNA, 121 bp, Zea mays
  Clone ID: MRT4577_114721C.1
gtataaaggaacttaatgtctcgtcaaaatagcacaactctagttctatttctaaaatagtctaatatctatggcaacgctacgatctcggagagagaaggggtggggccatcgacgatgg

SEQ ID NO: 16143 - DNA, 1266 bp, Zea mays
  Clone ID: MRT4577_114722C.1
cattgggtacctcgaggccggccgggacttcctcctgactttttgagtctcttcttccacccggcggcagcgggcagcgcaggcgagcagaccaagtcgcctgcagagtgcagactgcagatacagtccgtgctctgacggagcaacaggagaagcagagcgagccgaggcggagtcgacaggcgagtggttccaccgaccgtctcccctgccgcaagcgaacgggtgagcggggcgccgtggatctgatgtccctttgagattctactctgcttctgttctccctacagcttggtgccttatcatggaggaagcggggaggggctgcggcttgctcaaggtggttgtgacgcacggccggaacctagccgtccgggatttcacgtccagcgacccctacgtcatcgtccacgttgccgacaagaccacaaaaacaaaagttatcaacagttgcctcaatccagtttggaatgaagagatgacattctccatgaaagaaccagtaggaataatcaaatttgaggtgttcgactgggaccggttcaagtacgacgacaagatgggccaggctttcctggacctgcagcctgtggcggcggcaaccaagctgcggagggcgctgcggctcacagctggcgagaccaacctgcggaaagtgaacccggacgccgacaactgtctgctctcagatagcttcgtgacgtacgccaacggggaggtcgcgatagatgctaggctgcggctgcgtgaggtcgagtccggcgagctgttcgtcactataaagtggattgaacctgacagcgccaacactggaaagcaagcggatcactagctagcgatgcattttgcttgcagcactgcaaatatgtaatatgacctgatgtgggctgatttatgaggattttttttaaatcgtatatttttattggtgagttcaattaaaagaagagcgaaatgaaggatttatgctgcctgcgcctgaatcgctagcaaagaaactagtatcaattatgctgacacagcaataatgttaatgtctgtcttggggtgctgattttggaaagtcagcttgatctactggtccaggtggttattcatacttaaataaattgtaccaaattaagtgtctttagtgtcatttcttctaggagtagtataatatataacacctgtctgtctcttccttcgctcctttcttttcttgtaccatgcagaccacaaaaacaaaagttatcaacagttgcctcaatccagtttggaatgaag

SEQ ID NO: 16144 - DNA, 263 bp, Zea mays
  Clone ID: MRT4577_114723C.1
aaaccccaaaaacaggaaacacttttactgctacaggcctttattttaaaacaaaaaggccctttaacaaaacaaaagatggccggaaagaaatttttaacccaaccccaatttaatcccccaaaaacccccccggggaggtacaaaccatttatggaagggattttaaaaaaaccacgggccgggcccccaaattcaaaaaaaacccgaaaaccgccaaactagggtgttcctgcccctaacggtcacgggggacacttttt

SEQ ID NO: 16145 - DNA, 490 bp, Zea mays
  Clone ID: MRT4577_114724C.1
atattatatgcattataattaagtttgggtcataccacacatgattattgttgtgttgttttactgtttttttacatatatagattgagagggatgagaaaccaagactcttttatgcatgggtggtattgggggccaccccccgcatcataatggggttcccgttttaacccccccttaaaaaaaaagggaaaaaggcgaaaggaacccccccttttttggggggggggggaccaaaactttttttgggggccttttttttgggggggcccgaaataagaggttccacccccggggagagaaaacaaaatcgtttttatagggggccccaaaattattttaggggggggggttttaaaacgggggcaaagggaaaaacccggggggaaccacaaaaaaaggggatggggaaaaaactcctttgaaaaagggggcggaaacaaaaaaagggcccccccctggcgccttttaaaaaggggcgccccccgtg

SEQ ID NO: 16146 - DNA, 1219 bp, Zea mays
  Clone ID: MRT4577_114725C.1
ggtccgccgggaggcggcagcgagaccccccaccaatttccgaacccaactcaaccccgaggcccgcgccctctccgcccggcgcagcggctgcgagcttgaagccgtcaccgcccccgccgccgaggcgaactcgaagctgcctccgccacggcgagctcgagccattcctgcgttgctgaaccgcccccgccgtcttccttgaagagagagagagagagacacacacacagagggagggagggagggagatttgcttcctcctcctgcgccgctccattttgaaatcgatcccgttcgtttcggttgccttcggcctcggcggttcatgaggggttcaagaatgaatccaggtgaccgtagaacgcggagcacgatgacgatagtaattgtgatgggtttatcatgcttcttttacatactaggtgcttggcagaaaagtgggacaggaaggggtgatagcatagctctgagagttaaccaagaaactgactgtacaatcttgccaaatttgcactttgagacccatcataccataagtggcgctaatccattgatcatgtccaataaaatgattgagccatgccacatccgatacagtgactatactccttgtcaagaccagaaccgagcaatggcctttcctagacaaaacatgacatacagagaaaggcattgtcctgtagagaatgagaaactgcattgtctcaccccagcaccaaaaggatatgtcacccctttctcttggcccaagagccgtgactatgttccatatgcaaatgctccgtataagagtctgacagttgagaaagctgttcagaactggatccaatatcagggagatgtgttcaaatttccaggaggaggaacaatgtttcccaatggagcgaatgcttaccttgatgaacttgcatccatcatcccactcgctgatggcactatcagaactgcacttgatactggatgtggggttgcaagcttcggagcttatctaatggacagaaatgtattaaccatgtcatttgcacccagagattcacatgaagctcaggttcaatttgcgttggagcgaggtgtccctgcagtaattggagtacttggaactataaaggtcccatacccctctagatcttttgatatggctcattgctcacgctgtttaatcccatgggagtcaaatggcggtatgtacatgattggaagtagacccgggttttga

SEQ ID NO: 16147 - DNA, 313 bp, Zea mays
  Clone ID: MRT4577_114726C.1
ccaaagactagcaactggttacaaacattttggagggtaccacatatatggaggaaattgcaaacaaaaacatcattttaaccagctactataacatcaatggattaatgtaagttccataagctatctattgttttaaataccacattgatgataataatgctttacattttttatccaataacactattcactcttagaaaaccaaatattttacgcatgtgtacttggagatggttctgaacaataaactcatcaaccaaattacagtacttaaaatatcttatcgaaaaattcatactaatattaatac

SEQ ID NO: 16148 - DNA, 291 bp, Zea mays
  Clone ID: MRT4577_114727C.1
gcctgcttatgttttgttgcaaaggctaccacaaagacatgcttaatgacacactaaatgtacagatgcgcgggacaatgaccataacagtcccttgcagaacgtacaaaggaccgcataggcttattttctctgcgcgggctgcgaccacctggacacgagttacagcagctacctgacaacctacgatgcgccgactcatggtgatacatgtacggaactggaaggacgcttcatcaagatacccgacgagctaatgtccaaccgactctactctatgtatgctagccg

SEQ ID NO: 16149 - DNA, 483 bp, Zea mays
  Clone ID: MRT4577_114728C.1
gagctcatgtgcaatgctgcctcgttaaaaacctttctaggtaaaaactcacacctcgtgagaaaaccctagaaaggaaaaaagagtacagctagctccaaactaaagttttaatgtttattacagcccacatttacagcccacagtttcagcccacagtttctgcccaaagaaactttcaaacagaggctgcatcttcaaggatcatactttcatggataagttccatctctttggggtccttctccacattgggttgcatatgggagtctgctaattcccaatccttgatacaagacaaaatctccaccatatcactggggagacggcgacggcgctcctcaatcactctgccaacaagactaaaagttgattcagaagatatagttgaagcaggaacagccatcacatctttagcagggagagaaagaataggataggtaagtttatgttcatgccaccaactcaagatgttgaagtctt

SEQ ID NO: 16150 - DNA, 412 bp, Zea mays
  unsure (1)..(412): unsure at all n locations
  Clone ID: MRT4577_114729C.1
gcccagtcaggcagttgaanaacgacgggcagtgagcgcgngtactncgactccctataggaggaaaagagtaccctccaggccgccgctttttggacgaacttagagatttaagttcgacggccccgacgaacttaacattaagaacgtgggtcccgtcgaacttaacataaaaaacgtgggtaccgtcgaacttaacattaagaacgtgggtttttaagttcgacgggggccgtcgaatttttcccataagttcgacggcacccacgttcttacatttaagttcgacggggacaggtggccgtcgaacttatgggtcctacgtgggtcggcgagggctgcccattaagttcgacggtacccacgttcttaacgttaagaacgtgggtacccacgttcttaacgcttttcc

SEQ ID NO: 16151 - DNA, 485 bp, Zea mays
  Clone ID: MRT4577_11472C.1
cgactatttggaaaggtggcacggctggatgtcgcgcggtcggaaatcaccgggttgccccacgcgttttcaaactcttgcgcagacggacaggaatatgctttcttacgccacaacaggtattgccatacaacagattctactagaactgttgtgtaaagagacatgacgaaccgacccagcggcaacggaatcggaaacgctataggcttcctcagagctactggaatccgcgtacaaaccggaaactgacatcacggaccatgtagaggagatccagcggccgaagcaaggacattcaacgattatacggagcagcgacagaatatgtgagaggacgcagcggacgctggacgggtgcattgagctgactgcatacgtcgaccaggagcatagcatagatcagtttcgaagcaagagtgttttgtttatggcatgggggcaattggaagggggaagctttcaatgcccagggccgcggtatg

SEQ ID NO: 16152 - DNA, 197 bp, Zea mays
  Clone ID: MRT4577_114730C.1
aacaagcatgaaacaagtacaatagtaggtgccttgttttgtgtcgtcttcagagccttcatgtagtaatcaagaagcaaagaaggctctgaagaggacacaaaacaaggccgcaacaagcatgaaacgaggtcaatagtaggggcataaaaaagaaaagaaatgaaataggatcaacaaatgaagctgaagaagta

SEQ ID NO: 16153 - DNA, 716 bp, Zea mays
  Clone ID: MRT4577_114731C.1
ttatgccacgagcttggcactatgtacgtacgtaacccactaaccagacatgatcacatgaatcatgccagagaataacgtaacgtgcagagtgcctgggcggtccatcgtttattctttcacacaagacaacaacaaaagaacagactcgaaaccaacccgtaatcactcgaccacagtcgccctgctgctgctgctagtcagtatacaacgcttctgcagcatcagctcccgaaacctacccgcggcgtcggcgaggccggcgcgcaggagggcgtccagcagccggttgcaggcggagacgtcgaactcgggggccttagagcgctgccactggtcgacgacctccccggcatcctccagccgcccgcacgccaggtaggacgagaccacgcagacgtagttccggctcgtcatgcgctgctgctgctgcgactgcgactgcgaggtcgccaccatggacctccagatgtcccttatcctctctggcctgccgaggccggcgtgcaagatgacgaggaagtcgtaggtgatccattccctctggctgatcctcgcctccccggcctccaccggcggcgaattcacagagcccagaagctggcccgcgtcgacgtacacggacgcgaggtcccggtacagcgcccaccctccttctgtggacgacttcgggtctctggacatctcgtcgaggactgctctgaagccctcgcgct

SEQ ID NO: 16154 - DNA, 158 bp, Zea mays
  Clone ID: MRT4577_114732C.1
gggaaggtcacagcacaactaagtccaggacaggacattgtgaccatgacccagccacggtcaataccagaaagatgattcagagtctgaagtggtgccccaggtgccaacaggataacctctaacccccgactttgtctctggggtcctgttccttc

SEQ ID NO: 16155 - DNA, 469 bp, Zea mays
  Clone ID: MRT4577_114733C.1
aattcggcacgagggttttgtcacctccctgccgccgcctccgttcgttgtccgcaccgccgcctccattccccatccgcaccatcgtcgtccacgctggtcgcctctgttccccatccgcaccatcgccgtccacgctggtcgcctccgttccccatccacaccagcgattctggtcaaggccgaccactgtcaaacaatcgagagctggaggagcggctggcgcgcctccgcggcgaggcggcggcgtggcaggccaaggcgctctccgagcaggccgccgcggtcgccctgcacgcgcagctgcagtaggccgcggccgcggcgcgggcgtcggtcgaggagctcgccaccgccgtccagacggagtcgaggcgttcgtggaccctcgccgggccgggccggcgacaaaccacgcgtgtgtgggctgccggctgaggccgggctggagggggctggtgggggtggg

SEQ ID NO: 16156 - DNA, 607 bp, Zea mays
  unsure (1)..(607): unsure at all n locations
  Clone ID: MRT4577_114734C.1
acgacctcctcgtgctctccatcggcgccggcgcctccgtcgccaacggttcgagcacgccgatgcccgcacgctctccgcccgagcgggagctggcgcgcgtaaccgccgagggcgtcgcggacatggtggacgaatcattgggcatggcgttcgggcgcgcgcgcggaagcaactacgtgcgcatccaagccggtaaggcgctggtcccgatccgcgccgacgaagcggccgtggccgccgaagcgatgcttagcgcagcgtattcgtggagtcggtgnctgttccgggagcggagactgtcggagcagacgaacgccgagaaggtggacgcgctggccgtggagctggtcaaggagcaggagcggcggaggcgcagcccgcttccgaacgtggctatcaaacaggtcggcacaccggcgcggctgtcgtccgcgaccactgcttcgtcgggcactgggacggccaggacggcgtcgacgatgccgtcgccggcgtcatgggagtcacgcaggtagtagttgggttgattttaggccgtaattgacgtgtgtacatgcatatatgaaatgcaaagctaggagtggggtggggtgtgatgatttta

SEQ ID NO: 16157 - DNA, 320 bp, Zea mays
  Clone ID: MRT4577_114735C.1
acgcgggcagccaccagtatatctcgtctttttcgctctacggccaccaccatcgcctctcgaccgtgtgccgatacgttcgcgagttctgagttaagatttgttgaagccttcgagatggccctgcaaccgcaactctgccgccttggtcatgggccgatctctactggtacagtttaagtagctatgtgagatagtttttgcccttagcttgttgtcaatcaccaaggccaggagttctcttgcggatgtgttgcgccctcaagcagttacttccgttccggaggtctctgtggcggtgtctcgctgttcctgactgt

SEQ ID NO: 16158 - DNA, 523 bp, Zea mays
  unsure (1)..(523): unsure at all n locations
  Clone ID: MRT4577_114736C.1
gtgggtgtttttttttttttttttttttttttttttttttttttttttttttttttttttttttttttttttttttttttttttttttttttaaaaaaaaagggaggccaattttccagctgggtttccccagggagatgaaatattagggggggggggggggggggggccaacaacaaacctacttatttggggaacttcgaagggcacactccatgacaggatatccccttattttaaaatctcgacggagtagcccccccccccccattttgacccccaaaaaggaggattaaacacccatcctatccatggggggggggtagaacttaacattattattatccatcccctgccatgcttccatgggaggggtggccccgctcaaggcaatgggattgggaggaagctcnacagcagcataagggggccaagctgctgacaatgggggcgcctgtttgtaattaaataccccgggtcccccccgaacgcaaaagaaaacccccctccgggggacccaggg

SEQ ID NO: 16159 - DNA, 727 bp, Zea mays
  Clone ID: MRT4577_114737C.1
gaggggcggcgtcgcgctggtgctcacggcgcgggacgtggccgtggagggcttctgcacgagccggtgcgggcaccacgggtcgtacggcggcggcggcggcgggcgcgcggcgtacgcgtgggtgggcgacgccgccgaccagtgcccgggccagtgcgcgtggccgttccaccagccggcgtacggcccgcaggcgccgccgctggtgccgcccagcggggacgcgggcacggacggcgtggtgatcaacgtggccagcatggtcgccggcgcggtcaccaacccgttcggcgacggcttctaccagggcgaccgcggctcgccgctggaggccgccacggcgtgcgcgggcgtgtacggcagcggcgcgtaccccgggtacgccggccagctgctcgtggaccgggccacgggcgccagctacaacgcgcacggtgcgcgcgggaggaagtacctgctcccggcgctgttcgaccccgacacgtcggcgtgctccacgctggtgtagtgtagctgtagccgatctcacaggctaataaatgttggtatatgtaaatactgaacagtacacagtatgtatcatcgttcgtgacgtgacgtgacgtcgatcgtgacgggcaggggcagtgctaaataaaggacctgtgcttgaagctgtagtatccaaaaaaaaaaaaacccggaaaatagacaaatagaacgcgaagtgcaaaaagcatataag

SEQ ID NO: 16160 - DNA, 538 bp, Zea mays
  Clone ID: MRT4577_114738C.1
ctaatacgactcactatcatgcgcatagcggtctgcctagctaaagcaggcggatctcagctctgaaatcggactcaagacggggaaaaccattgcccagttggctgcatctctgaagttttgtttggtgttaaaaaaaaagaaatactcagttctcagatcggactcgggacggggtaaaaccattgtccagttggttgcttctatgaaggttcgtttgttgtaaataaaaaaataaaaaccaaacttgggctacctatgggaaaacgttattcccttgggaaaacattaaccccccacacttgcaccaaaaataggaacccgaagcgtaaataataaagcctggagctcccaataagtgagctaccctcaataaattgtttcccgcccactgccccctttccaatcaggaaaccttgtatgccacaaggcttaatgagaacaacaacggcgctggagaacttttttgcgttattggctcattttccctttcctctctgactaactggtggggctagggctttcagttgacgcaaac

SEQ ID NO: 16161 - DNA, 265 bp, Zea mays
  Clone ID: MRT4577_114739C.1
attcccggtcgaccacccttccgaaaaaaaaaacaacaaactaaaaatactaataaaaaacaacaaatactacactaaactacaaaaaaagggctgaatactctaaacgattcaaatttaaatctccttattttcgaatacttcatactttaatataggaacctaaatatagataactaccccatgcttacaaacgtttttattcaaaatacccacgtttacaaaaattatattttctctaattacttcactttttacaaaattt

SEQ ID NO: 16162 - DNA, 161 bp, Zea mays
  unsure (1)..(161): unsure at all n locations
  Clone ID: MRT4577_11473C.1
atggtctaatcttatagaattcaacagcaatttcttgcaagagtttcatggtaaagaatcctctatttttacttaagctgggcatgagcaaaagatgttgatttgcatgcagaaggcacatatgcattgnttcaaatgctaagttatatggcattattgct

SEQ ID NO: 16163 - DNA, 4936 bp, Zea mays
  unsure (1)..(4936): unsure at all n locations
  Clone ID: MRT4577_114740C.1
ttcaggaacaagaagatgcagagcaaagccacaaaagaaggaagaggaatccacagaaaacaacaagctggagaatggacctctggatgcaacagaagaggtgcatcatggagtcgaaaaaggtgatggacatgttacccgcaagagaccaaggagagcagcggcctgttctgatttcaaagagaaatccatacgcttatccgaaaaaaaatctgttgtcatggtcaagaagaatcggatggaggaggaagaagtagatgctgtcaatctgacaaaacttggaccagaagatccaccaccttgccggaagttgatcgattttatcttgcatgatgcagaagggaacccacaaccctttgaaatgtcagaaattgatgacttctttataacagctcttatcatgcccatggatgatgatctagaaaaagagcgtgaaagaggagtacgctgtgaaggatttgggcgaattgaggactggaatatttctggttatgatgaaggtactcctgtaatctgggtgtcaactgatgttgctgactatgaatgtgtgaaaccatcaaccaattacaaatcttattttgaccacttctatgagaaggctcaggtgtgtgttgaagttttcaaaaagcttgcaaaatcagttggtgggaatcctaaccagggcctggatgaattgcttgctagtgttgttcggtcaaccaatgccatgaaaggatatagtggaaccatgagcaaagatttggtgatatccattggagaatttgtatacaatcaacttgttggtttggatgagacatcaaacaatgatgatgaaaagtttgctaccctgccagttcttctttctctaagagaccagtgcagatctagggtggaactgaccaagttgccctctaacttctcgaacacaagtctgaaaattaaggactcagagtgtgatgagacagcagaagacgatgatgatgcaaaattagctagattacttcaacaagaagaagaatggaaaatgatgaagaaacagaggggtaggcgtggaacaccatcccagaaaaatgtctacataaaaatcagtgaagctgagattgccaatgactatccccttcctgcatactataagccatttagccaggaaatggatgaatacatatttgatagtgatgacagcatattttctgatgatgtgccagttaggatactcaataactggacactgtacaatgcagattccaggcttatatctttggaattgatccctatgaaatcaggggcagaaaatgatgtggttgtctttggatctggtttcatgagagatgatgatggcagttgctgttctacagctgagtctgtgaaatcttcgtcttcctccagcaaagctgaccaactggatgcgggaatccctatttatctgagcccaatcaaagaatggattatagagtttggtggctcaatgatttgtataaccattcggactgatgtggcctggtacaagctacgccaaccaacaaaacaatatgctccatggtgtgagcctgtactgaaaacagcaaggcttgctgttagcatcattaccctgttgaaagagcagagtcgtgcctcaaagctttcttttgcagatgtcataagaaaagtagctgaatttgacaaaggaaaccctgcatttatatcttcaaacatcacacttgttgagagatatattgtggtgcatggacagataatactccagcagtttgcagattttccagatgagactatccgtcggagtgcatttgtcagtggtcttttattgaagatggaacagaggaggcatacaaagttagttatgaagaaaaaaactcaagtgatgaggggagagaatctgaatccaagtgcagcaatgggtccagcatcgaggaaaaaagcaatgcgtgcaacaacaaccaggctcatcaacagaatctggagtgattactatgcacatcatttccctgaagattccaaggagggagatggaaatgaaataaaagaaattgatgatgaacaagaagaaaatgaagatgaggatgctgaagatgaaggacagattgaagagaacatctcaaagactcctccatcaacacggtcccggaagttgctatcacaaacttgtaaggaaatcagatgggaaggtgaaacatctgggaaaacattgtctggagaaactctatataaatgtgcttatgttagggaactcagaatacctgttggtggaacagtggctctagaagatgattcaggagacacagtcatttgttttgttgagtacatgttccagaaagttgatggttcaaaaatggttcatgggaggattctgcaaaaaggttcacagacaattcttggcaatgcggcaaatgagagggaggttttcttaactaatgactgcttagaattcaaattagatgacatcaaggaattggtaatggttgatatccaatcaaggccttggggtcacaagtacagaaaagagaattctgaagctgataaagttgagcaggtcaaagcagaagagagaaagaaaaagggccagcccatggtatatttctgcaaaagcttgtactggcctgagaagggtgccttctttgccctctcccgagataaaatgggtcttggtagtggtttatgtagttcttgtgataatatagagccagattctgatgaattgaaaatattctcgaagaccagctttgtctacagaaaggttacatataatgtcaatgagtttttatacataagacctgatttttttgctgaagatgaggatcgtgcaaccttcaaggctggccgaaatgtgggtctaaagccctatgcagtttgtcaaatattgtccatccctgaaggggctggatctaaaaaactcaatccagcatcagcaaatatcagtgctagaagattttacagaccagatgacatttcatcagccaaagcctatgcttctgacatcagagaggtctactatagtgaggatgtaattgatgtgcctgtggatatgatagagggaaaatgtgaggttagaaagaagaacgatcttgcaagttcagaccttccagtgatgtttgaacatgtatttttctgtgaacttatatatgaccgtgccagtggagctctcaagcagttgcctccaaatgttaggtttatgtctatggtgcaaaggacaagtgcgttgaaaaagaacaaaggaaagcagatctgtgagcctgatcaaatagattcaggtaaatggttggatgtgcctaaagagaaccgtctagctactcttgacatttttgctggctgtggaggtttatcagaagggctgcagcaagctggtgtatcttttacaaaatgggcgattgaatacgaagagcctgctggtgaagcatttaataaaaatcatccagaggctgtggtctttgtagataactgcaatgtgattctaaaggcaattatggataaatgtggggatactgatgattgtgtttcaacttctgaagctgctgaacaagcagcaaaacttccagaagtgaacattaataatcttccagtccctggcgaagttgaattcataaatggtggtcctccgtgtcagggattctctgggatgaatagattcaaccaaagcccatggagtaaagttcagtgtgagatgattctagcattcctctcattcgctgagtatttccgtcccagattctttctgttagaaaatgttcggaactttgtttccttcaacaaagggcagaccttccgtttggcagttgcatctcttctggagatgggataccaggtccggtttggaattctagaagcaggggcttttggtgttgcccagtccaggaaaagggcgtttatttgggctgctgcacctggagagatgcttcctgattggccagagccgatgcatgtgtttgctagccctgagctgaagataacactgcctgatggccaatactatgcagctgcaagaagcactgctggtggagcgcctttccgagcgattactgttagagatacaattggggatctgcctaaagtgggaaatggtgccagcaaactcacgcttgagtatggaggtgagcccgtgtcttggttccagaagaagataagagggaatatgatggtactgaatgatcacatatctaaggagatgaatgagctgaacctaataaggtgccaacacattccgaaacggccgggttgtgattggcatgacctaccggacgagaaggttaagctgtcaaatgggcagatggctgacctgataccttggtgcctgcccaacacagccaagaggcacaatcagtggaaaggactgtacgggaggctggactgggaaggcaacttccccacatccgtcactgatccccagccaatgggcaaggtcggcatgtgcttccaccctgatcaagacaggatcatcacagtccgggaatgtgctcggtcacagggctttcctgacagctatgaatttgcgggcaacatccagaacaagcaccggcagattggcaatgccgtgcccccgcctcttgcctatgcacttgggaggaagctgaaggaagccgttgacaagcgtcaggaagccagcgcaggcgtgcctgcaccatgagaagttttccttccatcaaaccatgacccatgaagctaagcgctgaggtcgtccttgaggaccagttaattttggttttatcagtcttaatgcactcctgaatgtatatgttagagaagtgtcgattgctgattgttaccctgattcagggtagcggttatatctaaaaacttgagaaaatctagtgtactctagttgccatgtgttccattttgttggctctaaactttcaactagttttggtgattaatgacaacatgagattaacttaaaaaaaaaaaaaaaaaaaaaaaaaaaaaagtactccgcgttgttaccactgctnnnaaaaaaaaaaaaaaa

SEQ ID NO: 16164 - DNA, 156 bp, Zea mays
  Clone ID: MRT4577_114741C.1
tcggatgtacaggatcctagctcacctgctctggcaggccgacgcagacgtctaccgtggcggcacctaaatcgacgtgagccgcgccttttttacaaccaggggacatgtaaagccatggcgtacctatcatactcatccaggtggacagcgcct

SEQ ID NO: 16165 - DNA, 278 bp, Zea mays
  unsure (1)..(278): unsure at all n locations
  Clone ID: MRT4577_114742C.1
tagaaaggatcacctgcctgctccttcaccccngggcttgctaactcccaaatttgttgtagaccaacaagacttctcctcataccatacatctatataattaacattactaaccacctcgccatctacatgaaccacaattattctcaatcaaaactataccatgcccatccaacccccacccctacaaacagcaataatatatctaccatatggcatagctctctaccatacttccatcaaaacactatctatcatgaacctacctcccacatcac

SEQ ID NO: 16166 - DNA, 531 bp, Zea mays
  unsure (1)..(531): unsure at all n locations
  Clone ID: MRT4577_114743C.1
gctgcggcggcaggagtggattcggctcacgttgccgcaggataggggaggatgggattgtgccgccatatttaatctccatggagggccgccggttcagtctcggtgaccggtccagaaggaagaggagcgagtagggtagacgtgaggtggaagctttgggctcgggatcatgcgaatcgatgggaattcggcgccggagtaaaagcaccgccatggttccacctcgtatcgtggttggcattgcccctgcctccataaacgcggcgagaacacgtgtcacctgaagagcaagttggtacctggaatctcatgtgtcaggtcaaggacaggtatcgcaggatgaggcgcatggaggatgctgcgatgtgtttgtgagagatctaagtcgtcatctcccagtcaactatgggttgctagaacgatgtctcttatgatgaaatatttatttatttngacagaacttctatttattagtaagatgtgacattcgatcatgtgccatgattcgttatatgtgtgagacttggt

SEQ ID NO: 16167 - DNA, 1124 bp, Zea mays
  Clone ID: MRT4577_114744C.1
gcacgagcggatgtgcacacggcccatgtcccacgacgccgtgcatcacatgtccacagtccttcgtctataccgcatcataatgtaccctttgcctaacaagatatgctttatgttgccacttctgatttctagaaagtattttaccgtgttgttaagttggtagttcctgctttgtaatttctagaaagtatctctgatgtttttgcttgattattgattttgcttgtcaggttgctgaacgcgctttgttcttgtggaacaatgatcacattgtaagcttgatagcgcaaaatcgtggtgttatatttccaattatatttgaagcgctcgagaggaatatacatagccactggaatcaagcagttcatggtctcactgcaaatgtgcgcaagatgtttctggacatggacagtgaactatttgaagagtgccagcagcagtatatggataaacaagcaaaagccaaagagatgcaggagcaacgagaatcagcatggagacaattggaagctgttgttgctgccaaggctgctggggatgacatggttttggtcaactagatgattgctgctcacttatttcttgagcgcggtgctagttgcggtcctcttatatcaactttgttgacttgggactatcagatccatgttccttgcatcagtgaaaaacatgtgggccgagtttgaacacattggtggccgcgacagccaatccatgcagaatttctgtgtctagtgaggtcctgctatggttctgagccgttcctttattcagcccctccttttctgttgcgttaatttatgaacaattggactcttgtattaatccttcattgtttgccctagtttcgtacccacaattgggaaaattcaagtagtgaaaatgactcagctagattgtaaggtttcttttatttgtatttacttcttttctccttgggagttatttcagttcatgttgttgtatggaggtaacagtacaaatggcagataaaagcctttttaacctagtgtccggcatggtagcaatacaatgtcagatcttctgtaggaactgtttcgacgttgctgtggttgtttagcaatataaaaaaaaaaaaaaaaatacgccctattaaggtc

SEQ ID NO: 16168 - DNA, 647 bp, Zea mays
  unsure (1)..(647): unsure at all n locations
  Clone ID: MRT4577_114745C.1
catggtgccactgtttaagcagattgcccgatgccttancagttctcacttccaaggttgctgaacgcgctttgttcttgtggaacaatgatcacattgtaagcttgatagcgcanaatcgtggtgttatatttccaattatatttgaagcgcttgagaggaatatacatagccactggaatcaagcagttcatggtctcactgcaaatgtgcgcaagatgtttctggacatggacagtgaactatttgaagagtgccagcagcagtatatggataaacaagcaaaagccaaagagatgcaggagcaacgagaatcagcatggagacaattggaagctgttgttgctgccaaggctgctggggatgacatggttttggtcaactaggtaatataaccaacctttccacttcatttatttgttagtgcttgttgtttttagtcttgtaacctaaaattgtactacttttgttctcggctttgttctagcatatctgtgagatgcattgccactttttgtactgctcaccttttgttttgagtcatggcagttcacaaaaagatgggatatatctgtaccaaagtttcaatttattatggacaattgatttttagtaatgtcagtaaaaaaaaaaaaaaaaaagcggcc

SEQ ID NO: 16169 - DNA, 368 bp, Zea mays
  Clone ID: MRT4577_114746C.1
ggtacgcctgccggtaccgtgccgaagtctccgggtcgataacgcgtccgcccctgcagggagacaaacagcgattgcgtgataggattctagattcagagaaatctgcaaagattgacgcccagcttaatgatcacgtcagtaggatgctcacgtcgcttgactaggatatgagaaatgacacatccaactcgttctatcaaaagacattacgatataagctactcctaaaagatcattgtctcaaccaacacaacctatgacagcgacagtgttacctcaactatattcacctgaagtcgttgccatgataacggcaatctctcaaccaacggcatcaatggtccggaaagtactgcgccaaccta

SEQ ID NO: 16170 - DNA, 2469 bp, Zea mays
  Clone ID: MRT4577_114747C.1
gtccgtccccattgatccccttccccctccactcatctctaaaatcgccagcgagagccatgccgcctcctcccctgccctcgccgagcctgaccgactgaccccacctcgccactgttctttcccttccacctgggccccacagcgcccccttaccgtcgccaccaaatccccaaatcccggaggcacgaggagggaattcgtcgcctgaccgatcggccgatccactgccgtcggcaccccaatccgccgctgccgccatgttcaacaagatcatcagtgcaaaaaaatgcggaccgagtttgaacacattggcggcagcgaaagccaattcatgcagaatttctttgcctagtgagatcctgctgtagttctgagcccttgctttattcagcccctccttttctgttgtgttaatttatgaataattggactcttgtgttaatccttcagtgtctgccctagttacggacccacaattgggaaaatccaagtagagaaaattactgagctagattgaaatcttttcaatttaattttccttttttacttcttttctccttgttgggagttaatttcagttcatgttgttgtatggaggtaacagcacaaatgcagataaaagctcatctgtagtaggaactgtttcgacgttgctgtggttgttttagcaatataatggctcactggtacgcccgattaagttctggtacctaaaaaaaaaaaaaaaagtgcaggctccagctcaggcagcgggcgccaacgcacccacgcgcctcccggaccacgtccaggaggcgctcgtcgccgccatctctgccaacatcttccgcccgctgccacccgcgctgcacgaatccgccgccgcgatcgaccccggcgccgcgcccgacgaggaggaggagccatacctcgacccctcctggccacacctccagctcgtctatgagctccttctccgatacgttgtttcgcccgacaccgacaccaaggtcgccaagcggtatgtggaccacgccttcgtcctccgtctcctcgacctctttgactccgaggatccgcgtgagcgcgagtacctcaagaccgtgctccaccgcatctatggcaagttcatggtacaccgaccattcattcgcaaggccatcaacaatgtgttctaccggttcatctttgaaacgcagcgccacaatggcataggggagctccttgagatccttggaagcatcattaatggctttgccttgccaatgaaggaggagcacaagctattccttgcccgtgctctcatccccctgcataagcccaaatctgttgcgatctaccatcagcagctgtcctattgtattgttcagttcgttgagaaggactacaaattagcagatactgtgattaggggtctgctcaaatactggccagtcacaaactgccagaaagaggtgttgtttctgggggagcttgaagaagtgctcgaggcaacacagcctgcagagttccagcggtgcatggtgccactgttcaagcagattggacgatgccttaacagttctcacttccaggttgctgaacgtgctttgttcttgtggaacaatgatcatattgtaagcttgatagcacaaaatcgtgttgttatatttccaattatatttgaagctcttgagaggaatatacagagccactggaatcaagcagttcatggtctcactgcaaatgtgcgcaagatgtttttggacatggacagtgaactatttgaagagtgccagcagcagtacatggagaaacaagcgaaagccaaagagatacaggaacaacgagaatcagcatggagacaattggaagctgttgttgctgccaaggctgctggagatgacatggttttggtcaactagatgatagctgctcacttatttcatgagcgtcatgtgcgcttatcgaggcaacaaggtatcggtgctagttgcggtgctcttatatcaacattgttgacttgggactatcagatccatgttccttgcatcagtgcaaaaaaatgcggaccgagtttgaacacattggcggcagcgaaagccaattcatgcagaatttctttgcctagtgagatcctgctgtagttctgagcccttgctttattcagcccctccttttctgttgtgttaatttatgaataattggactcttgtgttaatccttcagtgtctgccctagttacggacccacaattgggaaaatccaagtagagaaaattactgagctagattgaaatcttttcaatttatttttccttttttacttcttttctccttgttgggagttaatttcagttcatgttgttgtatggaggtaacagcacaaatgcagataaaagctcatctgtagtaggaactgtttcgacgttgctgtggttgttttagcaatataatggctcactggtacgcccgattaagttcaaaaaaaaaaaaaaaaaagaaaaag

SEQ ID NO: 16171 - DNA, 362 bp, Zea mays
  unsure (1)..(362): unsure at all n locations
  Clone ID: MRT4577_114748C.1
acgggcgggttcgaaaattggntagattttgagtcggctgctaacgacctgcagccaaccatctaccagcgactcagcgagcgagagcagcacacacgcagctagctaggagtagtatcaccggccgtgtggcgatggagtgctccatgatctcctcgtaagatctggtggtggtgcgtcagggcctgacggccctcggcagttgcgcctcctccttcgccgtcgtctgctccaagaagaagatcatgaccgacaatccctacggcattggcggtggactgaccgtcgacgtccacaccaacgccagaccggcccaggttaacgggcgcgttcccagttcgtttacatgtacggagcgaacg

SEQ ID NO: 16172 - DNA, 1044 bp, Zea mays
  Clone ID: MRT4577_114749C.1
gatccaaactagcaaatcaaggcaagtctggaacggccccaccgatccgacccaaagcccaaatcggattcccctcgtttctcatcacgccaccgtttacccgccgccgcactggcagcggcgatggcgtcgtcgtcgtcgcggcccctgctctgccgcctcgcggaactggccagcggccgcgtccgagccaactaccgcatgctctcatccgccttttcatccactgcctccaccgagagggtttcgcagtcgccggcggagcccgaggccgtgctcatgacggaaggttgcgtccggagattaaaagaattacatgctaaagaaccatcctctgaaggtaagatgctgcgcttaagcgttgaagctggtggatgttctgggtttcaatattctttcgctcttgatgacaagaaaaactcagatgatagggtttttgagactgatggtgttaaattggtcgtggatgacatctcatatgactttgtaaaaggtgccactgtggattatgaggaggaacttatacgttcagcgttcgtggtttcaacaaatcctagtgctgttgggggctgcagctgcaagagttctttcatggtgaaatagcttcaattaccttgaagagatcaataattggaaatagcattctgtagcgaatcatacgctttggatctgagtgtacaattgttattttttggtagttctgaagacgtttctttttgagttttgttactgttggaaacatcatcacaaactgtctggttcaatctgtatccctctaacttgtgatagttgtgatatgatgacaagtttatgtacataatcttgtagctattaacagttgactttatgttgctccttataaaattgcaaaataagacgaacagtatttttgtattgaaaaaaaaaaaaaaaaaaaaaaaaaaaaaaaaacaaaaaaaaaaaaaaaaaaaaaaaaaaaaaaaatacaaatcagatagaatgctgactacccaacaaaaatatatgaactaaaaaccaactaaaaaaaatgggggcgcccgtttt

SEQ ID NO: 16173 - DNA, 331 bp, Zea mays
  Clone ID: MRT4577_11474C.1
ttttttttttttgtttttttttttttttagatattgctaggacaaatactgataactatcagggacaagcaagagcatacgtctttttccaattcatcaacttttgtcttcgcctgacgagcaattttcccaacttcatcaatatctttctccattcgctgcttaattgctgtgaaaaaagaattattgcgtctaacgttaagcatagaggtatttccaaaagagtgcatatatatttcagataatatatatgcctgctctgaaaaaaactgcccctagaggagctaagcctgcgttgcgtgcgtcatggccaaccagcagcacctgaacc

SEQ ID NO: 16174 - DNA, 591 bp, Zea mays
  Clone ID: MRT4577_114750C.1
cgcctgcgtgtaccgggcccctaattaccacggtcgacctacgcgttcggttttccttttttctccatacctttcataaatgatagctgcagcttgtgataaccgagctgttcagtcctatatgctacacatgcattctcagattgcaacatacctttatcacccttgagggctcaacaatcgacagccctatgtttggagcactcattggttcaaaccataaggggacaaaaggtgaacaatctcgggctacctgagatgcaaccaagtgtttgtcgcaaacctttgtccctactgctagcaccgacgatgtgttacatatgaccaactgtttacactgaaccctgctgtttatttgcaggaacaacttttaccattcaaccagctaggttctggctactctcagggacaacaacttattccattttacgcattgggtcgcactgaaccccgctgcttatttgcagcagcaaatactactaccatttagccagctagctgcagcacaccgtgcttacttcttgacacagcaacagttgctgcctttctaccagcagtttgcggctaaccgcgtgaccctcgtacaactac

SEQ ID NO: 16175 - DNA, 847 bp, Zea mays
  Clone ID: MRT4577_114751C.1
gacctatccgacccaaagcccaaatcggattcccctcgtttctcatcacgccaccgtttacccgccgccgcactggcagcggcgatggcgtcgtcgtcgtcgcggcccctgctctgccgcctcgcggaactggccagcggccgcgtccgagccaactaccgcatgctctcatccgccttttcatccactgcctccaccgagagggtttcgcagtcgccggcggagcccgaggccgtgctcatgacggaaggttgcgtccggagattaaaagaattacatgctaaagaaccatcctctgaaggtaagatgctgcgcttaagcgttgaagctggtggatgttctgggtttcaatattctttcgctcttgatgacaagaaaaactcagatgatagggtttttgagactgatggtgttaaattggtcgtggatgacatctcatatgactttgtaaaaggtgccactgtggattatgaggaggaacttatacgttcagcgttcgtggcagaggtgagtatacttatggttggtactcagcaagtgggtgaatatgcaaggtttcaacaaatcctagtgctgttgggggctgcagctgcaagagttctttcatggtgaaatagcttcaattaccttgaagagatcaataattggaaatagcattctgtagcgaatcatacgctttggatctgagtgtacaattgttattttttggtagttctgaagacgtttctttttgagttttgttactgttggaaacatcatcacaaactgtctggttcaatctgtatccctctaacttgtgatagttgtgatatgatgacaagtttatgtacataatcttgtagctatt

SEQ ID NO: 16176 - DNA, 328 bp, Zea mays
  Clone ID: MRT4577_114752C.1
gccactcgtctcagggcgcgtggtcttgttacgactttgctgttcctaataccaatgaggaatgcgatggctgggttttcagcccgtatgtacaaaccgaggatggcatgtatgattgcgtcaacttatcatgctgcacatcctgggctggctcataggatgaggaattagaactgtgctgttgtgcaggttgagtatgcactgaggattctggcttgttggaaccaccagcggggtgtgattgtgtaccaccactgtgcgtatcgcatgattggggcgatcaatggcactgtggcgcctctggctcggatgaggaatcacattatgt

SEQ ID NO: 16177 - DNA, 418 bp, Zea mays
  Clone ID: MRT4577_114753C.1
ccaccccagttttgacttaccttgcattgtcttaccctccattccacccccacctcgcggcccgaatccgcccacccaaccatctcctatggggtcacaggtgatcgaggcgcaccgcgcggacgcggatgtgcaccgcggcgcggcgctgcgcgcggagaacccgacggagctgctgtgtgaggtgcacctcccgatgctcctgctgccggtgttcgacatggaggaggttgtctacaaccgcgccacggggcttcatgtgcctgagccaaaggaaggcgctcacgcacgtgtcccgcccgatctcgcgccaggtctcctacgcccctcgagagaccgcgttcgtctgaggaccgctggctgaatcgatgtcccgcgccaatacaaaggtgctccccattctgggacacccctcctc

SEQ ID NO: 16178 - DNA, 525 bp, Zea mays
  Clone ID: MRT4577_114754C.1
tacctcggatccttgtttgttcctcatgcattcttactgtccgcctgcctgcctgatcaggacaggagccagcatgccgccatcaccgtcgttgctggacctcatgagcctgccgcccgacctgtctccgtctgccgaggaagcggcggactcgtcgtcctcggaaggcagcagctgtggcttggtgcaggtggtgccgagggacctctccgacgagctcctcggcaagttcgaggacaccagcgagttcggcttcgagtacagccagagcggcctctggtcgccgctggtcctgcggcccgaggtcctcgcgaccgcggtgcgggaccgacgcaggcgcagccgccggagttggaggaggaaggtgttctgttgctgctgacatccggtttatgttgggacaagctcttgtctctactaaaaactcctccgcagcttctcatgtaaaaactgtttcgtacttaatttcgtgatgaagttagtttgtactttggttataatgaagattactttttactgggatgt

SEQ ID NO: 16179 - DNA, 370 bp, Zea mays
  Clone ID: MRT4577_114755C.1
gtgttggttgaaaacaggggcacaaattttatggcccaaatggtgcttttgaccggtgtaaatgtgtccaatacctttatggcaaagtgtaaaataaattttgaacaaaaattgggctagggcgggattatttttttggggcaaagttgcaaagaacaatgttcttcttagccactgaattaggttttgtaaatatcttcctgggtacaatttggccaactagtgtgaaaaggcctatttgaacaatgtttttcggggccaaccgggatcctccctctgctttaggggcgttttttaaaaatgttcacctggaaactatcccagtttgggcttgttttgaaattccaattttcccaaattcccttaaaaa

SEQ ID NO: 16180 - DNA, 235 bp, Zea mays
  Clone ID: MRT4577_114756C.1
tgaacatgataagtctctacgccattctccaattcctcccgtgtaccgcctttatgtcacctggtcaagccaaccaaatggactatttcgtcgtgagcaggccggatttctcgccactgacgaactcccccgcctgtgcacgtgaaccggccgactccgaccacctctaataccgaccggtacctcgacgtgaccgttgtaacctccgtgaacacctcaccggagctatctcgct

SEQ ID NO: 16181 - DNA, 368 bp, Zea mays
  Clone ID: MRT4577_114757C.1
gggaaacaagccaacaaagccccttttttttttacactaaacccatgtccccccgggggcccgcattcccgtcccccctggccccccctggaacaaaataaaaccggcgggccccccgggggtacgggggggtgtacaacaaacccaattcggggggcggggtaaagggatcccctttaggaaaaaccctgccccccacaacacaaaccacgggaacaaagggtcccgcccccatttttagggggggtccaccctgccccccccccataacaaaagggaaaaacagggcggtccttcccctttccacaacaggagcctttaccgaggggaccccccggggacccttaaagatacggggccctgccccc

SEQ ID NO: 16182 - DNA, 191 bp, Zea mays
  unsure (1)..(191): unsure at all n locations
  Clone ID: MRT4577_114758C.1
ccggaaccggaaacccgggacgacccacgcgnccgggaagcnnaaccccctagnggaacagcgatatgaagcgaacgcgcgacaagcaggggggggacacgacacacgacaaagaacaaaaccagggcacaggcgagagctgcagaacaagccgcgggagaccagcggagcaaaaaaagggacaaccaagg

SEQ ID NO: 16183 - DNA, 371 bp, Zea mays
  Clone ID: MRT4577_114759C.1
ccaacccaaaaaacggctttcaacggaattcaacccaaatcggccttccaatttcaggaaccaccaggggtttttccaatttttttctaccccccccataatggaagcataaaccatccgccccaggttttaaacatcaaccatgtttaaaaacctttaccttaaacccaaaaccaggtggaatgggttcaacacccccaagctgctttgggggccaccattctaaaactggaagggggcatgcttaatcccaacataaagctccaatcccccattgggttaaatggtgggggggcccattgccctgaggcttaaactgggggccctcgatcccaaactagcccctcaaaaggaaaatccccaatggcggg

SEQ ID NO: 16184 - DNA, 432 bp, Zea mays
  Clone ID: MRT4577_11475C.1
gtcgacacgatggccccggtgactgcgccggtggttacacccagcctctgacctacaccaacacctatgccttcacgtcgctggcgggtctactcacttccgtgcgcttgccaccttggaccccgtgtggtgggaggctcctccaacgccctcgtcttgtaccgtgataacctgtgcatgcagagcagaggatccgtcatgcatcctaatgcgttcgctagggtattcagcgtggtgtatcccacgactcctttcacgacacggagcgccgtctcctggcgatggtcttaatgtgggaggccgccaaggagtaaagctgccggagaccgcacgcgttcaggttctaccggcacttcttgatacgggggttcccggcgcggacgagcacacggctcactctcacggcagggttggcggggcctagctggagaa

SEQ ID NO: 16185 - DNA, 322 bp, Zea mays
  Clone ID: MRT4577_114760C.1
ctacttctagatccctaccattgccttctgtgatactgactcttccattccgtacctcgatgtcggcattccagctaacaacaaagggaggaacacctttgggtgtcttgttttgccttctgcccaggatggttctgcaattgaggggctctattcttcctgcgcacaagtggaaactcatggtcaatcttcttttctacagacccccagaaaactcaaaggcccgggaggagaattttcccgtcccccctgattttcccgcattcactgattaccaacgaactgatcagtggggtggtgatcagtggacctcttattgggg

SEQ ID NO: 16186 - DNA, 327 bp, Zea mays
  unsure (1)..(327): unsure at all n locations
  Clone ID: MRT4577_114761C.1
ggccgcttttttttttttttttttgtcggttgacggctgctcatctatacattacatctgaacacgagagagtatccctgacgaggacgtccagttccagcttacatgtgtatactgctactaagtagcactcccctaactacattgtgcgcgggcggggtcgttggnggtcagttgctttcagtcggtgggggtcctgtggttgattactgggtgggtacggttggcgtgtcggaccggcgcgttgtagttggcgggcctgctggtcgggggggtgttcctgtggccggggcccgtgggtgcgccggcgcggcccatcttgcgctc

SEQ ID NO: 16187 - DNA, 273 bp, Zea mays
  Clone ID: MRT4577_114762C.1
gctcggagccaagattggtgaaggcaatgctaggattttgtagatggcatgaggcttgtgatctgagggcaagtgcagaatggatttagaaacttgggaagagagggaatatttagaaaatagagaatgcaggagatatgtatgtgtccaaataggagaaaattggagattgtgttttgcttattggcctgggggcattctagtgagagtggtagattaacttcataaaaattgctaatgaaaaaggcagcggaaccttcaatgtgtgaaaag

SEQ ID NO: 16188 - DNA, 308 bp, Zea mays
  Clone ID: MRT4577_114763C.1
gcgaaagcatccgtcacatcgtcttcgcgtggggtgacaagaccattaagctctggtacactctctgcgagcgcaagtacacccttggctccgacctcacctgactcgagggcactcaacagaagcgtatcctgcgctaggttcttcctaaacaccttatagcccaccatcgcctacggatactgggtacgcaccgtcagggtctggtaccctaccaacagctagctgcgcggctgtctgggttggcacagagtgtatgttaacgctgacactgtgagccacaacctgtatctgtgctcctccctact

SEQ ID NO: 16189 - DNA, 350 bp, Zea mays
  Clone ID: MRT4577_114764C.1
gggggccccaagaattcattaacccattagatgggtggggtcgcaaacaaaaacaagggattaaacagggggaccccaaaatttttggcggggttttatttccagcccccaaaaaaaacttggaacaagcacttgggggaaggagcattttggtttggcgggacagaacaaaacagggtacaaaggtgggggggttaaattgtggggttccttttctggctcaggtgccttttttgggggggccccggggggctttttggtaatcccctaaagggggggcttgccataggcccgaaacgccttcattttaatggggacctttacaacctttacagggggtttttcaccgg

SEQ ID NO: 16190 - DNA, 237 bp, Zea mays
  unsure (1)..(237): unsure at all n locations
  Clone ID: MRT4577_114765C.1
gaggctcactgtcactgggcctccacccccacctctctctgtggtggtggtggtggagccgaanaaagaaagaggaccacaccaataattctatatggctgtcaaattcatagacagcgtattagcaaccaacaccctgatgacaggcaaagataacaattttacgaaatttaccaaagcaaataaatagaaacccgagacataacatatcgtaacttaagaaaataaacattacat

SEQ ID NO: 16191 - DNA, 737 bp, Zea mays
  unsure (1)..(737): unsure at all n locations
  Clone ID: MRT4577_114766C.1
accctcgggctcgccgggcaccttcataagtgcgntatcaacgctcctgttaagggggttagtcgttaaccccaatgaagacaatgtgatcaacatcaaccaacaagatcaaagtggcgcagcggaagtgtgtgtgggtcctaacccacaggtccaagagaacctcaagaatcacatcgatcggtctcaagcatctgaaagtcaaagcaaaccagtccccaagttaagcttgtagagtcaaagtcaactcaagaaagacgtggacaacctatgaaccaaccttgttttcttactagcttcttcttgaatctcggggcgagattcctgttaagggggttagatttgtaacaccctgattttggggtataatttttctttcctaatatccaccaaattcaggtgttaccctccccttttttttgtttttcttctctttttcctaaataatgaagagttatttcatattatatataagtgttgagcgttagcgagataaaacccctccacacaagttttgaaatgctgcatcacatgatggggcattgtttttgtttactgcgaggttgaaagagtttttaccatttaatttagtctctttttgcgaagcccaatttaattaatgatagaaatgtaccaaaaattatttattgaatattntatttagaaatattattgcttttaaattattataatttgggaattatttaaaaataaacatatatttatttatatatttt

SEQ ID NO: 16192 - DNA, 144 bp, Zea mays
  Clone ID: MRT4577_114767C.1
gcggccacgcgttttgatcatgctctgcgctaccaccgagccacgggaggatttgggcgaactgtacgagtggtcccgtctcatgaactccgcggcgctacccatgcgccggaatgccacctgcgatgacatcatgaccaaagg

SEQ ID NO: 16193 - DNA, 406 bp, Zea mays
  Clone ID: MRT4577_114768C.1
gtcctgcaagcaacgccatagctttttgaagtggaaccacaggatgtgccatatgtgtactgcttggtctatgtcatattcgttccgctccgctggatttactaccgctacaagaaatggcattactatctcctggtgagtccattactgtctcacattttttatgtcccggagatgcgtcaattgcccgaaatgtgcttccacatatttttacatcataaatcataacttaacattgtttgtttcagtgtcctactttactctaaatttatgtgttatccacaccacaaagtctgcaatagaaagcttagttgaaaggataaatagttttagatagcacatactactatgatgagtggacgatgggctgggttatgacattgcgccaacatcttgcagttgcaca

SEQ ID NO: 16194 - DNA, 212 bp, Zea mays
  Clone ID: MRT4577_114769C.1
gccgaggaggcgtccgttttgctcttcctttcacacacaatctccctatcccaagcaaaccaaaccccaacggccagagtttttataatcttgtccaactcacacaccaaccctttattcaatgtatataagtccaaaacaaccgaacacatgctatacatcccccattgtaaagccaacacccaacctaacaacaacaaccctcttatcca

SEQ ID NO: 16195 - DNA, 228 bp, Zea mays
  unsure (1)..(228): unsure at all n locations
  Clone ID: MRT4577_11476C.1
acgcttacattacttttcatttgntcacccagcgagcaaaagcggggggtcaattcatctggggggagggactcctccacatataaacaatggccctgaaaggtcatgattactctagatatacggacactaactcattagttttagccaccttcattttcgacactatctttatcatttataactcacactcctaatcaccgttggtcactttattatttttttttc

SEQ ID NO: 16196 - DNA, 386 bp, Zea mays
  Clone ID: MRT4577_114770C.1
tcattttaatattttttttttagcaacaaataactgacacgtctgctgatgtgtgagccctgtgtttgcaagcctcagccatgcgaacatacccacatacatgtatgtgcagctcgacgcgagtgcgacctaattatatataaagcgatgtatgccatgacatgcggtctttataacttgaaaccacatatgtgaggccggccggtatactggaaccacatgggggcctaatgaaacggcctgctgacaaaaggttcggcctgcttactgccgatgacgtagaaggcaaacctgttgaccctcttgctggaaccaatcccgcaccccccggtgagagactggtcgcataatagccgccagagggcgaattctttttccagggatag

SEQ ID NO: 16197 - DNA, 483 bp, Zea mays
  Clone ID: MRT4577_114771C.1
aaagaacgatttcgcaatgctcgatatctttttaccaaacatgaatacaagtaccaatacctatactctaatctattgactttcttctgtctatcagttttgtgttcgtctgaaacctgaaaaagaaagaaagaagcttcttctccttgttattgtgtcaaggtcctctcatcttttcaacaatctgtctacttttttcctcaacgtgacgtttcttctcttcaaacttctctcccactttcttcctaaaatcgaacatcctcgcctttgctgcccccattttctttccttttgaatttgaatcatcctcttcacccgaaacagtcgacatagacggtgattgaccaatacccggaattatatctcccgcactgcctcctctcgctattgtatcatgcttttcgctgctttccagcagtggagtcttgagttcttctaaggatttgtcactctctactaggagagctatggaattaactgatg

SEQ ID NO: 16198 - DNA, 304 bp, Zea mays
  Clone ID: MRT4577_114772C.1
cttacagaccgaaacacacacaagggctggggttgaaataatgtacctctccaacccacaccaataaatccaaatgaccatgattacactaaatgtgcattcacaatctcataagctccaaccattaacattatagcaactaactcaataaaagggcactcacctacaataacaccggtcggcacccaaaccctcagctaacgctcagacacgagcataccattactctacacctccgagtccgtacattaaacaagcatgtatacaaataaaaaacatgaaaatcatcgataactccaccaaa

SEQ ID NO: 16199 - DNA, 258 bp, Zea mays
  Clone ID: MRT4577_114773C.1
ggcgctggcgcccgtgcgggccgcgccgcgatatccccggttgacccaaggcgggcgagcaagcgtccgtgcctgaaccttactgactatcctgccgggcactcgatggaggaggacgcccgctcaacgctcatgggacatgggacgatctgggcgatcatctgctgtgggggacgggttgctaaagccaggaggacgcggaaggcgataggttctttggcccgcacctggcggaaggaggaggggctggggatgccc

SEQ ID NO: 16200 - DNA, 253 bp, Zea mays
  Clone ID: MRT4577_114774C.1
ggggaggggataaccgggcttttttttttttttttattttaggggggttcaaaaagaccacggtttggcgcccctttatatcatcgttttttaaagagggcctggggagaaaaaaaaaaccgcttttgaattttttacaaaagccgggggcttatactgctcctggatgggagggtttttttgggctcttattcgtattcttataaaaaaaaatattggcccgcatgttcctcaagttggagaagacaatcaa

SEQ ID NO: 16201 - DNA, 383 bp, Zea mays
  Clone ID: MRT4577_114775C.1
aaaagctttaaaagttggtgttttttgaggggaaacgcgctatttccacaacccgggggttgctaacatcataaaccccacctattttaaaagccacacacattttttagggaggttcccactcatttacaatacaagggatttgatttgaaaacctgggaagcgatctgcaacaaacccgatgggtttataggccggaatcccagcatttgaggaggggaaggtttttcattgtcgaaccttagggaaagcaacccgctggagctaaagatgagggttgcctcgacttattttgtgacccatattaactgttagaaaacccccggtttgaattataaaccggggtcattaagtttttttcacgaagtatgcccttgggtcct

SEQ ID NO: 16202 - DNA, 258 bp, Zea mays
  Clone ID: MRT4577_114776C.1
aaaaaatcaggccattccaagttttttttttagcaaattacaggctttacttgaatttaattttcccaacgttttttttgggacagcattgcaacattttttgcccccatttttgctttttaccgtagctttccaaattttaatttccccttttttttggaaccctttttttttgcatttcccacaaacagattttttagggtccccagttttgcctgggtagctttttttttgttgcagcaaaaatggttactttcc

SEQ ID NO: 16203 - DNA, 379 bp, Zea mays
  Clone ID: MRT4577_114777C.1
cgcacgcgtacgactagctggatgggactctgctgattattagcaacagcaagtagtactacgaacgatccaggcagctgttgactacccgcagctataacatccattcaacctactagccacaatgaactctactgtgtatgtacagcagtgacaattactaccatctagaccgctcgttgctgagagccctgttgccttatggacacagcaacaactagagtcgggctagctatacgctacgcctaacgataggagactcttactaaatgcacatgtgctctcatttaagctacttggtgtgacaaacatatgatcgctttaacaacaacctattatgggtggagtcttctttgacattgcttctgagttatagttc

SEQ ID NO: 16204 - DNA, 406 bp, Zea mays
  unsure (1)..(406): unsure at all n locations
  Clone ID: MRT4577_114778C.1
antntttttttcncccaannaaanaaaaatttatggggggcttttttttttttttcccctttttttcttttttttttttcccacccccaaaaaaaaattaatggggttcaccttaccgggattcggggtggccccgtttttggcccaatcattttccttccagggcccaaaaccaattggggccccctccaaaaaaaaagaaaacctgttttgggggaaaacccatttttcccttttgggcccattgcccggaattttgccccccgaagggctatccttttatgggattgggtttccccccctaaagaaatttcagggtttaatctttttttttgggaaaaaaaacctgggccgggaagagcttgccaccaacctggtttttgggggaggcctttactacccaaat

SEQ ID NO: 16205 - DNA, 533 bp, Zea mays
  Clone ID: MRT4577_114779C.1
ctggaaaatgtaacttcttatttgtggtcggccacatacctaatccaaaaactttgttattgaattacaactaataagcaatcaaaaacgggcaccaccaatgatgtgttggggggacgaggccgctgggtctgccaaagcaagttgggcaaagggcaacaattgttgtaataggaagagggttgcaggcttagcctgaaactgctggagcaaaggcagcaactgttgctgtaacaaaaaggaagcacgggttgctgcatctagctggctaaatggtattagcttttgctgctgaaaataagcagcgaggttcaccgcggccaatagggtaaaaggaagaagttgctgatactaagagtaagcaatatctatctggctgaatggtaatagctgctgctgcaaataagcagcaagggtcaacggatacaggagggggaaaggaagaaattgctgatactgagggtaaagagaaaggtttgccagagctactaggttgatcacaggtaccacaagttgctgcagctgctgtgccc

SEQ ID NO: 16206 - DNA, 904 bp, Zea mays
  Clone ID: MRT4577_11477C.1
cagctcacggtctcacgtcgccatgcattgctctaccagaccaccaccatgtccaaatttgactggattcgagcaggccacactatattatccccgttcccggtgggtttgtttgcagggcggcagagcagaggcacaacacacaaaccaacccaaaaccatttcctactagctagaagagtgaagtgaagcgatgaagaagaccgtggtcctgtaccctggcctcggcgtcggccacctggtgccgatggtggaggtcgccaagttgttcctcaagcacggcctcgccgtcaccgtggcgctcgtcgagccgcaggtcgagtccacggacttctccgccgcggtcgcccgcgcgagggcctccaacccctccgtcgccttccacgtcctgccgtcgccgcccgcagattcaaaccccgacggcgcgcccaggcaccacgtcgtcaaggttatccaattgctcgccgccatgaatgcgcccctccgcgacttcctccgctcgctgcccgccgtccacgcgctcgtcctcgacatgttctgcgtcgacgcccaggacgtcgcggccgagctcaagctgccggtctactactcgttcgcctccgctgccgccgacctcgccatctttctcaacctgccgagcaagttcgccagcaatacggccaaggtaaaagagctcggcgactccatcatcaccttcccgggtgttcctcctttcaaggcttcggagctgccctccgaagttatcggcgacgatgaagcgctcgtgtacgtcttacgcatgtttgagcgaatggcagaggcgaaaggaattcttatcaattccttcgattcgttggaagagcccgcactgagcgctctcaacgacggactttgcgtccctggtcgtgcgacgccgccggtatac

SEQ ID NO: 16207 - DNA, 581 bp, Zea mays
  Clone ID: MRT4577_114780C.1
cggccgcgtggggtttgaaatatgtcgctttgagcccaatctgtttggcccatttacctttgctggcttccttattgaccttgatggctatcaccttgttgttatttttcttcttaagaagatatggtgttgtatgattgttgtccaccttgttggtataggtgttgagagctttgtggggtggtttttcttatctccctcggtcattaccttctattggtaagacttgtgtccttccttgtggtataactaacaaatcacaatttctccctcatccggcttcttcacacccatattggtgttatcctagtgagattgggtttgtatggctttgcttttcttgttgtacaaggtcttaccaaggtgagccacttcttgccttaattccacatttcccttgcaaaatctaatctaagcatgtttctacaattacactcccaaccaagactttttttgcaaggggtagggttattatcaattaaatccaagcaagaagtagaagtatccttcttaataattgtaggagtttcaaatttagacgcttctagggtgctactgatgctttctagctttgtagttag

SEQ ID NO: 16208 - DNA, 455 bp, Zea mays
  Clone ID: MRT4577_114781C.1
ccggccgggagttttctcccagggacacaccctttgggagacactgtatccacatgtatataaaccagaatctctgcaataaagatatacaactgtcatttgcactgttcctctgttcacttgtttgccactgagttacaatacgttatcagcactgctcgtgagagaacagagagaagtcgatgttgaaaggttgaagaaacaagcgagaaagggaaatgaagaactatcgtggacgttggcggacgggagtcttccatgcggaactctagcatgcacttggactttggacttcatgcgtctgtccgtcgacgtgagttatctattgcgaatccaaaccaaaaatcaatgtgtgtgtctgcaccacgatgacggctacgatgtggccggatgagaccttgttcggggtgcttgtgcctgcggagccagatccgcgtcgggaccatgcctgacca

SEQ ID NO: 16209 - DNA, 1148 bp, Zea mays
  Clone ID: MRT4577_114782C.1
ccacgcgtccgatcgtcgtcggtcaatgtcgacgagctcgcagtgcacgctcatggaaggcgctatctcccttcctcgcaacacaagaattgccgtggttaccggcgcgaacagaggtatcgggctagaggtgtgccggcagctggctggcaatggcgtcaccgtcgtcttgacagcagtggacgaggagctaggcgcgaaagccgtcggcaatctccaagggctagctctctccgatgttctttctcaccagctggatatcacggatgcttccagcatcgctcggttggccaacttcttgaaggcccgattcgggaagttggatatcctggtcaataatgctgcggttgctggggtcgtgtactctcaagatcatttggatgatctagaaccgagagaggaaaagttcaatctcatggatagggatcagaggcttgaatggctgtggaggaactgccgggagacctaccatgctgcaaaggaatgcctgcagacaaactactacggcacaaagcatgtgatcgaagccttgctgcctctgctgaaagcctccgatgatggaagaatcgtcaatatatcctccgactttgggttgttaaggcatttcagaaacgaggatctgaagcaagtgctgaacgacgtcggcaacctcaccgaggagcggctggacgaactgctggaccagttcctgagagacttcaaggtcggcacggcagaagcgcgcgggtggccagtggcgttcgcggcgtacaaggagagcaaggcggccgtgaacgcgtactcgaggatgctggcggcgaagcagcccgcgctgcgcgttaactgcgcgcatcccggctacgtcaagactgacataaccttacactcggggctcctggcgccggaggagggcgcgagtaatgtggtgaaggtggcgctgctgccggacggcggggtgaccggcgccttctttgaggagggcaatgagctggcctccttcgtgtgatgtcaggatcggcctggttcgctagctgcggctgtttgccatcgcgtgagctcacggagtgtttggacccctcggtctgatgtttaagtgtgtggtagcaggatgcaagacgattctggtaataaactgattatgtttgtgaacggtgataacctgatgatgt

SEQ ID NO: 16210 - DNA, 744 bp, Zea mays
  Clone ID: MRT4577_114783C.1
atgacgctcacgacgcccgctctcccctcacgcccgtggctcccgcgcgcgcaacagcccgcccccgctcccgcgcgcacagccgtcgaggatctcgcagccgctcacccacacccaggcgcgcgctcggccgcccaccacctccgcgccgcggatcccgcgctcgcggatcccgcggaatcccgcgcgcgcacgccctgcttccgggaatcccgccgccatgacgctcacgacgcgcacgctcgttatcccctgtctcaagacctctcctcgaacagccaccgcaaacgcccgcacacccgcgcgctattcgccccgagctatcctccaacaactgcccgcatcaatccgtcgtcatcaattagttcatccctgctcaaatccagttcatccctgctcaaatccagttcatccctcctcaaatccctgcccccttcattcccccaccctgcccccttcattccctcgccacacccccttcattcgcacgccattgtgccgctggataggaagaacgacggaaaggatcttgcccccgccatccggagaggaacgatatcagctgcgcaggcctcgaccaagtcatgcaaactaatgaaccaaagcaacaaaggatcatttatagtatgcgcacaatcagagctgattgaacttgtgcgatatagttcgtttccgtactccatggttatgatgttattgaccactattgagctgaagctgataaatttcgagtataggtcatag

SEQ ID NO: 16211 - DNA, 1388 bp, Zea mays
  Clone ID: MRT4577_114784C.1
gcgccggccccccccctcgcgactcacgcggccaacctccctccttccctactatatcgccctcggcccaggtcgacgagctcgcagtgcacgctcatggaaggcgctatctcccttcctcgcaacacaaggtactcaaacaaggctcagtgccgttgtggtcggtgctttagcagaattgccgtggttaccggcgcgaacagaggtatcgggctagaggtgtgccggcagctggctggcaatggcgtcaccgtcgtcttgacagcagtggacgaggagctaggcgcgaaagccgtcggcaatctccaagggctagctctctccgatgttctttctcaccagctggatatcacggatgcttccagcatcgctcggttggccaacttcttgaaggcccgattcgggaagttggatatcctggtcaataatgctgcggttgctggggtcgtgtactctcaagatcatttggatgatctagaaccgagagaggaaaagttcaatctcatggatagggatcagaggcttgaatggctgtggaggaactgccgggagacctaccatgctgcaaaggaatgcctgcagacaaactactacggcacaaagcatgtgatcgaagccttgctgcctctgctgaaagcctccgatgatggaagaatcgtcaatatatcctccgactttgggttgttaaggcatttcagaaacgaggatctgaagcaagtgctgaacgacgtcggcaacctcaccgaggagcggctggacgaactgctggaccagttcctgagagacttcaaggtcggcacggcagaagcgcgcgggtggccagtggcgttcgcggcgtacaaggtgagcaaggcggccgtgaacgcgtactcgaggatgctggcggcgaagcagcccgcgctgcgcgttaactgcgcgcatcccggctacgtcaagactgacataaccttacactcggggctcctggcgccggaggagggcgcgagtaatgtggtgaaggtggcgctgctgccggacggcggggtgaccggcgccttctttgaggagggcaatgagctggcctccttcgtgtgatgtcaggatcggcctggttcgctagctgcggctgtttgccatcgcgtgagctcacggagtgtttggacccctcggtctgatgtttaagtgtgtggtagcaggatgcaagacgattctggtaataaactgattatgtttgtgaacggtgataacctgatgatgtatgtgttgtaaatttagagaacggtgataacctgatgatgtatgtgttgtaaatttagagaaataagtgacatgcttccttcagatttaaataaattaaatattctaattccgaatcgcagactctatgacatttcctcaagaagacggat

SEQ ID NO: 16212 - DNA, 263 bp, Zea mays
  unsure (1)..(263): unsure at all n locations
  Clone ID: MRT4577_114785C.1
tttgttttttttttttgtanncttgggattatagatttacttgttttagttgcatgcgaacaccaaggcctgcgtataaagatataaagcccgcacgggagggacatcaccgggaggacgttccaaaaaaacattaacccctggggggcccctggtttgttaatgggggggggcactgacaaggggcttttttacacggccttcttattttaaaaacaaccggagggcatccatgcacttttgggggccattccctgaccggg

SEQ ID NO: 16213 - DNA, 230 bp, Zea mays
  Clone ID: MRT4577_114786C.1
acgcgcgcgttggctcagccttcaggcattcactgctacaacatttaatgaatgcaaccttagggaggatcaagatgcgcatctccaagatctcaacatgcgaactccaacatccagcttgtctgtctattttctaagcatatctgggcagtccatctagcaacattgttgagacaacctgacacctggtcatgaaagcatactacttcctatgcgaacgtgctctctaa

SEQ ID NO: 16214 - DNA, 279 bp, Zea mays
  unsure (1)..(279): unsure at all n locations
  Clone ID: MRT4577_114787C.1
cagtgcttggtgcaaaaagacgaattccgttaaaaagacgggaccccctcccacgggcatccatactatcttgacaaaaatgaaaaccgntgcttggtgcaagatccgtgtggtgtcgaagaatcgcagttcggcatcttctctgcggggaccgcgacagaaacgaggtcatcagaagagagaaataagtcacacctaattgcgagcaggcagggcagtggtggctggcatatattaagtggtggacaatcaagaacatgctctgcatgcttagcttaa

SEQ ID NO: 16215 - DNA, 338 bp, Zea mays
  Clone ID: MRT4577_114788C.1
acgtaagctcggaattcggctcgagggatacttcaccttcaacttgtgtagcgcgagaaagagaacatagaccgagggggggatacccacccagtatgcgggacctcctgctgctacatcccacatgcactgtggccggaccggcacctccgaccacactgaaggtgcctgaccacacactgaaaggggacggtcaagcactgccgtacgaccgacccctacagggatgacggaagccagtcagggccggtgccgatcaggcgactgctgcgtccgcagtgcttaacacagaaggagcaaacctgacagacaaatcgtacatgaggtggcagaccgcg

SEQ ID NO: 16216 - DNA, 370 bp, Zea mays
  Clone ID: MRT4577_114789C.1
cagatcaggctacaggttctcatggatccagcaaatggggtgaattacaaaaaagaaaaatctcaataaatccacactgcaagtgaagacaacttaaacacgggagtgcttcgtgtataatccaaaaagaagaagcaaagcgtttttcctgcagcattttgagcctatcaggcaaatcacattgttattgctctcaacgccttttttaaacattatgaggtggacagattttaccaaagagcttttcaaatcttcgtgcttttattctcataccttgtattgccctgaatacatgctttttttttgcaatctgctcccattgtcattttacatgtttcatttttgttctcactttacaaagtttcctttt

SEQ ID NO: 16217 - DNA, 425 bp, Zea mays
  Clone ID: MRT4577_11478C.1
gcgggatattgtctcatatccaggagctgcaatctatgctctatgctgtaatgattgctatgtatgtgattgacgtatcgatatcttgtacctcgactatgatagttaattgtcgaccaaaagtgctgaaacaaatccgtgaactgaccccgcgggaaaagattgtgtgtcaaagattgtttgtgggacatacattgaatgtgaggtgtgatgattgttgcatgctcggtaatggactctggcatcgtagttgcttcactcagagcgattcgaatgattgacgcctgtcgagtctacgtccgacgatatataaggccatgatccgatactcacgatacctatgctattggatgttatagtaaaaaaatatgaacaatgttaatttaaatgtgaattgaacccatgcgatgtcactcatccacatg

SEQ ID NO: 16218 - DNA, 269 bp, Zea mays
  Clone ID: MRT4577_114790C.1
aaagatctagaacgattacgacctacacagggccgtatcccagaggaccgcgtatggtagtgcgactactgacactgacaccgtctatcataatcctaagtcctctgcagcgtacacaaagacctaccactagcaataggagctaaaaggctggacaatatgatctgcaacacggactacctgagcaatagtgccggacccttggagcgcgaacggactcccgtggtttgatgtcggcgtctaacaacggcaccggctaaacggtccat

SEQ ID NO: 16219 - DNA, 270 bp, Zea mays
  Clone ID: MRT4577_114791C.1
ccgaaccgaagccatctaccgacgaactcggaatcggtcgaagcgcgtctctatctgctgtttctccctcgcttagtctccctaactcaccgcaccgggcccatacagcgctgagcgaattctcgttatgtaattcttggtccgtcgcagctgagagagtgttgatctcacctttgctggtggtcttgtcggcggcgatggagtctccagaggtgttcataacgatcatattcgacgcgctgctgctggtagtcatggtgaagctcctct

SEQ ID NO: 16220 - DNA, 181 bp, Zea mays
  Clone ID: MRT4577_114792C.1
attgaaaaaaactggcggcactcaacaattaactcagaccaagaagtttataattgactcacgtccgaacatctctttttgtattacacctgacgggattatctggccttccaccacaaacttgactcgctgcgcctcatgtacgctgccccatctcacaaacccaactccttcgtctcgt

SEQ ID NO: 16221 - DNA, 1212 bp, Zea mays
  Clone ID: MRT4577_114793C.1
aactgcagagcacctggttgcagccaataatgcaaacactctgtgggctccttgtgcttttgctctcctccctcccaaccttctccttataaatacaaaggcgtgtgcaaggcagaaccatcagctaagatagctgcaaaacaagcgagttacttacaaccaaacagaagggtagaaaccacctgaagccatgtgcattgctgcatggatttggcaggctcaccctgtgcaccaactcctcctgcttctcaacagagatgagttccacagcaggcctacaaaagcagtaggatggtggggtgaaggctcaaagaagatccttggtggcagggatgtgcttggtggaggaacatggatggggtgcaccaaggatggaaggcttgccttcctgaccaatgtgcttgaaccagatgccatgcccggtgcacggactaggggagatctgcctctcaaattcctgcagagcaacaagagcccactcgaagttgcaactgaagtggcagaagaagctgatgaatacaatggcttcaacctcatactagctgatctaacaacaaatatcatggtttatgtgtcaaaccggcctaagggtcagcctgcaacaattcaactcgtgtcaccaggactccatgtgctgtccaatgcaaggctagatagcccttggcagaaggcaattctcctcggtaaaaacttcagggagcttcttagggagcatggtgctgatgaggttgaagtgaaggatatagttgagaggctaatgactgacaccacaaaggctgacaaagatagactgccaaacactggttgtgatcccaactgggagcatggtctgagctccatcttcattgaggtgcaaactgaccaagggccctatgggacacggagcacagccgttttatcagtgaactatgatggcgaagctagcttgtacgagaagtatcttgagagtggtatatggaaggatcacacagtgagttaccagatagagtagtaggcattgcacaggaaaagttggcgacctcaaataaatagaaatatgaagcagacacaattgtgaatttcattatttccctgatctctagtcatcttcgtgattatctaagatcctaccataatgccaattacattattcactgtaagcagatttttcacttgacgataaaatgtcaaccaaaactttggttttaaaaaaaaaaaaaaaaaaaaaaaaaa

SEQ ID NO: 16222 - DNA, 288 bp, Zea mays
  Clone ID: MRT4577_114794C.1
ctggcgctgtgggtcgcggccatggcggcgctgttcgcgtggcggttcgtgcagtaccggcggtcggcggcgttccgggtgatggggtactgcctccccacggccaagggcgccgccgagacgctcaagctcaacatggcgctcgtgctcctccccgtgtgccgcaacacgctgacgtggctccgctccacctgggcacgcttcttcgtccccttcgacgacagcatcgccttccacaagatcatcgcgacggcgatcgcgctgggcatctgcctgcacgccgggaac

SEQ ID NO: 16223 - DNA, 765 bp, Zea mays
  Clone ID: MRT4577_114795C.1
cattgggtacctcgaggccggccgggaccgcctccgatcaagaaacaccgccgagcccattcgcacaagcgcgcgaggcaggagagagagagagagagaggcggggagcaaaacaatggaggggaaagaggaggacgtgcgcctgggcgccaacaagttctcggagcgccagcccatctggacggcggtgcagggtgccgctgtagacgaggactacgacgagcccccgcaggcgccgctgttccagcccgacgagctcaagccatgggctgtctaacgtgctggcatcgctcagctggtggatatgtttctgttactctatatcacgatcctcacagggatggacgtctcctagtccacctcgtagtgtgcacaccgtgccgtgtctcaaggtatcctatgtctctttctacgaatgatattcccactcgactactgctccgctggaatctccggaggatacgtcagatacaggtgtgactttccgggtgtttttaaccaggaagctgcccctgactagagccctcttttacattattgtgcaatgcctgcgtgccatctgtggagctggagtgcatgatggcttccacgatggattttatgtgtgcgacggtggtgacgccaatgttgtcgcacctggctacaccaagggtgatggccttggcgctgagattgttggcaccttcatcctagtctacaccgtcttctcggtcaccgatgccaagaggaatggcagggactcccatgttcctatccttgccccac

SEQ ID NO: 16224 - DNA, 1247 bp, Zea mays
  Clone ID: MRT4577_114796C.1
cgtccccgcacccggcgttccctccactcctcggcctaggcacccgggttgccgcagcggcccagctcacctgagaagacagtacgcacacgccgcatcgtctgcatctccggtggccatccatcctcctcccttctctcgtcgttccctccactcctaggcggaagcggccggcgcagagtggagatcgacccggactttgaaattgcctcttccttttgatgggtaccatgaagaggttggtttcgaccgccctcgccgcgagagggctcctgagatctcacggactgccgaccacaacttctgttatgtaccaaccagcattccagcaatttatgaactattcgtcaccacatggtggtgatcccaatgcaaacatgaactcaactgcaacacgaatagctgctgatcctgatacacatcaagattttgagccaaagagcagaagttcagacatgcctttgcatgccgctattgctcagctgccattctttcatgccattttttggcaggatatcaaggagaacccagtcttgatctacatgaagggttttcctgagtctccaatgtgtggcttcagtgcactggctgttaaggtctttcagcaatatggcgtccctatctgtggtagagacattcttggggatctcaagctcaaagagagtgttaaagcccacactaactggcctacatttccacaaatatttatcaaaggagagtttgttggggggtctgacatcatattaagcatgcaccagaagggtgagcttaaggatcttcttggggatattgcacaaagagactaacaaaaagtgcatgctcacgattcatgaagcaatcaacagtaggttcttttactatgcgctatctacttagccactaaaatgttctatctcggagtctttaggcgacagcgtacgtgacattgtgaactgtcctacgcattggacatggatgaccggatgtgttcccagaatcaggttgtaggcatctggtattctggaagaggcaaaataatgatctgatacccatatgccgggttctctgtcaatgaataagcgacacttttagcaatagcaatgctgttctttggtgccttgtagtactatggaacttaaattccaggattcgtaggttatgacgttatgttgcattccttttttttaatttaatcgaactgaacttatgataacagataaggctgtaaaatggttatacgcgctgctgcctgctggtgttccaaacgg

SEQ ID NO: 16225 - DNA, 1891 bp, Zea mays
  unsure (1)..(1891): unsure at all n locations
  Clone ID: MRT4577_114797C.1
gcgttcggngtgatatagttgccaaagttcaagctgaggcatcgttgttgaggcatacaaatgcaaacctcagcaagcaagttgagggattgcaaatgagccgactaacagaggttgaggagcttgcttatctacggtggatcaattcttgtctacgccatgagctttgtaactcagatcaagcagctagagcaacgacggatatagattacaatggtggcatggcttttaatgaggatgataatagcgaaggtgatgcaaaaacttccgaggacagttctgatataaaattcagcattgcagaacgcatcaagcagtggtcccagaatgataagagctgccaagcatcgaaaaaggaatcccttcttgatagggcatggattgaagctgcagaagcacgaagcccgacacgtaggcactcactcggtggaccaaagggatgtgcacaagacttcaacatcattaaaagaaggcaatccgatacctttatcagcctcccggatgcgacagatgagtcatttgcctttaataaggatcctgcaatcagggagaagcgtgatcttcttgtagacaagtatgattttggtcgatctgaaagttcaagatttgttctcagcaagccagaagtatgcaaatcacagtgtctggatgttgaaaagcgtgcgttgcgcatccctaatcctccaccaagaccttctgtttctgtgtcaaattctggtccatcaaatggatcgactgtaaatccaccgcgaccaccgccgccgccgccgcctccaaagttttcctcaaaaaccacgcgtccgatgaagagggcacctcaggttgcagagctctaccattcacttatgagaagggactccaaaaaggatacttccggtggcggaatctgtgaagcagctaattctgcgaatgtgcggagtagcatgattggtgaaatcgagaaccggtcttcccatttgcaagctatcaaggcagatgttgagactcaaggtgaatttgtgaaatcattaatcaaggaggtgactagtgcagcctacaaagatatcgaagatgtggttgcatttgtgaagtggctagatgatgaacttggcttcctagtggatgagagagcagtgttgaaacattttgactggcctgagagaaaggcggacactctacgagaggcagcttttggctaccaggacctgaagaagctggagtcggaagtttcaaactacaaagatgatccacgcctgccctgtgaaatcgcactgaagaaaatggttacattatctgaaaagaccgagagaggtgtgtacagccttctaaggacaagagatgctatgatgaggcagtgcaaggagttcaatatccctacagactggatgcttgataacaataacaatcttattagcaagataaagtttgcttctgtgaaattagcgaagatgtacatgaaaagggttgcaatggagcttcagtacatgggtcctttgaacaaggatccagccctggagtacatgctgcttcaggctgtgagatttgccttcaggatgcatcagtttgctggaggtttcgatccggagaccatggatgcattcgaggagctgaggaacctcgttcacgtcagaaacagcacccagtagctaggacgcggcaccgcaatgtagtgtttgaagaagaggattagtgttcagactctcaggcttaccatctcagtaagcgtagcaagcacggtttttggtcgtgtgatgtttgcatgtgtgtaagatatgtttgttctgtaccgcgtgtggtgggtgggatgaagtgacccgccggcgctggcttgtaacctcactgttgccagaaaatagaaaacgcactgcgacatgcacatgcttttgttttgtgcctgttgagcaccgcaaaa

SEQ ID NO: 16226 - DNA, 198 bp, Zea mays
  Clone ID: MRT4577_114798C.1
cccacgcgtccgattacagtccctgagtactgtcttggtttagttagggggcgcaaagcactggacatctgatgtccactcaggccttttgagggggtacctcacctgtcttaccaagaagtgccccccaagcagccttagacatacaaaaaaaaaaaaaaaaaaaaaaagggaaaaaaaaaaaaaaaaggggggaag

SEQ ID NO: 16227 - DNA, 550 bp, Zea mays
  Clone ID: MRT4577_114799C.1
gcggggggtttttttttttttaaaattttttttttttttttttttttttttttttttttttttttttttttttttttttttccgggggacacaaacccttgttaacgggcgagaaggattggggggtaagatactatatagcactttacaggggggggggggcggagacccacagacaaaaaactttgatacaaaacaggttatcctacaattttggacctggggttgacaagggtgtccaagcctgagacgactgggattgattcgatgacatttccaactttgacgtcagccaggtagtcctaattctaagtaacatatccaaaaactgggtaccgcccgtccaaaatattggaattggtggggggtagctaattttttttaaagagccaaaatacttggttagaagcaaaattgtcataaaatttttttttggccatagccattgttccaaaagggttgaaagggagttttgtttgagccttgtagcgaccaaatttttaaagggtttaacaatatacaggcgccttatcaccatcaaccataattt

SEQ ID NO: 16228 - DNA, 312 bp, Zea mays
  Clone ID: MRT4577_11479C.1
gcggttgccacagctttcttttaagaaaaggatttgtcgagttgacaagtctgagagtcatcactcagagcagcacctgctaacgctagccaggacaaaatagaagagccttccggccggccggtcgatcgaacggttgcttgtctagcacagtgggagtactgtactacgaggacagacaggcgtgtgtcgagtggcgtgtcgccttcctgcgttccgggcctcgtcgtgcgtgcgcatgcaaatgcaggcggggacggaaagacattgacattgcacgcgtcagtgtcaccaccggtccacggccaccgg

SEQ ID NO: 16229 - DNA, 998 bp, Zea mays
  Clone ID: MRT4577_1147C.1
gtggcaaattgttattgtgactttttctattataaattttcttacacatttaaaatttgaatatttaagtactcagtttttctcagttacccatttgtgtgtgtgtgtttccacttagaaatttttaaaaccagatgtttctttcattccctttggatccctgcattccttatcaaaggatacaaatactgtgtatgcttttgaattttatttttaggaaaattctgaagctgacgatcacatcacaggtttgttaatatagtaatttcttttagttgagttagagtccccacccctcccttgtagagctgatttacatattgtatttggtaagtgttgactacttttcctgattaagggggtctgtgctggggggaaacaaagctttgcagtatcttatattgtagttaaaattttatttaacatatccttcagtgagctcatttcacactgtagccaattccttcaaatttgtggtgctcctgtaacagtaagaacttctgaaataaaagacatctcctaatgctgtgcaaacatagtttacatgtattgaaggaggcagttgttaaattgaccaattcaagcaatcagatatttgaaaactgcaccctttatttttgaaactgtgaattagaaatcattttcccgctgtataacttcctgctttaacatccgactatgcagtgattttaattgataacatactgtggttattagattaacagcttgatttcaaatgttcagataatgtgtaagacatcacattaccagtaaggattttagtacgttaatatagaacgttacatgaagttggtgccatttcaaaaatgtggcaggtgataatcttataccataatttgcataaaactgtaatagaaatttgagatgtcagtatattatgtactatgcattaccgtggtatagatgttgtggatatatttaagtatttggttacatggtttcacaataaattacaatactgcaggctctaggactat

SEQ ID NO: 16230 - DNA, 903 bp, Zea mays
  Clone ID: MRT4577_114800C.1
catacacaatacaagcatcctctctcctccctcagggtagatagaaatggcatcctccagcttttatcttctcagcgttcttctcatcgtgatcgcttcttgcgcctgggctacggatcctagtcctctccaggacttctgcgttgcagacaaagaatcgcctgtacgtgtgaatgggtttccctgcaaggatgttaaggatgtcaaggtcgacgacttcttcctagcagccgacctcgacaagccaagggatacgacgatgagcaaggtcaagtcaaatgtcacattgatcaatgtgatgaagctggccggcctaaacaccttgggcatctccatggctaggattgactatgcccctcaagggcagaacccaccacatacgcatccccgtgccactgagatcttaacggttcttgaaggatcactctatgttggttttgtcacatctaacccagacaacaaattcattagcaagctactcaacaagggagatgttttcgtgttcccacaaggtctaatccactttcagttcaatccaagtcatgataagccagcggttgccattgccgcactcaacagccaaaaccctggtgccattaccatttctaacgctgtatttggatcgaaaccaccaatcgcggacgacgttcttgccaaggcatttcaggtggataagaaggttgtggattggctccaagctcagttttgggaggacaaccataactaagtgaaggaggctattgccattgtttttacacaccgatgtaataagtaacaacactattttcattcatttgtttgatgtagcaaactgctatataccttttgccatacatatgtattctgttaaaatgtcaaatgaccacagttataaacgtaaaaaaaaaaaaaaaaaaagcggcc

SEQ ID NO: 16231 - DNA, 184 bp, Zea mays
  Clone ID: MRT4577_114801C.1
gatctagatctctagcatgaaccctggcttgtccaggctgccacccatctgcgggggtggcattttttatattacatatgaaacgtaatcgattatggtgccctcataccgacatgtgtttgactgaaataatcaatatattgcttgacatatatctctatcaacacatacccctttcgccagc

SEQ ID NO: 16232 - DNA, 1386 bp, Zea mays
  unsure (1)..(1386): unsure at all n locations
  Clone ID: MRT4577_114802C.1
gctccccgccccgtccccgttcccagctccgccccccgtcccaagtccctcgtcctctcacacatcgcggcgggccgaatggacgaggccgcggatgccttcgcgggcgtcagcagccccggcgcgttcctccacaacgtcatgatccgcggcttcgcggacgcgggcctcccgctcgacgcgctcgcggcgtaccgcgccatgctcgccgccggcgctcgccccgaccgcttcaccttccccgtcgtcatcaagtgctgcacgcgcgccggcgcgctgggcgagggccgcgccgcgcacgcggccgtgatcaagctgggcctaggcgccgacatgtacaccgccaactcgctcgtcgcgctctacgccaagctcggcctcgtcggggacgccgagcgggtgttcgacggaatgccggcgcgggacatcgtctcgtggaacacgatggtggacgggtacgtgtccaacgggatgggagcgctggcgctggcgtgcttccgggagatgaacgacgcgctgcgagtgcggcatgacggtgttggggtaatcgcggcactcgcggcctgctgcctggagtcggcgctggcgcaggggcgggagatacacggctatgccatcaggcacggtctcgagcaggatgtcaaggtggctatgcgctgaacgagcggcctgtggatgcgtttgattgcttcatgcaaatgagagcggaggggttccaggtggaagccgtcactgctatcaatttgcttgccgcctgtggtcaaactgaaagctcactgtacggaaggagtgttcatgcttatgtggttcggagacattttcttccccacgtggttcttgagactgctctcctggagatgtatggcaatgttggcaaagtggaatcactctgaaaagatatttggtcagatgacagagaaaactgtggtaacatggaataatatgatcgctgcctacatctacatggaaatgtaccaggaagccatcgcattgttcctggagctactgaatcaacctctttatcctgattatttcaccatgacaacagtagtaccggcgttcgtcttgctaggctcactaagacagtgcaggcaaatgcacagctacattatcaagttaggctatggagacagcactctgattatgaacgcagttatgcatatgtatgcaaggtgtggtgatattgtggcctcaagggagatcttcgacaaaatgccaaggcaagatgtgatctcctggaatacaatcattataggatatgcaattcacggacaaggaaagactgcattggaaatgtttgatgagatgaagntgtacggtattgaaccaaatgagagcacctttgtctctgtgctgactgcatgcagtgttctggcctggagactg

SEQ ID NO: 16233 - DNA, 483 bp, Zea mays
  Clone ID: MRT4577_114803C.1
cggcgttcccgggttgaccggtccgcccactttccctgtttttctgcacagcgcggtggcctggccctggatatgttgttgagtctactggtgttctcactgatcatggggacggcgtcagtgacttgtagggacccgccttgactgttgttattttgtgctcctaaaggagatgcacgaacggatggccaaccggcaaacgtacggggggtccggtctggcatctactgtctcaggcttgagctcgcactcatggcatgggtcgatccgcctgctggactcgacggacaccgagagcctgttgcagcctaccagacttccgccgatggtgacattgctgttcgctcgcagacaatgagccgctcatcgtctcctggatcacgccacagatgaggcacgctatgtcatatccggcacgcccgcacccaggtaactgctattttgtgtcaccaaggatttgcctgaagcctattttgcttgcca

SEQ ID NO: 16234 - DNA, 310 bp, Zea mays
  Clone ID: MRT4577_114804C.1
ttatttatttttttttttttttttttttttttttttgtttttttttttgtttatacaattttgttaccacatccaaactagcaaaaaagaaggaggctggaaaagggcgggcaaggggcgtacaaaaaatccggaccaaggaaacatctacgagattccagagagatctatagggcatatatttacatagaaacgcaacgaatccaaatttatatgtggggagcggagcatggcggaatcctagaacctaggcacagatcctgccgaatccgccggccatcatgagcttgaactagacaaaggacacgag

SEQ ID NO: 16235 - DNA, 364 bp, Zea mays
  Clone ID: MRT4577_114805C.1
cccacgcgtccgcccactcgtacgcccactcttccgaaaaaaaataacaaaaaaaaaaaggaaaaggtaaaataataaaatgaaaaataaaaaaaaaaaatcataacaaaaatccaaataaaaataagactagcctataatagcttacctatcatagctaacttatttattacaccttcgaagaataataaaacttcatcaaatcgaatgacttccctaactataacaacatatcccattacaaaacctatatttcctcctctattataccatcttcctttaaaagcattcttcctatgccacccagaatcataccacctccatcacctaagatcattcctacagcttcaccaaacttaccttc

SEQ ID NO: 16236 - DNA, 531 bp, Zea mays
  Clone ID: MRT4577_114806C.1
ctggttgcacgacaatcaatcatgacatacatgcggaatagttaaacacaggcagggatattctgtatactagacccaccaacatggaatcacgtatgcaatacagctttgtctaacataacattcgcgttgctgtacgagctattgtactctccggatactacttattactgtgcatcgatcctacctttaacggcactccttggatgctaccaccaggaggcccagtgcaccaattagcacatactagaggactggtttctaagtcatgactattgatagccacccagcataaggcagatagccaacaccccgtccaaagatgtgctgtccctgaaaccaaagctgaccatgtgcgtacaggactcggtaatgcaagggattattgtcacctttagaaaaaatagaagattccacgcagctcatggcactcatgaacctcgttcacacgatgagacaattggaatatcacagccctcagaattgaaaacaactatgtctcctgtgcggacagggtgcttatttatgtgc

SEQ ID NO: 16237 - DNA, 367 bp, Zea mays
  Clone ID: MRT4577_114807C.1
tcgcttatatgcgggactcgaccttgttccatttgctagccggcggcgctgcaagtgcaccccattgcctgataccaccatgaaggaccgcatacatatccacatcacccctgaccacattgataccataaacgcgcgctgtgagctccactgccactacatgatagacatgctgatggtcacatgcccggcagacaagatcattaccaagtcgtcgacgatgtgtaaaacgacctcttgacagctactgctgtttgcaacaacggtgattactcggccatcagttgacctataactatctgtaactgatgagctgatgacggcaacctacagctattgcttatagcctgagcctatatttgctagc

SEQ ID NO: 16238 - DNA, 553 bp, Zea mays
  Clone ID: MRT4577_114808C.1
tctgtccgaggtcttcttcgattaccttgaccggtacctctacgtccataaggtactgtatagatttgtcgccaagttattctgatccggttgctacccaatttgggactactacgagcgagctgctggaattcgaagtcatttcagctgtctgattgatatggcatgatgtagtatgtcatctcaacctctcacataagactgccttctagcaaatttctgttgtacatgcaaagcttgcaagtattggtgctaatttactaggatatttcattcaggggtttcggagaacaaatggagtgtcagatgtgcggattatgtatcttcactcggtcttgacatgccgttctggatcagctctaatgcttgcgttaatatattcagagatactgaagactgtacgaacatatggctcactggatttcgatgcagagaatttctttccaatgatctcaatagcctccctaggggctatgacatacaaaaaagcaaactggtcgatgagccacatattatgacttcaaagtcactcttggttgaaactttgagaact

SEQ ID NO: 16239 - DNA, 328 bp, Zea mays
  Clone ID: MRT4577_114809C.1
gagctcacttgtcggcggccgccctcgatctatatgttgtttagtagtcgctggtagatgtcgtaattcactagcaccaccgtccctttgtaacaaactgaccgtgcttcaaaacccttccacggttgcttattcgggagacaaggcacacgggaggctggccctccacccatggaacaacgcaaaggctaacaaactgttttttgcctaacccacacggttgcgcgctcagctcaagctgaagctcacaggggatccgccggtggaggccgagccataaaggccttagcgaccgatgcatgatacgctgccgatcgcgccacaggga

SEQ ID NO: 16240 - DNA, 1177 bp, Zea mays
  Clone ID: MRT4577_11480C.1
gaaagaagtccactggctacagagcatcacggagtgccgagtgcagaccaaacaaatcaggccttctaacgcctcggccgccgcgtctggcgccgcagctacctcctctacggctcgccgggcacaggcaagtccacgttcgcggcggccatggccaggttcctaggctacgacgttgacctgtctcgcaccgatgccgccgccgacgacctccgcgcgctgctcctgcacaccaccccgcgctcgctcgtccttgtcgaggacctggaccggtaccttcagggcggcggcggggacgcggaggcgcgcgtggccagggtgctaagcttcatggacggcgtcgcgtcgtgctgcagcgaggagcgctgtcatggtgttcaccatgcacgggggcaaggactccatggacgccgcggtggtgcgcccgaccgtctagacgtgcacatccaattcacgctctgcgacttcgaggccttcaaggcgctggccaacaactacctggggctcaaggaccacaagctgtacctgcaggtggagaaggggttccaccgtcggcaggtgaaagagatggtgaacgaggcagttgattcagacattcaactttggactctgaggacatggaggaagaactatttcatattcaatgatcggcacagaggaatggggatggatatcgatgacatgtcgtacgaagagttgcttgctttgggagagcggattggtactgtaaacacaggcctttcagacgatgtattgtccacgtgcctaaacttgagcctctacatgccacaactttaggttctcatgaagattgtgaaacaaaatgtagcgtatgccaggaggagtatttatccggagaggagtagggcaagatggcatgtatttatccggcgaggagtatttatccggcgaggagtactaccaaccagtccaccttccctgcatggagcactggcttcggcagaactggtgttctatctgtaaatttgttgccctgagaactaactagcaacgtgtttcatgtttcttcggaaatgaaatgtatagattctccatgtcctgtattccctccccacctctcttccttttctcttttggaattcctttccttcccttttttttactcaaaacactcatgttttgttatcaattaatcataaaaggaaatgttgtgttg

SEQ ID NO: 16241 - DNA, 711 bp, Zea mays
  Clone ID: MRT4577_114810C.1
cccagtccaccaaataccatgcaatgcataaaatgatttaaaaactttgcggtacattattgctattgttggcagtgcctaataagagcattaagtgaagagcgactgctgttcaaaacgattgcagcaagtcctaacggatgaacgggtacaaccagcaactatctatctagtctatcaagattacatcctttgtacggttgtacaccatttatacttacatgaacagccaaccataataaaaaaaaaaagacaccctacaacggacgctcgtcaggttgaccacagctacaatagaaaaccagctgaattttacaatgctctatctcggcctccatgccataccacccgcgttgctagagtcgtagccctggacgccactgctgccaggcactaccccatactggggttgctgtgcggcaggggcagcaacgccctgcgctggccaccaagcattgctcggctgctgccatgcctgcccaggctgaggctgctgggtccggagataggcatggggaagcgaagtgatgggaacctgaggctgcacagcacttgggatgtggtactgctgctggtaggcagcgttcatctgctggacgggaggcggaggcaacggcagttgctgtggggcgtgcggcaatgtcggctgcttaatcgtctggtgggtggggttccactccggtatgtcatcgtcgtcgtcatcccaggcac

SEQ ID NO: 16242 - DNA, 225 bp, Zea mays
  Clone ID: MRT4577_114811C.1
tcttctcgcgtcgcggtcgcacgcgtaccaccggcgtgggctctgggccatcaaggccaagaacggctgcgtcttccccaaggtcgagaagcccgccgccgccgcggaaccctagttctaccccgccgacgacgtcaagccttgcgttcccagcacccgcatgcctaatcccaccatgctcaggacgagcatcacgcctgggacggtgctgatcctctttgcggg

SEQ ID NO: 16243 - DNA, 226 bp, Zea mays
  Clone ID: MRT4577_114812C.1
gctactcgaccacctaaacgagcttgtggtccgactacgacaacgtgccctcagatgcacatggcggtcgacggcgtctccggcagtgcaatcgctcagctgctcaaggccagtagccgggctcgctgtcttttagcgggaagcagcatcatcagccctactacgccggcttgcgaagtagcgaggaccactacgcgtgcgacgtgatcttgctgaggcggtctag

SEQ ID NO: 16244 - DNA, 667 bp, Zea mays
  Clone ID: MRT4577_114813C.1
ctcccattactgtctctgaaccgggccatcacgtaaaaaaagagcagctaaattaacttctcagcccaagcctcgcaatcttggaggttaagtcaggaatcgattgatgttttggatgaatttctggtactcgtcgtcactatcccaagaagaatattccgcctcttcatctgctaatgctactgcaacacgaggtgcatttgctgtggcctttagggggttgaggcagcaacgggccgacctaaaagtttatcaggtttgccaagagatttctggatcgaagcacagacattatcaaatagttcagtctcaaggctttccatcgcccaggtttcactttccagagttgaggttgttgactcccctgatctcctcgtttcctcaatgattccagatagcctggaaccttgggccttacgaaaggtgctgtttacaatggctaattcctcagtgtcgagaacccctagctgcgcgacgaactgagagacggtgacctcctgcccgccgtcggtgacgacgatgggggtgccgccggctccggctccggctccgtggacggcgcccgccgcgtggtcgggcttggtcgtcgacgacgtccatgctctcgtcgcgctggcaagcatggctccacacgcgccgtcttgttcagcggcaggttcgtcgtttc

SEQ ID NO: 16245 - DNA, 768 bp, Zea mays
  Clone ID: MRT4577_114814C.1
taacttgtggtcgtgggttcaggccccacggtgggcgccaaaaaacatgggagctctgtctagtcgtgagactgactgactgtgaggtgagcacaagacccccgcaccggccaccgcccaccgccgcgagaagaaccgacaaccgagcatgaaggccgggcctccgcacgtggccatgctggccacgcccgggatgggccacctgatcccgctggcggagctggccaagcgcctggcggcgcagcgcggcgccacggcgacgctcatcacctacgcgtccgcggcgtcggccacgcagcgcgcgttcctcgcgtcgctgccgccgtccgtctcctcgcgcgcgctcccgcccgccgacctctccgacctgccccgcgacgcggcgaacgtgacgctgatgaccgaggagtgcgcgcgctcggtcccggcgctctcgcgcctgctcgcggagctccgcgacaccacccgcctcgtggcgttcgtggccgaccacttcggcacggcctccctcggcgccgcgcgcgacgccggcgtaagcgcggtgtgcctcttcatgcccatgagcctgcacgcggtctcgctcttcctgcacctccccgaggtggccgcctccgtgcccggcgagttccgggacctggccgacccggtgcggctgcccggctgcgtgcccatcccggggcccgacatcttgtcgccgctccaggtcaggtccgacccagcgtacgcggagatgctgcgcctcgccgtgcgctgccgcgaagccgctga

SEQ ID NO: 16246 - DNA, 811 bp, Zea mays
  unsure (1)..(811): unsure at all n locations
  Clone ID: MRT4577_114815C.1
cacgcgtccgctctctagatgctgatccaacagagtcatgggttataacaggtcaccgccacggtgatgttgctttatggaagcacggcatgcagaaaatgatgtctttgataacatatcgggagaagcaagccttcctcggaatagcttgaacacccaacatgatgtttattccgttaaattcattgcaaggaagcggtggtttgtagtttggacatgtgatggtttcatccatgtgtataagtatgaaacaagaataatggactgcataaagagattcagagcatactcatctgggatcatagactggggtatttgctcgtccagagcgcttatcgttcatccaacccagccatatttgctctctacctgtgaagaaatgaagctttgggactgggacgatgattggaagtgcatacaaaaatttggtagggaacacactgattccatacttcaagtggcatttagcccaaatgacagttttgccagtgtttcaagtgatcacacaataaagctttggtgcctgaaatctcccacatcagagtgtactctgcacggccattcggacaaagtgaattgcttggatttcgtcacacatgatggtcagcaatatttgattagtggatctcaagactgtactgccaaggcatgggccttgaaggaaaaggaatgcgtccagacaatggatgttntcatgtcgccagttgtttctgtcatttcccttccggacactccatatataactacaggttcagcagatggcactattcatttgtggagttctgctaatttcaggcttgagagaatactt

SEQ ID NO: 16247 - DNA, 976 bp, Zea mays
  Clone ID: MRT4577_114816C.1
gagcactcacttcagagctggaatcatgtacgcgtccagtgattcttccgacgagccgcttttgaagtccaacatgttctctctcggtggctccaagttcttcggcgcagtcagtagaagcatcgtcctgggtgccggtcgcgcccgcgtccgcccacgcgtccgcgctgttttttcgtctaaaattgcttccagtgcgaaccggccgtttggagaagagttccgggcagctaggagggtgtctgaagatattggagctcagcttgttcttggggatcgccccattgaaataactcttgaacgagcatggaaatcccttacatgggatcaaaaggcaaacctactaatctcactgttccgcggaattacttctacgactcaaatgccggatgagaaagccgccgtcagcccatacgagttatacgagaaactgagcacatcttaccctgcactgttgcagcctctcatacatgagcgcgacatgttcctcgcatggtcgctgaagaggagcaaggctgtgaacaagagcagaactgtcgtcggagttgtagggaaggggcacatcaatggcatcgtgtacgcgctgatctctgaccagggggatctgaggttccgagaccttgttggtagagcatcatctgatacatgggtcagctcactcgtcaagggcctggtaagggacactgtaattggtctggtcctttgggctctgtatgaacagctgcaggctgtgctgtagagtagatggttcagacttccacaaggcacacaaactaggtactgctctcaacttcttacaagctgaaacagtggaactgaaatccggtaccagcggaaatctaaaactagatcgaagtgcctgtacatgaacttgatactgtccgtgttcttcacagggctgatgacttgattaaagtatctgtacatgaactgtcaagtgctgttttatcttctgaatacatttacacaggacaac

SEQ ID NO: 16248 - DNA, 489 bp, Zea mays
  unsure (1)..(489): unsure at all n locations
  Clone ID: MRT4577_114817C.1
ggacgctggntgctagcaagttccaataaactttgctgggacactgaccgtaagtatgagcttaacagctgcgacgtcgcatgcacgcgtacgtaagctcggaattcggctcgaggctacaaggaggagacgatgggccctctgcagaagtcgatgatcacctccaagacttacctgacctacagcgatgtgaatattgacaaggcaggtagtgtgaggcagtttcagccactgcaccgtcatgtagagattggtgagggaataagcaactctagcatggtaaccgctcgtgaaatcagcgctgcgatccttttgataaatagggtctactcattgctcgtgcatgacaattcatccatcaggactgttatccctgaaagcataatgtctatagacacgaagaaagtctattggtcttgtctcaagtggtgctgtgtctagagatgccccagtttggacagtgtcttcgccactaactacaatgccgtc

SEQ ID NO: 16249 - DNA, 279 bp, Zea mays
  Clone ID: MRT4577_114818C.1
ttaaatgggctatgcccacatggattgggccctaactcttaaaggggcaggccaatttatgggccacgcctaagtccataagacatgcgagggattctgttaaccacaaaatgaaatctgctcccactatgagataaacttatgactggggagagctcctaataccccctaaccactcagctagtggccctttcactatggtgcctactataaagacccccaacttcatcgcaccaaaaaaacaactgtatgggaaaatgtctgtgttttttaactatt

SEQ ID NO: 16250 - DNA, 500 bp, Zea mays
  Clone ID: MRT4577_114819C.1
cccgggacccccaaattttttcaaaatcttccacgggggggcccaagggggggaaaaaaaaggctcaaagtgggcattgtttggggggaaaaaaagctaaaagaaaacctcccggcctttcttttgacggaaaaaggggccctcaaaccgatcctttttttttggaagggcttaaaaaggttttttcagggggcccttttggggaaagaagggggggttttgaaacccaacggcctgcccaaatgcttggaaatgtacccccccccccccatgaccttgttgaggtcaactttggtctcaacccccaggccttggaccttgtacacaaattcctccggggaaactttgccaggggcccccttggaatacgggcaccctccaaggcccgaccccgaaaagtccactttgggaacccccatgggtgttttctttacttaaagggaaacaagaattttgaaaaggccctccccttcctttttgggaaaataaacggaaatttt

SEQ ID NO: 16251 - DNA, 416 bp, Zea mays
  unsure (1)..(416): unsure at all n locations
  Clone ID: MRT4577_11481C.1
tagggaaaaaggatgttntggaaaaaaaaaaaaaaaaaaaaaaaaaaaaaaaaaaaaaaaaaaaaaaaaaaaaaaaaaaaaaaaaaggaaaaaaaaaaaaaaaaaaaaaaaaaaaaaaccttgacctgcccgggcggccccccgggcagggccaggcttttttttttttttttttttttttttttgttttgcccatcataaacatcaagcggccggtggattcattaaaaccaaaacttttttatgaccctgcatatattatggggcatcccccacatgaaaaggggggcccccttcccgcttttttccctttttagatagagaggggggggtgggggagattccccaaatatcacaaatcacacttagggcggaatggcacgggaaaccccccaggggttggggcggtatctggg

SEQ ID NO: 16252 - DNA, 316 bp, Zea mays
  Clone ID: MRT4577_114820C.1
agggtctagcgcggctcgttttcccgtgaggccgatgattccattggcgccatgtggaggatcacgaccgattctattgcatcaacaacgcgattccagccgggtccaggagctcgatttcggacctgaccagtaggctaggttgttccctgaggagcgcgaacggagggacagcgctgcgacgattatggctcatacgcttgtcaacgcgactcacagactactgcaggccgagttgagatcgatcaagcgttcgcttctaacaactgcaccactgagaccacacgcgatagcaatggcgtgcacggagcgcaag

SEQ ID NO: 16253 - DNA, 643 bp, Zea mays
  Clone ID: MRT4577_114821C.1
cgaattcgcggccgcgtcgaccaccaaatacattgacacatgcaagtacttcaataaatatatatatatatatatatatatatgaatgcaatacatactgtgctcaaatagcctaaaccaaacctatccaaacaagagtaacttcaaaagatcaatttaatgcttgcatatttctagacagcaccacaacggttatttgttttcctcataactcacaaaatattcatccaatagaagtaaactaggactttatggaaagcttacaaagtccactatacccttggtattatcatcaccacaagatttgacacttagaaaggccaaacaatgcgaaacgtaaattttgtccagacttgaacagaattcaactactcacttcaaaaatccataattggagtctcagtcatcccattcaggtgctcctagactttttagaaagccagtaaaattgtctatatttcatttataaacctatcaggttaattcaatgcatatcaagatcaaaagacataagaaaggctttgctgtccaaatttggacagattcaaagattacaattaaaacagatgtagcttaacttataggtcaccaaaaagggtgatccaaaatttgttggaaagcttaaggaaagtactaccacttc

SEQ ID NO: 16254 - DNA, 671 bp, Zea mays
  unsure (1)..(671): unsure at all n locations
  Clone ID: MRT4577_114822C.1
tgactctcccattctctcactccgcttgcaagtatacccaacggcgcctctacaataccatgcaaaaggatcacatgttctacgagttcgtcgacaacactgctatgcctgtacgtcaagctctctaccgctgtcgtctatgaggagcacatcgacaagaagagcctaggtctcccgacacgcagcgctacggcgctgctctgctgggcatcccctgcgttttctgggcgatgatcgttgcaactgttctactgcccgagtacctttcagtgaagcctcatgagacataggcgtgcatcgttcaagcctcgttcgctggcagcagcgagagacacacctgggtgcgcatctgtctgcttctactctactgccgcagagtactccacgacgtctggagggtcttgctcttgaaggaggaacagaacatcctacatcaaaaaatacctgggcatatacagattgctcgactacgagtatactcgaagtatgctgctacgtgagccgagaatttcatgactcttagcgtcctattcttacgagaatatcatatcattagcattcttgaaacaatgatgtnacganattgaagcctcgtcttgactgtgtccttatttaggcgggcataatgctaagactgaactcctgcggcgcttatcctcactgaaacaact

SEQ ID NO: 16255 - DNA, 597 bp, Zea mays
  Clone ID: MRT4577_114823C.1
aaagagtttgagctattcatggactctgtgttattcagttgtggggaggctgggacgacatctgagtacaaggttgcttcatctgagaaacccaaggagcactttgttcggttcgattcaagtgattgctcctgtctgtgcacctgtaggaagtttgagtttatgggtatcccgtgctgtcacatgttgaaggtgctagattacagaaatatcaaagagcttcctcaaaaatatcttttgaaacggtggagaaggaccgccaaatctgcaaatgaagacaatgaaggcaacgcaacaaacgccaacaacgggtcattattgattgtccctgctcctcctacaaatcaccatgggcttcagagcttcagtgcaatgattcaagatgcttcagtttctagcatgcattagaatgcatctcatagaagctcttaatgcaggaacttgcagggtcaatgccaacgacgcgtttataccttgcaagactccacagcgttggccactgaagaagcattggatgggccggccaccgtcaagattcaagcacgcatgtgctcaccatgtaagagtcggcgccgttggccactgaagcaacggtta

SEQ ID NO: 16256 - DNA, 414 bp, Zea mays
  Clone ID: MRT4577_114824C.1
atcaatggtacacttagtaactcaattactgctaacacagaggggaaaactgcgggcaagagtaccattaaaacaccaataaccggcccgactcttataaaggaacttgagaagagctccacggacagctctagtttctcaactgagacctaagacgagtggcctatacatgacaagagtgcaagcagacctcaagaagctattagcataggcatggatataaaccacgaccgtgtgtacactgaaggaaaagctaggtcaagtcggaaactaaataacgctagtactcctgcgggtgacgctgacatagagagggggaaggagaaagacattaatgcggctgaaatagagcaagaggcaccatgaaatgcttctacaggaaagaagcgcactatgaacgcttgaagctaacac

SEQ ID NO: 16257 - DNA, 212 bp, Zea mays
  Clone ID: MRT4577_114826C.1
agccgcccgaggacaagaacaacaccgactgcaatggcaatgtggacgtcgccaggaaggaggggaccaagatgagggagtggtggaaagaggagttctttgaagagatgagcaagaagggaggaagcttcgagaagcggcgctccggcggcaaaccgtggatccgttcgatcagcatgaacacgggccacggcgacaccaacggcggcgag

SEQ ID NO: 16258 - DNA, 650 bp, Zea mays
  Clone ID: MRT4577_114827C.1
cctcgaggccggccgggagagtattatcaaagcgccactgcctccacgttgtccgtccactgtctcgagcgcacgccgggagcatctgatgtggacaacggcgaactcgcgaacatccacttcgccagggactccgcgcggatacaggagctgaccgacatctggccaagggaatctcaatgtatctgagcccaagaagctgaccatcgcaatgtctgccggctgctgtttcgcgctgctcacctacctctcctcttgtgccggttgttgtgcctatctactcgcccggtttcgaccgctcgtcgtaccatggtgcatgaacatagcatgccgcccagcaaccacgatccggcactggacactgtacactgctcactgtccctgggagcaaaaggcccaatggtagaacacacaaagacggttacgaccctgaggtggaccactacatgtcaaacttaccggaggtcacaaaaaacgatcaccagctacgagggcactcacgaccaaggcagtacaccggtgtcattattacagaggccaagatcacctgccacgagaaccgaggccacgaggtattcccgtacgcacggccgccggtttatgatctagcccggcacatccgtgtcagtcctaaggataaaaccatgtac

SEQ ID NO: 16259 - DNA, 651 bp, Zea mays
  unsure (1)..(651): unsure at all n locations
  Clone ID: MRT4577_114828C.1
cccagcgtccggagtgacataccttgtgttggatgaggcggaccggatgctagatatggggtttgagccccaaattcggaaaatagtagcacagacaggcaaaccttgtactggagtgccacatggcctagagaagttgaagccttagcaagacagtttctacaaaatccttacaaggtaatcataggctcacctgaacttaaagctaatcattccatacaacaaattgttgaagttatttcagatcatgagaagtatccaagatgtgaaggacataaagtgtgtgataaattatgattttccaacaactcttgaagattatattcacaggataggtcgaactggccgtgctggtgctagcggaactgcatttacttttttcacacacgcaaatgcaaagttctcaaggaatctagtgaagattctgcgagaagctggccaagttgtgaatcctgccttagaatccatgtccaggtcttcgaactcaacgggaggaggcaattttcggtcgagaggcagaggtgggtttggtaaccggggccatatgtctggatcaaatacctttcctttaggaggaagaagccatattgatgtgtgcaaaagactgtgggagtatgggactatntgtatacntactcgcattaagtgcat

SEQ ID NO: 16260 - DNA, 410 bp, Zea mays
  unsure (1)..(410): unsure at all n locations
  Clone ID: MRT4577_114829C.1
gttgaagctgaagggtaaagcgctggacgtgaaagatggtggagtaaagaaaaagaaggggtaccagcatgagaagtcgtctcagactgaatctgataagaatagagatgaagagaacccacatcttgactatgaccatctcacaccagcagagcgccgatacatgaaacagaagcagaagatcgacatgcagaagatagccaaagtcgccaacaagtcacacaaggaccgcatgcaggacttcaaccagtacctagctaagctcagcgaccactacgacgtccctaaagttggtcctggctaacatggccaatctagctgtgttacgcacgaacaattgtatgctgagtgggtctatctagttntctattagcattttatatatcgttttacagttgttgtaaaacgac

SEQ ID NO: 16261 - DNA, 1844 bp, Zea mays
  Clone ID: MRT4577_11482C.1
atcctgagtggttctggttctcatatgcgcacgcatatttttgttcttattcctatgtctgcatttcggtcagtggaagcaattgagcgcggttcctaaactcggatcctgcattttgtttcggcgatatgtgttggtgttaccagttgctgcagcgatacttccaatttctgtgccgatgggtttcctcgttttcttcttattttgtttcctcgtcgtcgcagcctgcaaattggtagtttcttggttcttatcagtggagctggctttggaatttgcaggcaccgttctgagctgcgctggtgctcctggaaaggtgttggtgcctggaggtggcagtgatgacttgctttcctccgtagagcctgtcggggacactcaacctgaagaactacaggttcgattgtccccttctgtgcctccatggtacaaatgtccaaatgtctgatgaaattaagtttgggtttcagcctttgcactttcatatcaggcattgtgcaatgcctcgtgaattgttggttagggcaccgtgctggttcttgggctactgacattgctagcttgtgatcccacctacacctagaaagaagtccactggctacagagcatcacggagtgccgagtgcagaccaaacaaatcaggccttctaacgcctcggccgccgcgtctggcgccgcagctacctcctctacggctcgccgggcacaggcaagtccacgttcgcggcggccatggccaggttcctaggctacgacgttgacctgtctcgcaccgatgccgccgccgacgacctccgcgcgctgctcctgcacaccaccccgcgctcgctcgtccttgtcgaggacctggaccggtaccttcagggcggcggcggggacgcggaggcgcgcgtggccagggtgctaagcttcatggacggcgtcgcgtcgtgctgcagcgaggagcgctgtcatggtgttcaccatgcacgggggcaaggactccatggacgccgcggtggtgcgcccgaccgtctagacgtgcacatccaattcacgctctgcgacttcgaggccttcaaggcgctggccaacaactacctggggctcaaggaccacaagctgtacctgcaggtggagaaggggttccaccgtcggcaggtgaaagagatggtgaacgaggcagttgattcagacattcaactttggactctgaggacatggaggaagaactatttcatattcaatgatcggcacagaggaatggggatggatatcgatgacatgtcgtacgaagagttgcttgctttgggagagcggattggtactgtaaacacaggcctttcagacgatgtattgtccacgtgcctaaacttgagcctctacatgccacaactttaggttctcatgaagattgtgaaacaaaatgtagcgtatgccaggcaagtttatttgtatcagattcttctatattaggatgttagttgaaacctctaaatttttttctgttgcgtgaattttttctcaggaggagtatttatccggagaggagtagggcaagatggcatgtatttatccggcgaggagtatttatccggcgaggagtactaccaaccagtccaccttccctgcatggagcactggcttcggcagaactggtgttctatctgtaaatttgttgccctgagaactaactagcaacgtgtttcatgtttcttcggaaatgaaatgtatagattctccatgtcctgtattccctccccacctctcttccttttctcttttggaattcctttccttcccttttttttactcaaaacactcatgttttgttatcaattaatcataaaaggaaatgttgtgtt

SEQ ID NO: 16262 - DNA, 3525 bp, Zea mays
  Clone ID: MRT4577_114830C.1
aattcggcacgaggccgcccgccgccgcccgcagatccatcccctcccggcctccctagcctttcccctcgagcacgtcagcgccctcgccctgctctgtcggccggccaagctcctcaccggcgccatgaacccgtatgatctccgcttcgctgacccctcatcctaccacgacaggcgcagcgacttgaccgtggctcctacgttcgctccgccggctcccgtggctgcggcgaacctgaacccttacgccgccgcctacccgctgcctgtgcccgttcccgtgcccgcggcccccgcgggcggcgactaccagcgctacgggcagggaggcagaggccgtggtggcggtggcagaggcggtggaggagggtacggaggtggcggcagaggaggaggtcgcgggagggacgggcttgactcgctcgccctccctaagccggactttcggagcctgataccgttcgagaaaaacttctacgtggagtgtccctccgtccaggcaatgtcggaggcggatgtggcgcagtaccgccgcctccgggatatcaccatcgagggccgggatgtgcccaagccggttagatacttccaggaagccaacttcccagattactgcatgcaagctattgccaaatctggatttgtggagccaacacctattcaatctcaaggttggcctatggctttgaagggtagggacctgattggtatcgctcaaacaggctcagggaaaacattatcttatctgttacctgggttggttcatgttggtgcccagcctcggctagaacaaggcgatggcccaattgtattaattctcgctcccacgagagaactggctgttcaaatacaggaagaatctacaaaatttggatcatattcaagaactagaagcacatgtgtctatggtggtgcacctaagggtccacaaatacgggaccttagaagaggagttgaaattgtcattgcaactcctggccggttgattgatatgctggaagctggtcacacaaacctacgtagagtgacataccttgtgttggatgaggcggaccggatgctagatatggggtttgagccccaaattcggaaaatagtagcacagatccgcccagacaggcaaaccttgtactggagtgccacatggcctagagaagttgaagccttagcaagacagtttctacaaaatccttacaaggtaatcataggctcacctgaacttaaagctaatcattccatacaacaaattgttgaagttatttcagatcatgagaagtatccaagactcagtaagctcttgtctgatctaatggatgggagccgtatcttgatattcttccaaacaaaaaaggattgcgataagatcacccggcagcttagaatggatgggtggccagcattatctatacatggtgataaagctcaagctgaacgggactatgttcttgcagagtttaagagcggcaagagccccataatggctgccacagatgtggcagcacgtggtcttggtatgatgatttatttgaatattaggattaggtagtagttccaagtgctcaagggtgataagtcggagggttgttgagctgcgattggttgagtgaactgaacttgtggattggtggtgtataccaaggtgccatcatgtcaaaggtagataatttccccccgtggtttacctcatttgagcgtgagcattggcagtgttacacaggcagttcaactttgagctatcatggtaatgttccctttccgaataagccttttagggagcctacatttggataaaatggaaatcctcaaaaagtagcatgcaaccgaatatgcatttcacactatagttgatttcttagcttgatttgaattccttgatccctgcatatctgaccattttggaacatttaggtattgtgttgctgccctcttcattcattctttgtccttgtaattgaattcttttcaatccaatagtctgcttttcttgcaagtatttttggcttacctttctacattttctttgtaaatccatgtttaatttgtttagaattaattggagcaataattcttttcagagatgtattgcaaaattttaggcataaaacatttgtatacaaatgacaatatcaatttcaaatatatttgtttgcacaaatgcacattcttcatgagtagcatgtccatggatctcctttgctttcccctagttttacatgaacctttagaaagtcgttctgctttctcaatcaagctcctcatcatcggtatcactgccaagtgtgaactggtcaaaaaggatggttgtaatcagcattcttttcagttgattcacgatagtgacctctgatgcagcaccttacacattacagcctacgttggactggcatgtcctacagaattttgtttgggttatggatattgatgctgttacattattggataagtggttacccaggcatgccagttgcagtcttccaacattttttgataaggctgagaggttaatcaccatcaattccacatccagcagtgattgatgcctggttcagtttttcagctccttcgacttgtgttttagaattcaaaagtgcagcactgtggactttttggtgcttgtctagaccatgtaccttctatggggatcgacaatgttgatgttccagcgtggtccagcatggtattcaggacaacacatcaattttgattaagtactgataatatttgttgattttgcagatgtgaaggacataaagtgtgtgataaattatgattttccaacaactcttgaagattatattcacaggataggtcgaactggccgtgctggtgctagcggaactgcatttacttttttcacacacgcaaatgcaaagttctcaaggaatctagtgaagattctgcgagaagctggccaagttgtgaatcctgccttagaatccatgtccaggtcttcgaactcaacgggaggaggcaattttcggtcgagaggcagaggtgggtttggtaaccggggccatatgtctggatcaaatacctttcctttaggaggaagaaggccatattgatgtgtgcaaaagaactgtgggagtatgggactatttgtatactactcggcattaagtgcattctttgggaaatttctgagaaatttcccctactaccaggattgataacaccatcgattttcgctacagtacctggagcttcttatatgaaagaacaacacatcaactatctagcaacagcatatgcattccattcagatatttcttttggaaggaccctgtcttgttttagtggagtccctgtgatcgtttaaagtcgtctgtatacttgtactgaacttcttgtggtgttactgttaggatttatggttgctctctattggtgtgcggtgttactgaacaaatttagttaagaagttaggcatttccatatttaatctgattctgaaataaactagcaaatttatgatgtacactttataatagtagctaatatatatatgcaaactctatatgc

SEQ ID NO: 16263 - DNA, 289 bp, Zea mays
  Clone ID: MRT4577_114831C.1
gaccacaaacaggttgcacaatcatttcgaggggtgtagggtttcaatttcgtactcttactatctttttacagagcttggttcttgtggaaatgattagaggacatggtgagacacctaacactggagagggcaagggtgcatcaacctgtgatgtctgaaaataatattctatgtggagatttacatcaattgtttccacagaaatgctttgcattgtttgcgacgatactatcaagcccgtgtttagcaaagcattttccaaataagtccaacacccttttcaaat

SEQ ID NO: 16264 - DNA, 195 bp, Zea mays
  Clone ID: MRT4577_114832C.1
aaaaaacgttatttaacctgcataggtggggggggagataaaatactccggtaggggggggggtaaccctcaattggaggtaaatactattgttaatacgaaacgggacgccggggagccataacctattttattcaattttttaacctaacaaccgggggggccggaaccgtggaggttttgaggccgatgagg

SEQ ID NO: 16265 - DNA, 368 bp, Zea mays
  Clone ID: MRT4577_114833C.1
gggactgtttctttattacggtttggccgtggccgcccaaggacacatagtcctgggggatcttcctctctattttataaaccaaataactaacagtttcagggcttattgggccacattgacccttctctggcctaagaaaggtttcttaacaaacaccaccctcctttttgacctacttgtacttggttaaggccatttgggaatgccccattacccaaatgacattatttccccgttttcatgcccaatggctatccttatctgatcagtcaaggtctatgccgtggggtgagttttggactggagagtcaaattgcaggcctgtctccagggcaaactgagctcataccaattaatacttgact

SEQ ID NO: 16266 - DNA, 503 bp, Zea mays
  Clone ID: MRT4577_114834C.1
ttatgtgagagcaaaaaaacgtacattctaccacagtgctcattcgactacaagggccggtatatcacagagaactgcttcaatggcttcaatgggctttgaacaccgaagggagcaagcatatgggctaccaccagtgcttgatgaaagcactgtagaacatccaattggcccactacaacaacaatcccaggcacatgtaaccatacaaaccattgcatcgcagcagcaacaagcactgacacacctagccgaggagaaccctatacaactactttgaacaacatgtggttgcatcacaacccacttgctttgtgaaacgtgcactgcctaccaacagcagccacagatgcaacagtttctaccagcgctcagtaaactaaccatggagaaccctatggtctactctacaacaggaacaaactgtttcatctatcccgctcgctatgggcaatgcacctacatacctgcaacaacagttgttgcaacaacagttgctgcaa

SEQ ID NO: 16267 - DNA, 995 bp, Zea mays
  unsure (1)..(995): unsure at all n locations
  Clone ID: MRT4577_114835C.1
aaccacccagagactcaccagccaccaccccaggccagccgccacgtttagccgggctaaacaaacacgggcgcacaatcggaactcgctgcactgccttggaatccaacgagccaatcattcaaatcctccccggaaccgcgttgagcacggcacggtcgattggatctagggtgagggtccgtcgccgaagaaactcgtagcggacagcgagaggagccccgccggtcgatccagaggagatgggctcctgcgagatgacggccacggaggtagcggcgctgctggatctgaagccgcacccggagggcggcttctacgccgagaccttccgcgactcctccgtctccctcagcaccgcccagctcccgccgcagtgtaacatatatgctcatgcccgcccatttctcgtctgtttcatctgatctgacccctctctcatcggatggagcgggatgcttagtacggagtatttccgttcagaaagataaaacataaaggtgtagcagtgtgcggtgcgatgcgccgattggattgggcccaattcaatcggggtttctgcttgttcttcgtcttagcgtgtgcagaagacaccttgcagaccttagatggtagagtagcatattctggcaagtgggaattcagatagtaaaactcaccattgtgtctggatcattgagtgcgcagaaaccagcggtgttagccaggggattgtggcctgggggtaacatgatgtgttagatataccactagttagtataactttgtgctactgctgttacatacatcaggcacggaatacattttgctatgccactgtgtactactgttgttacatacatcaggcattattgcttttaggaagattgcactactgtacttcctctgcttctactgcctactggaacctgtaaatggatatcataagatgtcgcgngatggctgcataaggatagttgatttttctaacaanaatattatgctgtgatcgctgc

SEQ ID NO: 16268 - DNA, 501 bp, Zea mays
  Clone ID: MRT4577_114836C.1
cccacgcgtgcgctcaatacctcgagaagacgcctgctcctcgccgatcgatacgatggccgtcttcttcgaccttcacaccggcgaccggctcaagtcccttgaggctcaccttgcccgcaaaacctatgggtctggtgaccccattagggggggtgacattaagggcttcgccggggggccaaaaaaacctggcgcttagtttcctaatgccgcccgctggtaccagaccgtctctgcgggtggagcctcaagattccctggtaagggtggtggtgtgaatctgcctgcgggatcaactcctgcggcagctgctcctgcggatgaagctgaagatgatgatgaccttgatctttttggtgatgaaactgaggaggacaagaaggcagctgatgagcgtgccgccgctgccaaagcctcttctaaaaagaaagaaagtggggaatcctccgcccttatggatgtcaaaccatgggacgatgagactgatatgaagaagct

SEQ ID NO: 16269 - DNA, 531 bp, Zea mays
  unsure (1)..(531): unsure at all n locations
  Clone ID: MRT4577_114837C.1
cgttcgnaaaaaaaaaaaaaaaaaaaaaaaaaaaaaaaaaaaaaagaaagaaaaaaaaaaaaaaaaaaaaaaattaaaaaaaaaaaaaataaaaaaaaaaaaaaaaagggcatattaatgggggggatccttttttcgggtccgcgtttttgcaccgtcgtttctgttttttcccttcttttaatttccttcctggggcggttgcactgcccccttttttctgccggcttcttggcgtaacccctgtccttccccttccttccctccttcttttcccccccttttttgcttggggggggccctgcaccggggccttttccgatggcttttccgtggtttttggcaactggaccgctccttgggccggccccttaaccgcggcttttttggctgtctccctttcctttctcccttagttggccggttcttttcccccggttcttttgcctggctttcttttttttttccctttttttgctggcctgccccgcggtttttcaagttgggtttttggtggtgggttcctttttg

SEQ ID NO: 16270 - DNA, 175 bp, Zea mays
  Clone ID: MRT4577_114838C.1
atattttttttttttttcgttcaaaaatgaataaatacaccggggtcgtgcatgccaaagtataaattacaactatattttgcgacgcgacatacattgaaatctcgacatacaacagcttattgcaagaagtacatagctcgcctggggcttcttattacttcttaccctccaa

SEQ ID NO: 16271 - DNA, 1030 bp, Zea mays
  Clone ID: MRT4577_114839C.1
ctctctgtctctctaggttttttgattttagccgccgccgctgctcatctcacatccctcgagaagacgcctgctcctcgccgatcgatacgatggccgtcttctccgacctccacaccgccgacggcctcaagtccctcgaggctcacctcgccggcaaaacctatgtgtctggtgactccattactaaggatgacattaaggtcttcgccgcggtgccgtcgaagcctggcgctgagtttcctaatgccgcccgctggtacgagaccgtctctgcggctgtagcctcaagattccctggtaaggctgttggtgtaaatctgcctgcgggatcagctcctgcggcagctgctcctgcggatgaggtttgttctccccatcccaagccatactgccacatctcttttttatttgtttacattaatctgtcttattggtcaaacaatggggcaatgctgttctgtttgatttagcatggtacaatttttcattgattggtcaaacaatggggaagaaattccagttgatctatgcttcttattttttattccattaaatatcaacctatttgtcgttgtgtgattaattgcatgccaagtatgctttatatcaatgcttcttttttggtgccactgtcttctgctgatgaatctgaactaactgaaaacattaaccgagtttgtcatagtcttgaatttcattgctgttgtccttgttgtagtaagcttttaattctcgacaggctgaggatgatgatgaccttgatctttttggtgatgaaactgaggaggacaagaaggcagctgatgagcgtgctgccgctgccaaggcctcttctaaaaagaaagaaagtggtaaatcctccgtccttatggatgtaaaaccatgggacgatgagactgatatgaagaagctggaggaggctgtccgcagtgtccagatggagggtctgacttggggagcatcaaagcttgtgcctgttggatacggcatcaagaagatgactatcatgttgacaattgtcgacgat

SEQ ID NO: 16272 - DNA, 348 bp, Zea mays
  Clone ID: MRT4577_11483C.1
tgttagacgtcactaccaacacaccaagagggggcttttgaatgactatggggcttatccccacccgaggaactagtctgactgcgcttacggcggggctcacgcgtaatgataccaaggtgatctgtcggcttgaggagacgcccatcacccctctattgcatctctggctgtacacgcgcacaatcaaggcaatctatcgcgtatccaaagaccacagctagccgaaggtcggggagttcttcaacaatcaccggctgcatatctgccagcaagaagacgactggaatcgcatctctggccgaatcacatggaggctaaactatctactcatcaaccatgactatg

SEQ ID NO: 16273 - DNA, 2650 bp, Zea mays
  Clone ID: MRT4577_114840C.1
gttgtccacacacgcatttcatctcactacgaatacagagttaaaaaaaaagacattacaataactgttcacaaatgtaacgcgactaataaacagtaaagtagaaaaaaaatgaagtcttgctgtttgctccttaagttgagagagcacggatagacttctctctatggtgttcttaacattttttcagctctctactcatctggccaacgaacagatgctatcagcaataatgcaacaaatacatttgcatgctcgcacaaacggtagtaatagtcacaaggaaccagagaaatcaggcaagcttaagacgagcagcaagacgtcttctggttgacgggttgcccgcggatctgcaccgtcgctggccttgcgttggccgcggctggttggctggccatcctgtccttgatggatgcagccatagccatgaaggcctgctccacgttggtggcgtttttggcactcgtctccatgaacgggatgcccatctcatcagcaaatgcctttgctgtctcagttgccacaactttgttggcagttaggtcgctcttgttcccaacaaggagcttgttaacattgtcacttgcataacgatcaatttcatttaaccattgcttcacattattgaagctttcttggtctgtcacgtcatatacaataatgattccatgagctccacggtagtagctgctagtgatggtcctgaagcgctcttgcccagcagtatcccaaatttgaagttttatggtcttcccatcttgctctactgtccgaattttaaaatcaaccccaattgtgctgatgtagctgtccaaatatgaatcatctgcaaatctgagaagcaagcatgatttcccaacaccagaatcaccaataagcagaagtttgaaaaggtagtcgcggacgcgtggggggtttttgattttagccgccgccgctgctcatctcacatccctcgagaagacgcctgctcctcgccgatcgatacgatggccgtcttctccgacctccacaccgccgacggcctcaagtccctcgaggctcacctcgccggcaaaacctatgtgtctggtgactccattactaaggatgacattaaggtcttcgccgcggtgccgtcgaagcctggcgctgagtttcctaatgccgcccgctggtacgagaccgtctctgcgggctgtagcctcaagattccctggtaaggctgttggtgtaaatctgcctgcgggatcagctcctgcggcagctgctcctgcggatgaggctgaggacgatgatgaccttgatctttttggtgatgaaactgaggaggacaagaaggcagctgatgagcgtgctgccgctgccaaggcctcttctaaaaagaaagaaagtggtaaatcctccgtccttatggatgtaaaaccatgggacgatgagactgatatgaagaagctgggaggaggctgtccgcagtgtccagatggagggtctgacttggggagcatcaaagcttgtgcctgttggatacggcatcaagaagatgactatcatgttgacaattgtcgacgatcttgtgtccatcgacactctaattgaggaccaccttacgcaagagcccatcaatgagtacgtccagagttgcgacattgtggctttcaacaagatctagagttcagtttctgagtttgggcaacggcagcggctcagctcgtcaagtttgtgctgggatgccagtttatcccttctagtctattacagaaatgttgttcggagctgagtctattataaacatcttggtctgagtttattgttgacctactgacgagctcgccatggcctccctctcctctgccgccgtcaccgccccttccttcgccgcaccagcgccagcccgcgccgtggtcagaaggaggtccttcaccgtgcgcgcctctctccgcaaggccaccggcaccgccgccgtggcaatggctgccagcgccctgcttgccggcggtgccatggcccaggaggtgctgctgggcgcaggcgacggcgggctcgtcttcgagcccagccagttcaccgtcaaggccggcgacaccatcacattcaagaacaacgccggcttcccgcacaacgtcgtcttcgacgaagacgaggtgccgagcggcgtcgacgccaccaagatctcgcaggaggagtacctcaacgcgccaggcgagacctactccgtcaccctcaccgtgccgggaacctacggcttctactgcgagccgcatcaaggagccggaatggtcggcaagatcaccgtcaactaattaagctagctatcgatcgatatccattcatgtattagctgttgcttcctgctttgtactccgccgatctgtccatctctacatgttttcgtcttcacacaacaacctctgctacgactacgtatatatgcatgctactagctgattgattttaacgcgaccaggccgaccccgaaagctagcttggaccaagttttgtacccattaattctaccgatgcatctctcagtttagactcccataatcatacaaactgctagctttcatctgcatctgcttagtacatctaactatttgtaccgcaaggtgacgtttttgcagaactcctaattatataccatgcataataaagtggtgtcaacaat

SEQ ID NO: 16274 - DNA, 196 bp, Zea mays
  unsure (1)..(196): unsure at all n locations
  Clone ID: MRT4577_114841C.1
gcgcatggcagcgccantgacatctacgggttctccggatcgaaagggtggccttatgcttatggatgaaaaacgcgtcaaagctaccgccgatagtagcgaacgcatcgagcacatgatgagcgccgcagcggcggcatgatggctgccacttctgcgtgatcatgacggtgagcagcgtggtcagctccagacg

SEQ ID NO: 16275 - DNA, 344 bp, Zea mays
  Clone ID: MRT4577_114842C.1
cttctccgatccatcaacaatcggcgagagcgatcgagagatccagaaagatgacgaaagtggcgtggtcgccagccgtactcttcgggctagccgtgacgctagtttgagccccggctgatgagctaggtggaggaataagagaggcgccggcgccgcccgccgaggcagaagaaggcgccggacaactccgcgctccacgctgtgcgaggcccggaaggggatggacgctggtggcgtgcaaggagccctgggacctctcacagcgctccagactggtgccgggcggccggacccagggcgagggggagcgcacccgagcagaagggcgattcccgcggcgc

SEQ ID NO: 16276 - DNA, 323 bp, Zea mays
  Clone ID: MRT4577_114843C.1
tttcggccgaccttttatttttcttttttgacgcacaacattaacacaaggagtattctacatgtatcctattactacaaaaaccatcacaaggcccactacaggtgccatcaaacctacacgctcaagtaaatttggctgaacaacataaaacgctggtcgcgcatgcaggaagatgcatcatactgtgggacccaagggtataattcacaacgtggttggatagccgaccaacgaggctacgtaatgatccaatcctagagtcgaacataataaaactgtttgggttacatcaaagaatcagtgtcgtgacactcaagata

SEQ ID NO: 16277 - DNA, 231 bp, Zea mays
  Clone ID: MRT4577_114844C.1
gtccgcgcactcatagcttgctccaggacatacgtacgtacatacatctttcttttcatcgctagctagctgacaaccggggggggcttcttatctgtcgccatcaccgccccttccttcacggacgtgcccgctcgtgcaatggtcatcacgaggtccttcaacgtgcgtgcctctctccgcaaggccactgccaccgcccacgtggtcgttgacgacagcgttctgctt

SEQ ID NO: 16278 - DNA, 1838 bp, Zea mays
  Clone ID: MRT4577_114845C.1
gggcagcccggccgagcaagcaaccggccaccccgccggcgagcgtgcgtgcgggggagaagtactaattaaccgcgcgcgcgatccatccatggccgtgccgccgccgtgccccgcgccccacgcaacgtgccccgcacgccgcccgcctgctctaatgcccgcgcgcctcgctgcgaccacgccttccacttccaccgcttgcgcctctcgccaccgagctcctcctcgctgctgctccgccagttggactgggaggcgacggcggtgatggcgccgccgcggtggaagtccggcgacgggcgccgccggctcctgctgctcctgtgctgctgcctcctcgccttcccctgccacgctcaagtactcaccaacaacaatatctcccaccggtccgatcaaggcggcatccactcgtttgtgggcacgtacggcatcaactacggccgcatcgccgacaacctgccgccgccggaggtggtggtgcggctgctgaagctggcccggatccgcaacgtgaagatctacgacgccgagcacaaggtgctggacgcgttccgtggcaccgggctgaacctcgtggtggccatccccaacgagttcctcaaggacatggccgccaacccggccaaggccatggactggctgaccgagaacgtgcagccgtactacccgtccacgcgcatcgtcggcatcaccgtgggcaacgaggtgctgggcgggcaggacgcggggctcgcccaggcgctcgtcggcgccgtgctcaacgtgcacgacgcgctcaagatgctccggctggacgccaagatcgagctctccacgcctcactcggaggccgtcttcgccaactcctaccctccctccgcctgcgtcttccgcaacgacctcatggtgtacctccgcccgcttctcgacttcttctccaagaccggcgcgcccttctacgtgaacgcctacccgttcctcgcctacatgagcgacccgtcgcacatcgacatcaactacgcgctgttcaagccaaacgccggcatcgtggaccccaagaccggcctgcactacaacaacatgttcgacgcgcaggtcgacgccgcctacttcgcgctcgaggccgcgggctactcgggcatggaggtgcgcgtggcggagaccggctgggcgtccgccggtgacgccacggaggccggcgccaacatggagaacgccatcacgtatgaccgaaaccttcggaagcggctgttcctgcgcaaggggacgccctacaggcccgaccgggtggccaaggcctacatcttcgcgctcttcaacgaggacctcaagccgggacccacctccgagcgacactacggcctcttcaagcccgacggcagcgtctccattaacatcggtctcaaggggcttctgccgtcatcggcaccgccgcgtcctctcgtggccttcaagagagccggagcgtggggctggattctacaatactcggctgcgcttcttccgtgtacattgttttctctagcattgttagggatatgaacgcagattagcacctgcatgcctgctcgctgtatagtgtgttagatccaagcttcatggactggaagctagcccgtggcgcttacgaggggctagtaagctgctccaggacaagtgcatgcagtttactacaaattatcttcgtagcaaaatcgcgctattgcgaatctctcaattcagggttcggagatggttaagaattctagtagtataccaaatttccgaataaatcaatcaaaagctaaacctcatgtttcattgttcagcctcatccggtccctttacaaactgaaacatcaagtttacctgtc

SEQ ID NO: 16279 - DNA, 292 bp, Zea mays
  Clone ID: MRT4577_114847C.1
acataaatgtgtttctttcttaatagtatcctagttccagcatatattcaacatgaattttatcattctcctcctaatggaatgtcttccttatagaaatgttcacgacaaattcatttgtgttttttacatgtcaataatgtatgctaaattaaaatgttttccagttattctgatagatgtcattatggcatccttaatttttcttctccttctgtatatagggtaagggactgttctgaagaacctttccatttagtgatcaagatatggaagctgatttctgaaaatg

SEQ ID NO: 16280 - DNA, 394 bp, Zea mays
  Clone ID: MRT4577_114848C.1
ctccacgcgtccgcccacgcgtgcgctcacatcgtacggtggctgatcccgagggtgtgacgcctacggctcgtttctgtgctggccgtatgacgcgagcggctttatgatcatctgctgagcgcggaggacctgcaagcctagtacgcctataatacagaccgagggagacgactcggattccaagtccaggctgcaaactgtggacatgcatgtatggacctactgaagcttgggacaggccggtgcagatacgagtcacatggaacataggctcgggtagcaagctcgattagacaccgttttctttttcaacggaagcgggacctggccgtatatcatctcacagcttatgtatttgaaatttgggtatatggtgaggggtagcccgaac

SEQ ID NO: 16281 - DNA, 300 bp, Zea mays
  Clone ID: MRT4577_114849C.1
caccgctccagaactcccgggaccaaccacgcttacaagcagattcgtagcacaacactgcagaagcaacacggagcggtggttaactagacttcctcaccgggctaccccctccccaagcgctcgcttccgaaatggaggcgccatttgccaggggcctactccaataattccggctgaactgtgcaaattctcatagagccgtccctagatacaagcccatacaatgcaggacatctatatataacggttcaatggccacaccccatggagcaaacttcacaagggcttgagtagcaa

SEQ ID NO: 16282 - DNA, 1285 bp, Zea mays
  Clone ID: MRT4577_11484C.1
cattgggtacctcgaggggacctgccgacctgacccacacacacgcgtagctgtggcgcagggggggcgcggcaatggacgccaacactctcctcctgccctgctccgacggcgccgtcgccggcgcggtggacttccgcgggcgccccgcgtcccggtccggcaccggccgatggtccgccgcgatgttcgtcctcggggtggagatagcggagaggttcgcgtaccacggggtgtcggcgaacctgatcagctacctgacggggccgctcggggaatccaccgcgggcgcggcggctgcgatcaacgcgtggagcggggtggcgaccatgctgccgctgctgatggcgtgtgtggccgacgcctggctcgggcggtaccgcaccatcgtcctcgcctccctcctcttcgtcgtgagcatgggcatgctgaccgtctccgcgctcccggcgttccaccacgacggctgcagcagctacgcctccgcctccagaccgctggcctgctccccgccccccgtgcaagtgggcgtcttctacgtctccctgtacctggtggcgctcgcggaggccgggcacaagccctgcgcgcaggcgttcggcgcggaccagttcgaccagaacgaccccaaggagtccgcgtccaggagctccttcttcaactggtggtacttcggcatgtgctccggcaccgccgtcaccaccatggtgtccagctacatccaggacaacgtcggctggggcctcggcttcggcgtcccctgcctcgtcatgctcttcgcgctcctcatgttcttgctcggtaccaggaattaccgctactacacgtctactgaatcgagcccatttgctcgcctcgccacagctttcgttgcgctcatcaaaggctccaaatcgagacaacatgacggcactcttgcgagcgacgacgccgggcaccgtgaagaagtgaaaggcgtgctgcgcctgttccccatctgggcgacgtgcatcatctacgccgtcatcttctcgcagtcgtccacgttcttcacgaagcaggccgcgacgctggaccggcgggtcggctcgactctgcgcgtgccaccggcggcgctgcagacgttcatcagcgtgaccatcatggccttcatcccggtctacgaccgcgcgttcgtgccccttgcgcggcggcttacgcgcctctcgtccggtatcaccatgctgcagcggatcggcacggggctcgtcctggccctggttgccatggtcgtggcggcgctggtggagaagcggcgggttgcctg

SEQ ID NO: 16283 - DNA, 374 bp, Zea mays
  Clone ID: MRT4577_114850C.1
aggacgcgtgggcgctctttttttcgcgaccggcatagccagagggacaggcacacacaccccggcggcgagtcaccccagggtaagaggcccctcatgtgccccgacctcaacactggacctctgcatcagtccgccgtgccaggaggaggatgaggagatggctgaggctgccattagagtgagaccgagcggaaagcgggcggccgggctctgcttcggctgcagcctgggactacccaggaccgtggactgcaggtgcagcagcagcagcttcctcggtctcaagaccgccatgctcgacttcaaaagccttgagatgaaatgagcgcgctgctaccctctatgggtagcttctccccccccgtcgtcct

SEQ ID NO: 16284 - DNA, 668 bp, Zea mays
  Clone ID: MRT4577_114851C.1
aaaatccactttcggaggtaggagccgccccctttgtcgtcgccgccatcgccgttctacagctgccgccatgccgcacctccagcccccgcgcccccacccccaccccacctcccgcctctcgcgcgcgtcgcgtccgtcgccgttcccgttcttccccgccgggacatcgcgctccggccgtctccaccccgtcccagcctccggccactcggtctcgagggttagtaaaggaaagtttgcagttgcagccgtcactctagatgattatcttccgatgcgaagtactgaagtgaaaaatcggacatcaacagatggaatcaaaagcctcagactaatcacagcggtcaaaaccccctatttgccagatggaagatttgatcttgaagcatacgattctctgataaacacgcaaataaatggcggtgcagaaggtgtaatagtgggaggaacaacaggagaaggtcaccttatgagctgggatgagcacatcatgctcatcgggcatactgataactgctttggagccaacattaaagtgataggcaacacgggaagtaactcaaccagagaagctgttctcgcgacagagcagggatttgccgctggcatgcatgcagttctccatgtcaatccttactacgggaagaccttcactgaaggcttga

SEQ ID NO: 16285 - DNA, 369 bp, Zea mays
  Clone ID: MRT4577_114852C.1
aaaaaaaaaccccccgggtttttttggttaaggaaccccttttgggggggggaactgcccctttaaaaaggtttccggtttaaaaaaacaaggggggataaaggaacccccccaattgtttggggggggtttttccaaggcaccccccggtttgggtttttgaaaaatttgttcccccccccttaaagggtcttaaaatgggccccttttttgaaggggccaaaatttttttgggctcaaacaaaaaggggaaaattcccttgcaaaccaagggccaggggccccctaaaaatggtggcccccagggtatccattggcttttttcccccccgggggcctgccattaggaaccttttggccctttttttt

SEQ ID NO: 16286 - DNA, 1918 bp, Zea mays
  Clone ID: MRT4577_114853C.1
acccacgcgtccggtttctgtgtctgtgtcaacaagatgttctagcatcaacaagatcctgattagcatgtccaacttccagacaaaaagagtagagcagcaaaatggagaaccatggaaaatttgatgggtgggatgaagttctggaagaagaagatgagttagcgagtgtatgcaaatatcctattagcacatcgtacctttcttatggaacaagcagaagtatgttatctcatttccagcatctctcctcttagagagaatgttgtgagcaaaggaggactttgttttgttaaactataccaggtggacaatctaatgcgtgtcctctgtttccctactgcagggggcaaaagtgtaaagaagcctagattctctttacgaggatatgattttgttccattagatgttaagactgataacttgtgcattggggagcaagatgtttcttctgcagtgccatcaactaaagcttcacaaaccatggtggctgaacggttggaaaacgttgaggaacaaactgaagatttggcaccagagtttgcccttccacccaaagcaaatacttcagtttctgagctgctagataatttacagcgtaggggtggttcttttgtcaggacaccatctttgttgcaccaacatgctccaagcatatcaatcagggagcaggaagtttcatccggagtgccaccaactaaagcttcacaagctttgatggatgaaccgtttgaaaatgtcaatggacaaactgaagagttgccatcagagctcccctgctcgatcaagagaccaaaattttcagttgcagaacttctagaagacctacagggtagaagtggttcttatgttgagacagcatctttgtcacaccaacacaccagagctaaacattggaagccaaagttcctttcttccgagaagaaaacaatagctattctaggagacaggagtattgacagtgaggaccccttggagcatgtaattgacggaacatctagcgaggaggaagatgctactcaaaaccacttgagtttggtgaacaaagatgagaaccagcaaactatggctgacctatttcaagaagtttttaatccaacaaacatggatggtgccatgaaatcaatgacatcaacaggagctggtaactatggaagaatgcaacagattatgcagatggaaaaatattggcatgtggaattcttgagacagtatagcagagagcacagttattcaggtgatttaaagggaactactgttcagattatgtcaaggtcattggaaggaaagctaacagtctgcagctgcatgttccaggaaaagggcaatgatgccactataagtaatgcctcagcagacggcaccatggatgaaagcagaactaggaggactattatcttcagtccaaagatatgtaacaatgtagatcttctggttggaaacataattcatatcttcccaccatggaaggaagttaaaatacaagaagagcatgtgattatttgcacctacttctcgcaccaccaccggacttgatactcggagatatttctgtgctagctgcaaagcttgaggcagaccgccagcataaccgttgctgacagtttaatgttgatgtactcgcagtgtctattctgtttgttttgtaatcacaagtgtactggctgcaaagctataggcagaccgcaagcataaccgttcctgatagcctaatgctgatgtacttgcagtctctcttctgttttacaatcacaagttcctgaggcctagttcggattctctaatgaaaaaaaaaaaaaaaaaaagtcgcggtggatggacatgtaacttagtttaaattacatcccaatccacctcaacatatgttgatgtctacttaattgcaccccccaaaaaaaaaaaaaaaaaaaaaaaatat

SEQ ID NO: 16287 - DNA, 407 bp, Zea mays
  Clone ID: MRT4577_114854C.1
tggtgtttttttttgtgaaataatccgttttttacctcttgcagcatatatagatgtgtgctcatccctcgaatgaccacgagccaaacaattcgttcgactttcgcagtactaccaacaatgcattgcaaactcatgaccaccagattgcttgagctgaacaatacaatgaaacgatcatcatcacaagacttccacgttacattgctcgatctttttgagctgtttttcgtagtgcaaccagatgatcaccgacttggttgcgaggacgagcatgacgtgcccgatgaccttctgcatgccctcgagccaggacatgttagacggccgtgttgtccttcttgaacagcatgaacagcttctgcttgtactgcggatgcacgattggctgtacatattatctccag

SEQ ID NO: 16288 - DNA, 1881 bp, Zea mays
  Clone ID: MRT4577_114855C.1
accgtttgaaaatgtcaatggacaaactgaagagttgccatcagagctcctctgctcgatcaagagaccaaaattttcagttgcagaacttctagaagacctacaggtcacaccaacacaccagagctaaacattggaagccaaagttcctttcttccgagaagaaaacaatagctattctaggagacaggagtattgacagtgaggaccccttggagcatgtaattgacggaacatctagcgaggaggaagatgctactcaaaaccacttgagtttggtgaacaaagatgagaaccagcaaactatggctgacctatttcaagaagtttttaatccaacaaacatggatggtgccatgaaatcaatgacatcaacaggagctggtaactatggaagaatgcaacagattatgcagatggaaaaatattggcatgtggaattcttgagacagtatagcagagagcacagttattcaggtggtgctgttggtagcagttggtataacttatatgctttttgctttggattaggcagttgtctgtttgtatgcaactatacatggatttgagagatagtgacagttcaaattcgtaggtgatttaaagggaactactgttcagattatgtcaaggtcattggaaggaaagctaacagtctgcagctgcatgttccaggaaaagggcaatgtctgtgatctatgtctccatcttccaaaaactcctatctactcatgtggcagtaatcttcttaaattgagtattattttgcttctcatgctgctgagttgaacaaacattttggaaaaagaaaaaacaataatgtttcaagatgattgcctgtcagtttcttatccagaacagcgttctctttagaaaagtaatgactgaattgcccaattatgcaacaacaacaacataaccttttattcccaagcaagttggggtaggatagagttgaaacccaacaagatgtcaccaaaaagagaaagcgagagaaacaggaggggaaaaagcttttgagagcactaaaagggaaaaagcctaatcacggttcgggcacgtggatagcttttttctaagcacttctatccaaacataactctattgggatatttcattccttcaagtccattttgattgtctcctcttatgtcaagtttggccatcctctacctctcttcacattattgtcccgtcttatgatgcccattgggatattctattccttcaagtcccttttgaattgctcaattatgcaatgctacaaaattaaatttgaaagttattatgctgcatgtagatgataagacaaaaggtatcctttgttgtagacaatagaccaacttctaattaactggctcttatgtggacatgttttacgggcattctgcaacagttacgttttcatggaacttatgtttcatgcaggatgccactataagtaatgcctcagcagacggcaccatggatgaaagcagaactaggaggactattatcttcagtccaaagatatgtaacaatgtagatcttctggttggaaacataattcatatcttcccaccatggaaggaagttaaaatacaagaagagcatgtgattatttgcacctacttctcgcaccaccaccggacttgatactcggagatatttctgtgctagctgcaaagcttgaggcagaccgccagcataaccgttgctgacagtttaatgttgatgtactcgcagtgtctattctgtttgttttgtaatcacaagtgtactggctgcaaagctataggcagaccgcaagcataaccgttcctgatagcctaatgctgatgtacttgcagtctctcttctgttttacaatcacaagttcccgaggcctagtccggattctct

SEQ ID NO: 16289 - DNA, 829 bp, Zea mays
  unsure (1)..(829): unsure at all n locations
  Clone ID: MRT4577_114856C.1
cactattggagttcttacacacacttatattacttctgaatattttaatctagttgcaccaacatgctccaagcatatcaatcagggagcaggaagtttcatccggagtgccaccaactaaagcttcacaagctttgatggatgaaccgtttgaaaatgtcaagggacaaactgaagagctgccatcagagctcccctgctcgatcaagaaaccaaaattttcagttgcagaacttctagaagacctacagggtagaagtggttcttatgttgagacagcatctttggtttgtttcttgtgatgtcatttcatgatttggggttctgagacaagatagcttgcctctgaatattgtaaaaaaatttattgcagtcacaccaacacaccagagctaaacattggaagccaaagttcctttcttccgagaagaaaacaatagctattctaggagacaggagtattgacagtgaggaccccttggagcatgtaattgacggaacatctagcgaggaggaagatgctactcaaaaccacttgagtttggtgaacaaagatgagaaccagcaaactatggctgacctatttcaagaagtttttaatccaacaaacatggatgggtgccatgaaatcaatgacatcaacaggagctggtaactatggaagaatgcaacagattatgcagatggagaaagattggcatgtggaattcttgagacagtatagcagagagcacagttattcangtggtgctgttggtagcagntggtataacttatatgcttttggattaggcacttgtctggttggtatacactatacatggatttc

SEQ ID NO: 16290 - DNA, 751 bp, Zea mays
  Clone ID: MRT4577_114857C.1
gtctactatttaaccttgaggtccagaggcaacactggttcataccgagaatgaatggtggctcggttacatctggtggcttttgtcccaagaacaatgcccttgttataactacatctaaaaatgaggtttatgtatttgatgtggaagcaaaagaactgggcgaatggtctaagcgtcatacacatgaattacccacaagattccaagacttccctggagaggtcattggcctctcatttcataaaatgagcccattttcagtcatgatatacagtgccagggcaatgtgcgttattgattttggattgccagttgttcaggatgtccaattgtcaacatcagaaaagacagactcacaaaaggctgcgaaaacaaaggttaagcggaagcatcgtgacgaagatttgaaacaagagaaaaggagtaacttcaccttctttgcatttaaagatccggtgctgtttgctggccacctactggacagttcaattctggtagtagagaagcaatggatggatgtcgtccaaggattcggcccaccggtccacagacacatatacgggacatgatccatccatccatagtagcttttgaacttgtggccctcgtaacaggcaggcagcccattctttttcatcaccgccgtgaaatgtttccaaccccaagcaagttgtctggcatgacactcccaagatgtagcagcacataatgtctgctattatcatctggcgcgatagcagtctgggtc

SEQ ID NO: 16291 - DNA, 260 bp, Zea mays
  Clone ID: MRT4577_114858C.1
acactgtcgggcgcggctagcggacccgaggggggaacccagccgggcggaagcacggtcatagcggggcccggcgggaaaccgagacgcgcgcacaaaggggcacaacagctagcccggaaacaaaggtggccagcccagggcgcccaaacagagagccaacacacaaaaaccgggaagcccggacggcccaccgagcaggcaaaaaaccagaagggccaacggcaaaaaggaaacggccaacgcccggaaagcaggcg

SEQ ID NO: 16292 - DNA, 406 bp, Zea mays
  Clone ID: MRT4577_114859C.1
caaaaaaaaaaaaatttccttgggggaccttacccggtcccaacaaaaagggggcatccgggaaccatttttttttaacgggaaaaaggggacccccggggcgggtttttccccctttggggacatcaacaaaatggcccttcttataaggattttttagggcggcccccccaaaattttgggcccgtcaagttgggccataaccagggcgaaaaaaaaaattcccccctaaatagggggggcaaaggtttgcccaaccgggggggctcctaaggggcaaggggccccgggctttgatggacaggaccgggccccgggtttggtgggctttgaaaggaagttcccccccaccgggggtttccgggaaatttggccatttggggggcaaaaagcattcaatggggtc

SEQ ID NO: 16293 - DNA, 329 bp, Zea mays
  Clone ID: MRT4577_11485C.1
ggaaaaaaaatgctaattttaaacaattttttttgattttttagggctgccagggggggtttttttgatcaaaagcagcttgtttaaagatttttccctccaaaagatgaacttagcaaaagtgttgcaacgttgtttgcaaacagccatatgtttatccatactgcaaaagagttttggttgcaaaaagccaaattttgttgttctcataagtggaaccacaacggttttatttccattgaataacaaatgcagggtttaaaaagagttgctttttaaaagggatcaaattggtcttaatttttgccctttttgcaaaaactgaaagt

SEQ ID NO: 16294 - DNA, 813 bp, Zea mays
  Clone ID: MRT4577_114860C.1
gggtacctcgaggccggcccggccgggaaaaaacattttatcttctctatcgctactccaagagtacccaatcaccgagccatggccatctcagtcactgccgtggccgccttgcccgctttctcggctcaaagaagcctcccgcagccgtcccgccagagggtcgtagcgttcatcgtcgtccggccggtgcgcgcgcaccgccggtttgtgggcgtggcggccagctcgccgcccacgccgccggatctcgcaaagaaggtgtccgagagcatcaagcaggcccaggagacgtgcgcagatgacccggtgagcggcgagtgcgtggcggcgtgggacgaggtggaggagctcagcgcggccgccagccacttgcgcgaccggcagaagggcgccgacccgctcgaggagtactgcaaggacaaccccgagaccgacgagtgccgcacgtacgaggactgaaccacgcgcgcgcgaggttggatcgctgtcacttgatctagctagcagcttagctcggcatgatggcgacatgtgtagacatgcaatggatcgggtatgatccttcgttgattcagtctggcttggtgtggaataaaacgaggtttgctgtttattataagtaacatttaggagctcctactgtagttccaaggcaggtgtaatccttagaaacatttgatggtgtgcttctagccttgtagtactcgatatgtgcaattctgtaaagtatcgcagatttttcacctaagcatgatattgctgcaaatatgatctggtctctaaattggctaatgtgtggccaattttcaa

SEQ ID NO: 16295 - DNA, 797 bp, Zea mays
  Clone ID: MRT4577_114861C.1
atagtactaataatgacaacatattaaaaggaacttgttccttgatcattattatggcacatggatcactattgtttacaccttttttctaaagacattccaatctctcaagtttcttcttgctgctctagctaataaaaattgcattcatgcataggtataagttccgaatgagtaaagcacttcaatctcaaaggtttgcaagttgttttgtggttgttattgctcagggaagctacacttatatcagacattagagtagcgtatgattagggaaactacactgacaactgaaattagagggttgtatgtttttttatcattgaaaaattctgttggagtatactgtatagccttataaatttcttctaaaatattttcattcttcagaggattaattgcttaaacacaagtgtatctgggtattaccgatatattttaaactgttcaatacttttgcatgatcataatgaaagtctgataaaaacatactggttttatcaactttttttatgctgattcagtcaaagagtgcttgaagccttgaacttaataaatatcagcttgaatgctttgtacatattcagtatgttgttgactattagaaaacagcttggtgattgttaaaaggaagatatttttcagagaattccaattttggctgtttctgttggcacatttcaccgcatttcattgctattataaagcacgagtttcttcgtgcatcgtccccctcccccactacacgtgtatcgagcgtttcctgcgcgccagtcaaaaaaaaaaaaaaagcccct

SEQ ID NO: 16296 - DNA, 247 bp, Zea mays
  Clone ID: MRT4577_114862C.1
tatattccacatagatccaccaataaacactcatctttacattgattcttttcacactccttccaaaagttactcttaagaattcctacaacattatgaatacttctaaatcacaaatcttccttccaagacagtacattatatctacaaagttacatctatatcactgaatccaaacattcctatgcaaatttttaatctaataatgattaaccctcctaaacctttagatatctcttaccttaac

SEQ ID NO: 16297 - DNA, 609 bp, Zea mays
  Clone ID: MRT4577_114863C.1
aaaatgtttgcgtggatccgtgcagtgaagatagtcatcgaagtcatctacctcctctgagatctcctcaacgatctgcatattttcacaacgaaaatgggtcgggttcagtaggagtctggcaaagcagcaggcgaggaggtgtagatggactccgcgctaagcggcagagtttcaaagtttccagcagcataaaaggaagctacgtcgccaagactagcgtccctcgtccgaagccaggggacagcctgagccagtctgcgacagcgctgcgcggggtcaggaagaacacgaccgctgttgaagttggtggccatcctgtgagtttgaagccaaacgctgttcgctcggtcgccaaggacccatcatccagcagaggaccacccagggatagcctgagccagtctgcgatagcgctgcctaaacacagaaaggacgccactgctgttaagagcaagactaataataaaccttggctataataaggcagcaggcttacatacatcactactccgatttcatactccactgtacaaacattgtaatttgatggttgtgtggttccagatttattttcagcccggaaagaaggaaaaaaaaaaaaaaaaa

SEQ ID NO: 16298 - DNA, 500 bp, Zea mays
  Clone ID: MRT4577_114864C.1
gagcattcggctgtttttccaggtccaactcaaggaccgcccagacagtagcgtaccatgacggaaccagtccataaaagattcacttgttttaggatactaattctccaggaaaatatctcgaatggatatcatcttacatttaccagaccagcttctactggattgttgttggtcgagattctttcctattcaccccaataccttgaaaaaacctcttggtcatcatactaccgtctctatactatcgctatcaaggaccatggacatccctactcagctcaactcatcttataacgtattcaccggcgctgatagctccttcagctgcgatgcactctcattccagccccagctgcatcgaacaaaagattctgttactcactttatttcctctcattcgaacccccatactgcactggatcatcaaccatgcccaaatcaatttgcaagagataactcctttcgccccaaccacaaaccaaaaaagcgcccctcgc

SEQ ID NO: 16299 - DNA, 172 bp, Zea mays
  Clone ID: MRT4577_114865C.1
atccttcgaaggttcaggagcgacggccagtcatctgacgcactggtggccgctcctctatagctcgtgcgagtcatctgatgctgacactggtcgtgctctcgtgctcagaggacggaaaggggatccacctacacttttacttccacgggtgtcgaccccggacacgccc

SEQ ID NO: 16300 - DNA, 485 bp, Zea mays
  Clone ID: MRT4577_114866C.1
gcaaactactctagcgagcactgaagaccagcactagaggacttttttttttgtggacagtagaagtcagagcaaatcaggcagctgttgctccccaagatttgtcaaaagtgtttcctcaagtaaaaaaaatgactaaagtccccagttccccactgatgcaccgtcggtgccaacctctgccaaagtaacagaaggcctcagctcagctcatttctttggactccagataaagctaccagcagcacatgtaatcttggtcacttcgtcgtccaaatccccatgtatcgacgtataaaaaaataggtaagaagtttaattatccatacctccgttccccttgctgtagaatactagcattttaggcatattgttttcgtgtaaaatagatgagagcagggacttgcaaaaggcttgtggtttgggaatccgaagcattggttgtacacttgtatgaaataatgatggtccagttttcagttggt

SEQ ID NO: 16301 - DNA, 832 bp, Zea mays
  Clone ID: MRT4577_114867C.1
aaaggaaagaaaatctatatatccccaattcgtcgcccatcgaaaaaaccgcgtcccaaccgaaatccccaattccccaccccagagcgtcggcgagagagatggcgtcggcgacggagatgcagccgctggcaccgtcgggctaccgccgggcgccggagatgaaggagaaggtggaggcgtcgtcgatcgacctggaggcggggaacggggagacgctctacccggggatctcgcgcggggagaacgccctccgctggggcttcatccgcaaggtctacggcatcctctgcgcgcagctggtcctcaccaccgtcgtctccgccatcaccgtcttccaccccaccctcaacgccacgctctccaactcgcccgtcctcgcgctcgtgctcgctgtcctccccttcatcctgatgatcccattgtacatctatcagcacagacaccctcacaatcttgctatcttgggtttgttcactctgtgcttgagcttcagcattggtgtggcttgtgcaaacactgaaggaactattgtgcttcaagcattggtactgacctcagctgtggttgtctctctgactgcatacacattctgggccgcaaagaagggcaaggaatttagttaccttggaccatttctgttttctgctctcaccatcctggtcgtgataagctttacccagatcttcttcccattcggacctgcatcgaatgctgtgattggcgggtttggagctctagtcttctcaggcttcatcgtctacgacactgagaacttgataaagcgcacacttacgacgagtacattctgggcgtctgttgggctttacct

SEQ ID NO: 16302 - DNA, 473 bp, Zea mays
  Clone ID: MRT4577_114868C.1
ggacagcacagcgcagcgcaagctcgatcaccacaccaaccagactcagaacatccagaactcagagcttctacttctagaacagaagaacatcgagatcagtcctcccctgcatcctccaccggcctcacctagatgagcacctcgtacaccgaggcgcagttcggctccttgttagacctgcccgccggagacgacctcacgtcctggttcacacacctgtgcggcgaggagcaggcggcggcgctgccggcgttccaggcgccggtggcgatggcggaccccaggaagaggagcgccgagtaccatctcctggaaggggaggcgtccggggtcaagaggcagcgctccccgaccagcagctcccgggagaacagcgccggcagcaatgacggcgactacgagcacacgtccgcagccgcagccgcagccgcagccgcagccgctgccggcggcggtggcggaggcagggg

SEQ ID NO: 16303 - DNA, 588 bp, Zea mays
  Clone ID: MRT4577_114869C.1
cccacgcgtccggagagaaagcttctggggtttgagtctatagaatagacccaaaccaaattgaaagaagatcgatcgatcgatcaatggatctggtcggagttgaagtgaagcatgcggcggagggcgcaccggaggagaattgctccgccaagcccaccaagcagggcgagggcctccgccactactattctcacaacatccacgagcatcagctccttctccgtcaaaagacgcataacctcaaccgtcttgaggctcagagaaacgagctcaattccagggtgaggatgctgcgcgaagaattacagcttttgcaggaaccaggctcttatgttggtgaagttgtcaaagtcatgggcaagaacaaagtccttgtcaaggtccacccagaaggaaaatatgtcgttgatattgacaaaagtattgacattacaaagattactccatccactagagttgcacttcgcaacgacagttatgttcttcacttagttctgcccagtaaagttgatccattggtcaatctgatgaaagttgagaaagttcccgattctacttacgacatgattggtggtttagaccagc

SEQ ID NO: 16304 - DNA, 366 bp, Zea mays
  Clone ID: MRT4577_11486C.1
acttagctcgagcgctggagggccgggatagagaaataactttttattgacccatgtgatcatgcattgatgaatcacttacattcgccctacttcttgccgccacttgtatctggcgcggcattaggcttagaagggcagctgactgtttatcaccatttttttatccccggggtggtcggtgcctctttccaactccaccacctagaggcaccctgccagagatgctcacacagcggcgtccttggggttgccccgggagcgattgcatgcttacaagctctggacgctataaaggctgcaactggtgttgcccagcccttatgcggaagaacgctactatttgatccactctctgctcgtatt

SEQ ID NO: 16305 - DNA, 330 bp, Zea mays
  Clone ID: MRT4577_114870C.1
tggtaattaggcgtagggcacgccgacgactagttgtgttttttgtgcatgccgcggctggaacgacaaggcctaaaaattagagactgctgccgctgacaacttgcatgcgccacgtaaataagaccgatacaccagaggcaatgcaaagtataatgccacaggtgctggagacgaggaacaacccacactagatataccgcatgactatcgatgaagcaagcaatgatgctagaaccatgcaatcgagaccttaatcaccggcccaaagccatcttacagaagatcatttaaccagagcccaaacctacaccagaaccatagaagcca

SEQ ID NO: 16306 - DNA, 1120 bp, Zea mays
  Clone ID: MRT4577_114871C.1
cattgggtacctcgaagccggccaggaccccgctttccgccttgcgtgtcgaatcctccgctatgacaggacaacgccgtcgtccacgccgccggcggcagccgcaaaccccagccacaactcgaggcggaagcggaagcccaggccgaaaacagcgcccccctctgccctaaatcctaactgggcgctgctccagtccaagctcccccaccgccccgctgcgacccacctcggcaagcgcaagcacgacggtgccactccggcgcccgcggagccgtctccaccacccacagcgcaggacgtcagactcgagccaacctccgacgataccagcttgactaaggtggtggcgattgattgcgagatggtcggggtaggatttgatggcggtaaaagcgccctcggcagggttaccttggttaattcctttggcaatattgtatatgatgaatatgttcgcgccgtggagcgaattgtggactaccggacatggattagtgggattagacctaagcacatgaacaaagccaaagaattctgggctgtgcagaaggaagtagctgagctgattaaaggaagaattcttgttggtcatgcactgcacaatgacctcaaggtgctgctactaagccacccaaagaaggacatcagggatacatcagaatatgaggttttcagaagggagagaaagaggcgatcattgaaggatcttgctgctgaagtccttggtgctaaaatacaacagaatgaacactgccccatcgaggatgcgagagctgcgatgctcatttacaacaagcacaagaaagcatgggagaagaacatgaaggaacagttcagattcaaaaagaagctcaagaagcgaggcaagaagaaaactactgagtccaatgggaatgatcccaatgtccccactgttcttctatgaagataaagaagtaacaaagggagaacttgtcctagttttggaaacaatatctgtaatgaaatttttgtagttcaacattaatgaaaattcaggttctgctgctaaaagaaaacttacccttcatcgtcgccaaacctccgccgtaggaatgacccgcttgccgctctcggatgcggcggccactgtactcct

SEQ ID NO: 16307 - DNA, 386 bp, Zea mays
  Clone ID: MRT4577_114872C.1
atttttcaacgagcgatggatcatggatggccatggcgccatgctctactcctacaggctaagcccaccacgctgataagccaacaaagctagctgctccccattccccaatatggccgccgccgctgccgccaagcacgtggtgctcttcccgttccccggtcagggccacctctccgcgttcatgtctctcgccggcctcctacacagtgctctccccgacgccgctatcaccttcgtctccaccccgcgcaacgttgcttcgctccagacttccgcgtggtccaacgcgccgttcctcggcttccacgcgctgcccttcaccccggcggatcacggcctgcctccggactgcgagtcgtccgacgccgtacagcccggcgcca

SEQ ID NO: 16308 - DNA, 471 bp, Zea mays
  Clone ID: MRT4577_114873C.1
gccatattagaaaaacaaaggacataaaaaccctccctcccaacccccgcgtcagtccttccgcgccgcaatcctccgtccatgccaggtccaacgccgtcttccacgccgccggcggcagccgcaaaccccagccacaactcgaggcggaagcggaagcccaggccgaaaacagcgcccccctctgccctaaatcctaactgggcgctgctccagtccaagctcccccaccgccccgctgcgacccacctcggcaagcgcaagcacgacggtgccactccggcgcccgcggagccgtctccaccacccacagcgcaggaggtcagactcgagccaacctccgacgataccaggttaattcctttggcaatattgtatatgatgaatatgttcgcgccgtggagcgaattgtggactaccggacatggattagtgggattagacctaagcacatgaacaaagccaaagaat

SEQ ID NO: 16309 - DNA, 2222 bp, Zea mays
  Clone ID: MRT4577_114874C.1
attgggtacctcgaggccggccgggaaaaaaaatccccgcgtcagtccttccgcgccgcaatcctccgtccatgccaggtccaacgccgtcttccacgccgccggcggcagccgcaaaccccagccacaactcgaggcggaagcggaagcccaggccgaaaacagcgcccccctctgccctaaatcctaactgggcgctgctccagtccaagctcccccaccgccccgctgcgacccacctcggcaagcgcaagcacgacggtgccactccggcgcccgcggagccgtctccaccacccacagcgcaggaggtcagactcgagccaacctccgacgataccagcttgactaaggtggtggcgattgattgcgagatggtcggggtaggatttgatggcggtaaaagcgccctcggcagggttaccttggttaattcctttggcaatattgtatatgatgaatatgttcgcgccgtggagcgaattgtggactaccggacatggattagtgggattagacctaagcacatgaacaaagccaaagaattctgggctgtgcagaaggaagtagctgagctgattaaaggaagaattcttgttggtcatgcactgcacaatgacctcaaggtgctgctactaagccacccaaagaaggacatcagggatacatcagaatatgaggttttcagaagggagagaaagaggcgatcattgaaggatcttgctgctgaagtccttggtgctaaaatacaacagaatgaacactgccccgtacgctctacattatatgcatgatttgtgttgtgttgttcttaatactttctgtactcttacagatcgaggatgcgagagctgcgatgctcatttacaacaagcacaagaaagcatgggagaagaacatgaaggaacagttcagattcaaaaagaagctcaagaagcgaggcaagaagaaaactactgagtccaatgggaatgatcccaatgtccccactgttcttctatgaagataaagaagtaacaaagggagaacttgtcctagttttggaaacaatatctgtaatgaaatttttgtagttcaacattaatgaaaattcaggttctgcaatgattgtctcaagtgaaaaaggtaacaggtgacaagaccgggttgctgagcattgggttctgcggactggtctgctgtctcgtagtcgtggcgatggttggcgtgagagcttgccgtttcctaactgtgaattggtgttggtgcaggggcagggagttggtgtccagcatgtgcaggatgagcaccatgagcacggagcaggcgaacatgggtatgggcccgaagacccacatgagcagcgtggtggccaggtagagcgcccggaggcccatggaccagaagttgccgccccggatgacggcgtgctgcacgtaggtcgccggcacgtcggagtcgagggtggtgacgaggaagctggcctgcacgtagtacctggcggagtggatgaagcaggtgaaggaggcgaggaagcagacgaggagggagatgtacttgacggtggccgtggactggctgcggtcgccgtagacgagctccgtcatgaacatcttggtggtgctgctgacccaggcgccgatgagggagcccagcgcgatggacagcgacgccaggttggtggacgccgagatgttgctggagatgacgctcagcgctagccccgtctcgtcgggggtcgcctgcaccatgcgccgcacccaggcgagcttgttgtggttctcgtagccgatcacggtcgtggcgggatgccggagaatgcggtagaggagtaggaggtggtagctcagcatcaccaccagcccgcatggcaccagcaccaggtccagggaccccttctccagctgcatcgtctcgtctcgtctctcttcaggctttctgctccctagctactaggcttcatttgctattgctttagcatttcgatgctatttcttggttggagttggagttgatctgtgcagactgaactgccctcatggcttgtggcttgcgctttcatttggattgctagttacagtggggccagctagcaatgatcatgatcttgcttatgagtcttgctcaggagttgtacgcgtagccgtgcggtaccgatcgatggtgtggctagcttgtgtcttgggggcaaagactgcgagcacgcacggcaagcaaaacttgtgacccggccggcctcgagg

SEQ ID NO: 16310 - DNA, 171 bp, Zea mays
  unsure (1)..(171): unsure at all n locations
  Clone ID: MRT4577_114875C.1
atanttttttgctaaatatgacttatatacatgagttttggttagtatttgctcgagcttaaaataggtccaagggaaacgtgcgcgggtaaaggttgcggggacattaaaattacatggtgaactattgagaaagaaataagcgagcttcaaacggtggggaattgccca

SEQ ID NO: 16311 - DNA, 452 bp, Zea mays
  unsure (1)..(452): unsure at all n locations
  Clone ID: MRT4577_114876C.1
tggctctggacctttgggctgatttatgtgcttgtggatgtgcgggtggatgtgcgggggagtatagagtcagtcagttagttagttagtagtgagtccgtctgttgtgtttgcgtcctccttctgttcttgccttgccttgccttgctttgtttgttgttgttgttgtacctagggacggagacgaagaagactgttcgtgttgcttctgctgttgttctggtggttattgcggtgtctgttgtggaggtcttggtcttgggttttattagtggtcttcttgttgctgtgtttgttgctggtgttgnttctggngttgatgctgttcttcctcctgttcatcatacctagcgagttggttgtggttggctgtttggaggttgaagaagagatgaagtgggagagagagcgatacggtcgtgtgtaccttgacgtgcgggtacgcccccccc

SEQ ID NO: 16312 - DNA, 638 bp, Zea mays
  Clone ID: MRT4577_114877C.1
caacaagctaatgctttactcattcatctttaattacaggccaggaggagtcggccaggaccagcatacatgcatgcatgtgctgcacgcatactggagtactactactctgtgtatatgtttgtgtacatatatagtataataacttactaataatcatctagctgaaatgatttcacaaaatgaatcaatcgatcgatgctgcccctctcaatcccctccctctctttccacgagaagaaggcaaagcaagaagaacagaaagaatgggcaaccaaatgcatgaactcatccatgagttggatcagtggatgcatatcccggggaccttccactggaacttgccggccctcttgtccggcacgggcgccgccgtgtagttcctccacacgtcgagcacattcctcaaatcatggagcttggccccgagcccgacgcagcagttggcgtgcaaagtgcagatcttgttgaggtccctgctgagctgacagaagccgctgatgtaggtggtgtcgaggaactggatggcgacgccgaggcggtccgtcatctcgtgcttgatgaggttgaacacgtcctgctcgtgcttgccgaagaagcggtaccgcccggcctgccagtggcggtagaactggatg

SEQ ID NO: 16313 - DNA, 281 bp, Zea mays
  Clone ID: MRT4577_114878C.1
cggacgcgtgggggcgcgccgccccttcactgtcgacgaggacgcggccatcgcccgggcggacgcccgcctcggcaaccgctgggccgtcatcgcgcgcctgctccccggccgcaccgacaacgccgtcaagaaccactggaactgctccctcaagcgcaagctcggcgccgccgacgccgcgtccggttcggcggttgccgctgacgactgcgtcgccgacggcgagaccgaggcgcgccggggcaagatgatgatgatgagcatctcgcccgccgaca

SEQ ID NO: 16314 - DNA, 427 bp, Zea mays
  unsure (1)..(427): unsure at all n locations
  Clone ID: MRT4577_114879C.1
ctccttgcaggatatggcgcaacngttttcgcctccatccgccagaaggacaagccggggatggggcaacaataacaaacggggccagacctggcccgagaacggacacaacaagaaaagcaggggaaccaacgaccgcaacaagagcggcgacgacgccagggacacgaccgcgcacgcacaccacgccacgaaggcaaagacccgggacagaggcgagaaccgagagcccacaaacagcaaaacgataaaccctgctagtaatccatttgtgctgattatgcatgcacggcaccaaacacgtgcgaaaccccaatatcatgctggcggggggggaatatgtccaacttgctaggcatgcgacacgctaatttggatgtagcaacgttatcaccagctgtatacgctccttaatcgacaacatttg

SEQ ID NO: 16315 - DNA, 255 bp, Zea mays
  unsure (1)..(255): unsure at all n locations
  Clone ID: MRT4577_11487C.1
ccctntcgtggcctagggacccgttgcaatacttcttcctccccctgcaccggatcaagcatggccttatctttccttttcaactactgcgacggacacataaacaattataaactattttaaaatccctgatgccattgacagttgntgtgntcnccccatgtngcccgcgcggcacgcncgatcccttgactgggccccttcttaatgtggaggccctgtncgcccttcagcatcatgttcgtaggttttttt

SEQ ID NO: 16316 - DNA, 333 bp, Zea mays
  Clone ID: MRT4577_114880C.1
ggaccggtctaaccttcgacaaactgtattttgctaaaaataacacaatgctgggaaggcccaatgcatagtggaaccgggccgggtgcatgttttggccaatgtcgggttttccaagcacgaacctaaaaattaacacaatcttcaaagcaacccattcaaaaaaaaacccactaggggggaaactttatgcaaacactacaaacgggcgatttttggggcgaaattaccacaagaggttagatttctgaaaccaaaaaacaaagtctgtttgttgctaccaaaaaagggtggtaaaaaccacaacctgggggcacaaccgggcttgcaata

SEQ ID NO: 16317 - DNA, 365 bp, Zea mays
  Clone ID: MRT4577_114881C.1
ccttgcattgtttccacattaattaaggttatacacccaaaatacatgcattaccaaatcatacccccacattacacctgctgcttgttgttaaacacatgggacgaacacacagtacaaattataaattaaactgtcgggacttgaaaagacaaaggccgggagcacaaaacttttcgtaattctctccctgatcttctagcggggacggttggatggcatcacacaaagagggtagttgtaggactaaggcgtataacttgccttttaataaaaatattaacaggtcaccttttccgccttggtaagacacaaatacttcatagtttaaaaccacctaaaatcttctaaaatcataacttttt

SEQ ID NO: 16318 - DNA, 545 bp, Zea mays
  Clone ID: MRT4577_114882C.1
gcaactccagtgcttctcactgccactgccagcaggtcgagctgctccgcaagtctgctttgctgctgcacctgcaagtctgcaaccgcgcacagagatgtcgacgactgtgagccgtgcgtccctcgaccagaaactcgccctcgccaagcgctgctcccgaggtacgtgcaaagcacactagctagctctgccctcaaactaaacaaacaagcctaattaaccacgcagcacactaaactaactgatcgatacttgtctgtatgtcgcatgcatggtctgcagaggcgaccctcgccggagccaaggcggcagccgtggcgactatcgcctccgcgatccccaccgtgagtttcctttcaccgtctctagctttctcccgtagatttaatcaggcgctggcgtacgtacgtacgcgtcgatcgtcgtcgcgaaacggcccgtcgtcggccagtctctaataactggtcgtcgcttcttcagctggccagcgtgcggatgctgccatgggccaaggccaacatcaaacccaccggccaggcgct

SEQ ID NO: 16319 - DNA, 342 bp, Zea mays
  Clone ID: MRT4577_114883C.1
cggacttgctccacggtcggttcctgacagctgtggtggtgttgtggactatgacgaggatgacggaggtggactagctgatgctgaacgtgcagaacatgaacttgttctagttggtggggtgtatcccatatacccggtgatgcacaagccagtggatgtgatacatgcagatggggagggtcgcaagaggcatagtatactccacctacatccaggagatgttacggcgggtgtgcctagatactaacattcatgtcacagatgtaggaaatatggatgcgtgtcacttggctacatcagccgtgccatgtactgaacccaatggtgattttagggagc

SEQ ID NO: 16320 - DNA, 809 bp, Zea mays
  Clone ID: MRT4577_114884C.1
ccccgcgtccgccccgcgtccgccccgcgtccgcccacgcgtccgttttcctgtcgaactcacttgtggatctctacgcagcaaccggagacttggtggacgctaagagttcgctcgatgacatcccttccgaggacgtcatctcgtggaactccatcgtctctgtctgcgcaagcaaaggacatacgaaggaagcaactggttacttgaggcagatgctttggcacggcaagatgccctcagtccgctcctttgttgggctcttcgccttgtctggtcagaccggagacctccaagtcggggttcagatgcacggtatcgctcttaagcttggattcagttggagcagtgcgcatgtccagactgcactcattagcatgtatgggaactgctgccattttgattgttgcttggcaatcttcaacgaaactccaagccttgcactggagtgctataatgcaacgattacgtcatcaattggctgcaaggttttccattccgcgctggaggtcttgtactgtatggttgtcgagggagttatgcctgacaacgtgacgctatctgcgaccatgaaggccatatctttgtcagcttcgccgagtctaatcagctgccagatgctgcattcctgggtcttcaagctgggcttcgaagcggacatggttgtgtgctcctccttgatcagcgcatacgctcgagccggtcaggtgcacagctcccgctcggtgttcgaaagcctgcggagcccaaacgtcgtctgcttcacttcgatgatatctgcgtgcgcgccaacacggagatggcgcaaa

SEQ ID NO: 16321 - DNA, 529 bp, Zea mays
  unsure (1)..(529): unsure at all n locations
  Clone ID: MRT4577_114885C.1
gactgggctgtcttgtttatttaaagggaaaacaactgaaggtctgaatcatgtgatatttaactttcaaaaaaacaaaatccttttaacatgctactgtatattccataaacaaagcaaaatgaccaagtagaggtggatatgacaagatagtacctcagcccgggccaagtagggattcaagtaatttattttttttgcagcccagtggcagagagtctcttactcaggttgctaaagggaaaatgccacaatagaattgacatcactcccttctccaaagcaacaaggcatcttgaaagctcaacttcttggtgaagttttatggttggtggcaggatttagttcatcctggtgaaaagccagctgagtctgggatgcaaattcttcaaatgaaaatcccttctcaacagtcacactgaagaaatttcagccaacacgtaatcaaattcccttttgggnagaagtccatcccaanaattttgtagtgggaagagagggtagngtaccagttacccagcccacattc

SEQ ID NO: 16322 - DNA, 188 bp, Zea mays
  Clone ID: MRT4577_114886C.1
aaaacaacttgatccattgattcttcaaaatatctttcttcttttccaccacaagcacaaggatgtcttccaactgcggagggagctccaacttcaactcaatctgcaaatgcgtacaaaagtaccattacctagaccatactagcacctacatgcattccaccgacgaacttaccttttaccccaat

SEQ ID NO: 16323 - DNA, 673 bp, Zea mays
  Clone ID: MRT4577_114887C.1
ttttttttttttttttatcgaatcatctctattaatattacatagagacttccgaggcctacaggcatccctgaagctgttgccacggccctctttccaagacgccatagctgttaccaagtccctctccgctatcctgaatataacataaaaaagggtgccatatcccgtgacaattctgtgtttgtctgaccaatagaagttgacatgaagtgaatataacataaagaaaataaataaaagacaaattctagtccatgtcccttgaccaacattcggctagattcgtgacatattcgtgaggaagttgtgctgtatcagagtagagtgacgcagctgctactcttttgtcgcgtgcttgtccccgaaaggactgctatctcgccgcgtaagagtcagaggcttgtcatcctcgcctactgaatcttccatgacggcaccaaggctaggggccttgtttgctttttgtgggctagatcgctctgggggatccgagaaaggaccttggtccacagagggcgactcgtcaataacggtaatgctcgaatctcgagtaacgcggccacttggtgttgttggcggtgatggtgccatggttgatgacgatgtgtctgattctgtcttgcttcccacgtcgaccttcttcaatgttccaaccttcaccacctgtgca

SEQ ID NO: 16324 - DNA, 391 bp, Zea mays
  Clone ID: MRT4577_114888C.1
gcttcgccacgcacttgtttccccccgccctgccctccccggacggccggacctctcctccgatctccctccgtgcgctcgccgtcgctgtcacggtatcatggactcctcctacctgggaaagcgcaagctggacggcggctagagggagccgcccgcggctgcgttcctcccggccgttgtgctcgggtacgagtacgagtacggtgactcggaggcggtggaccaccggccctgtcatgcggcggcgggcgagatggactttctttaagaaggaggagaagagggagaggaaggctgtctccgccctggagccgtcggacgaccttggcattaaggaagatgaaagtacaattaacatgggtttgcaccacgtcgacaggaggaagag

SEQ ID NO: 16325 - DNA, 466 bp, Zea mays
  Clone ID: MRT4577_114889C.1
gtttcagcttgggatatcgcgtgctaatctacaacgaagaccatgacctgtgtattccttaccctggtaccgaagcgtgggtgaaatcaataggctaccaagttattgatagatggcggccatggtacttcggagaccaagttgccggatatacagaaggatacggtcacaatcttaccttcctcactataaagggagccggacatgctgtgcccgagtacaagcccaaggaggctctcgcgttctacagtcgctggctggcaggagagaagttctaagaagaccaggaccattgcagatttcacaggcgttttttggaatatgggtgtcccacgcatatcttgttcgtcgctcatcggacaattactgtgtgtatgcagatcagatccattcactcggctgtgtaagcctctgtatacagctgaagagacttttaacgtgggatcttcaccatgggtcagatcta

SEQ ID NO: 16326 - DNA, 338 bp, Zea mays
  Clone ID: MRT4577_11488C.1
cccactcgtccgaggcatggtacgtaagaagttctctccacacttgcactctcgctttaggggacattgagactgacaccaccgacattcctcagcgtcctgggattgccatcacttatcattttgtccacttaaatactcggatctcatgtagctcatgccgcattaaccgcattcttatactgagaaatctacctatccgaagtcgccactttcgtaccacaaaagctcatttatgcacaaggtgtgattgcactccctcacttagatactctagtgtgcacagtaacgccgatgagacaactcctacatactgatccttacttagtattatcagt

SEQ ID NO: 16327 - DNA, 872 bp, Zea mays
  Clone ID: MRT4577_114890C.1
gcacgaggcgttgtgcgtcttttcctcagcagcaaccggagagcggctgctcgcctgctcctcctcctagggaaaggacagcggcggcggcggcggcggcgagaagttgggcctgaagcccggacgctttctcccgagataccgcaatactgctagagcactgtcactaatgtttgcttatgacaatggagtcacctacaactgccgctggtggtgaactggagagctacttctccttgggtttgacagtatcccactcacagaaagataatgctgaatttccaaaggttctgttgcttctctcagcgtatcttgacaagacagttcagcagacggaagagttactagactccagtaaaataaaggagtcgaccactatctttcatggtcagagggtgcctgaacttagtataaagctgtatgcagagcgtattttcaagtatgcaaagtgcagcccatcttgctttgtgctagcacttatctacatggagagatatctacaacaaccaaacatttacatgacgtcatttagggttcatcgcctgcttattacaagtggtgttgttgctgccaaattcatagatgatgcgtaaggacccaccataacagctttaagttacatttgcgcatatgtacttggtatggaagtatgatcttacatactgttggccatagactgatatcaggtcttctgtgtgatactgatcatagatgcaaactcaaacttagctgagtcaataaactaatgtcactaggaaatgtctaaatatgatctttaactatctggaacacctgcatggtttatggtcagctatcttctttggatgtagcaatttacctttttatattatataagaattaatagcataacc

SEQ ID NO: 16328 - DNA, 1902 bp, Zea mays
  Clone ID: MRT4577_114891C.1
gattcttgatggttggtggcttggtgccctgccagctagtgcttcttcatcctttctctaacgagtgagggacgatgatgcactcccagtcgcaggctcccactcccaccttgcggtgctgccgcactctagctgagctgccagctcggatctccatggcctctcttttcctcctcctcctcgtcgtcgtggcggcgctcctctggccgcctgccgtcgcggcgcccgaggagcacctcgtcaccggtctcccgggcttccatggcgccttcccctccaagcactactccgggtacgtgaccgtggacgagcgcagcgagcggagcctcttctactacctggtgctgtcggagcgcgacccggccggcgaccccgtcgtggtctggctcaacggaggtccgggatgctccagtttcgacggcttcgtctacgggaacggacccttcaatttcgagcctgggagctcgcctggaagcctgcccaagctgcagctcaacccctacagctggtcaaaggtctcgaacatcatgtacctagactctcctgccggtgtggggatgtcgtactcgctgaacagatcggattatgtaacaggtgacctgaaaaccgcagctgacgcccacaaattcctgtcgaagtggttcgagttgtaccccgagtttcagttgaacccgttctacatctcgggggagtcgtacgcaggggtctacatccccacgatcactgacgaagttgttaaaggcattgagagaggtgtgaagccaagaatcaatttcaagggctatctgattggcaatccgttaactgacgtggactacgatttcaattccttcgtgccatttgcgcatgggatgggcctcatctcaaccgacatgtatgaggatgtcaaagcgtcctgccgcggcacattcttcggcgccgtggatgatctgtgccaggagaagatcgacagagtgcgctgggaactgaaggacctgaacaagtacaacatccttgcgccttgctaccatcatcccgaaatccaagaggtagagttcagcaacagcagcttgccgcggagtttcagaaggctaggagagacggacaggccgtttccagtgaggaagcggatgtcggggcgttcttggccgctccgtcttgctctcaaggacggccacgtccccatgtggccaggccttagtggcagatcacttccctgcacgagtgatgaagtcgctacggcgtggctggacgacgaagatgttagagctgcgattcatgccaaaccaaaaagctcaattggatcatgggaactgtacactgcaagaatagacttcacccatgatacagggacgatggtgagctatcacaagaagtttacagctttgggatatcgcgtgctaatctacagcggagaccatgacctgtgtattccttaccctggtaccgaagcgtgggtgaaatcaataggctaccaagttactgatagatggcggccatggtacttcggagaccaagttgccggatatacagaaggatacggtcacaatcttaccttcctcactataaagggagccggacatgctgtgcccgagtacaagcccaaggaggctctcgcgttctacagtcgctggctggcaggagagaagttctaagaagaccaggaccattacagatttcacaagccttcagttattcgtcgctcatcggacaattactgtgtgcatggactcagagtagatgtatgcagatcagatccgttcactcggctgtgtaagcctctgtatacagctgaagagatttttaacgtgggatcttcacctctactcaattaaccatgggtcagatccattggcaatattattctactattatataaagaataatttaaatatacagaaaaaaaaaaaaaaaaaagcggcc

SEQ ID NO: 16329 - DNA, 767 bp, Zea mays
  unsure (1)..(767): unsure at all n locations
  Clone ID: MRT4577_114892C.1
ggtaccctcgggtttggccgggaggctatctccgtatgccgcatgttctattttgaactgactctttaaattgtgcaaaacagtgttttgcacggtcaatacacgaattgttacaaacagccttaaagctaaacatactacttacattgcatatccgatagtattagactctcaaaagtgtcacacaatctagtagtctgaattgagaaagcaatagagaagaagaatcctctcgaccgtcacatgaaacctacagtcgtcgggacaaggtaattgatagcgctaatggccctatgagtgcgctaccatcaaagtggaaagaagaaacctcaatccctaaaacgatgctctaggagaaaatgtgacgccaaaggcaccattgacatgcacacaatgaactctattgtagacatggattttactagacaaactctatacctaggaaagaatggtgcctcaacaatgatatcgaacatgatgattgtcagtttagcccaaaacatcggtccagctctcagttagaaaccactaccactaccacccaccatagctccattgcccactaagaacgtcgccatctagccaacataacacacaaccgccatagcaccaccattatcgaagcaaaagacaagtagacaactactacaccaccaaacacgccttatagccctggtaccattgcaactncgcaagcagccacctncaccttggacgtcgagccacaacacgtgtctagctcgggtgcagacacactatggcatctg

SEQ ID NO: 16330 - DNA, 577 bp, Zea mays
  unsure (1)..(577): unsure at all n locations
  Clone ID: MRT4577_114893C.1
gtgcgtcttttcctcagcagcaaccggagagcggctgctcgcctgctcctcctcctagggaaaggacagcggcggcggcggcgagaagttgggcctgaagcccggacgctttctcccgagataccgcaatactgctagagcactgtgtttttcaataatgcatactacgggagagttggaggaattagcacaagagagatgaatatgcttgaactggatttattgttcggtctggacttcaggctcaaagtggatatagagactttcgaaagctactgcttacagttggaggaagtactggttcttgttttggagagaccaattcaggtccaagaagccaacgtaactaaacacttgatttgtaacagcagcgccgatgagacttgcaaacacgagctcgggcttgaaaggtacagcagtcaggctgtccaagggtgtagctggtaaatgtgattgggcagatagttttgaaaaaagtgtatgggtccgagtattggtaattcttttatttgacatttaagttgttcagttggccttgcttagtagggcctattctacttcgaaaaagaataaaana

SEQ ID NO: 16331 - DNA, 570 bp, Zea mays
  Clone ID: MRT4577_114894C.1
tgtcgctttttttttttttttttttacacacacatatttaatagcattataattaatataatataagtaagtaccattcaatatctcataaataagcattgtcaaataactcatacataagtgtactctaaatccaaactaaaatactaatttaatatttgtccatcaactgtttatgctaatattaagcctaactaagtatatgtgaatttaagtctccacacttgtgcggccaccaaaatttaagtttcattccattttttccttggggtcatattctgcattacatgcttgaagggcaattgcttttagatctaatttaccatccaaattgatcgtcgacataatatctgttaccacaccaaacatctttgaagcggaacatacaaatgacctcaacatctctgtggcaaatatacaaagaaacaacactgaacaatattaggctaatttaaatttcttcattttccattatcggtctaccagaggcctagcaagcatagggcacttgacaagcttttgatggcacaaatttaaacaaggtttaacatttagacatacacatcaaac

SEQ ID NO: 16332 - DNA, 2105 bp, Zea mays
  unsure (1)..(2105): unsure at all n locations
  Clone ID: MRT4577_114895C.1
tcccacgcgtccgagaaagtttcctttcttggatgaaccccgttcgtgatacgataccctgcctgggcctcacacttcctcgaaaccaacccacagaaaaccactggcccttcactccctactgttcttcctttaacccgcagttccttcaacaatgaaggttggacttactgacttgcctctctgctcaaccaactcacctgttcgagcctgctttcgaaagtgcatccttttccttgggcgagggtgcttcccttcatcgatagactttcctacgagacacgagcgaatatacgtacgccttaaccgtttttttctagccgccggaatgaaatagcagttgccaacttggcagtgctgattttatttggaccaacctcctcatgatattcatagagaacagctagacttcacaatggcgctacaagcagatagttcataaagagaataaaatcgcagcaaaccatgttcctgctcgcagcaacatatttggaagcatgttgtcacaaagcacatgaattcgacttttgaccctgcatcttatgggaagtgatgaacctctggagctcttgtgtgtgctccctggatattgaattctcttatccaaattttgttgttgtaataatgtatgcatcagtacttttgctgaatatgaattgctttgtctttacagcactaatgtttgcttatgacaatggagtcacctacaactgccgctggtggtgaactggagagctacttctccttgggtttgacagtatcccactcacagaaagataatgctgaatttccaaaggttctgttgcttctctcagcgtatcttgacaagacagttcagcagaatgaagagttactagactccagtaaaataaaggagtcgaccactatctttcatggtcagagggtgcctgaacttagtataaagctgtatgcagagcgtattttcaagtatgcaaagtgcagcccatcttgctttgtgctagcacttatctacatggagagatatctacaacaaccaaacatttacatgacgtcatttagtgttcatcgcctgcttattacaagtgttgttgttgctgccaaattcatagatgatgcgtttttcaataatgcatactacgggagagttggaggaattagcacaagagagatgaatatgcttgaactggatttattgttcggtctggacttcaggctcaaagtggatatagagactttcgaaagctactgcttacagttggaggaagcactggttcttgttttggagagaccaattcaggtccaagaggccaacgtaactaaacacttgatttgtaacagcagcgccgatgagacttgcaaacacgagctcgggcttgaaaggtacagcagtcaggctgtccaagggtgtagttggtaaatgtgattgggcagatagttttgaaaaaagtgtatgggtccgagtattggtaattcttttatttgacatttaagttgttcagttggccttgtttagtagggccgttattctacttctctacaacactagtgcttgtgagccacgccgttcagtttttttgcggagtgagtttgaaaacattactggagtccggccacgttcaagtatcatttcattaattatatttttactcaaaggggacccaccatagcagctttaagttacatttgcgcatatgtactttgtatggaagtatgatcttacatactgttggccatagactgatatcaggtcttctgtgtgatactgatcatagatgcaaactcaaacttagctgagtcaataaactaatgtcactaggaaatgtctaaatatgatctttaactatctggaacaacctgacatggtttatggtcagctatcttctttggtatgtaagcaatttaccttttttatattatataagaattaataagcataaacctgtttatctctaaatgctagacttatgttttctcagntgtcatttttgtatttcggatggatttcatgtttcccgtagtacttttttttttgttaaaccaccagttaatagggatgcatcaatcaattagttgcaacagtcggtagcctatggtgggatttatangatagtaatgaggtgagg

SEQ ID NO: 16333 - DNA, 420 bp, Zea mays
  Clone ID: MRT4577_114896C.1
gccggccgggtctcgccctcgtctccctccccatatccaaatcgcgcaggagcaggtatcccaactaggcggttatcggtcttctcgtgtgcgcagtttgtcttcgctcgcgttgcgaatagaacgcgatccgtttccgagcttcggtgaattgacagtcaagcttcgacgaccaagtgatcattctcttcgagttccacaaggttgaagaccctgagcatctgtttggtgaaggcagtcctctgacctattatgttctacttacttataattcactgtcccgcattacattattgaaaacctaagggttgactagctttctatttaccttatccttgtttaccttttgggtaactatggttagctttatgctattgcttcaacttaatcaatgaaaaaaaaaaaaaaaaaaggccccta

SEQ ID NO: 16334 - DNA, 342 bp, Zea mays
  Clone ID: MRT4577_114897C.1
ctggattcttttaaaccggccgcctttttttttttttttttttttttttttttttttaaccgtgcaaacttttttatggggcctttcaggggaaaaaaccaaccttccttttccccggggttgggattttttttaacccccaaaagttccctttccggggtttaaatggcgggaaattacttggtggcgggttattcccaaaggaccccttctggttggtaatggttaattaaaacctgggcttgggcttggggttgggcttggttccccaaatttttacttcgaaaaggcgggggggggcaattcccaccccttccggggccccttgggtgaacccggaat

SEQ ID NO: 16335 - DNA, 1440 bp, Zea mays
  unsure (1)..(1440): unsure at all n locations
  Clone ID: MRT4577_114898C.1
atttgaaacattcagnacagtaaggcctttaggatctggtgatactggcaggtaagtacttctatattatagtttcaactatggcaatgactcagtttgcatgaatccattagacacactcctttctaattttcactccctatttacttttaaacagtaaacatgtgaattgttgttgaattgtagtgtccacctggtggagttgcttggcacaggtgaatactttgccatgaaagctatggataaaagtgtcatgcttaaccgaaacaaggtccatagagctaccgctgaacgacaaatccttgatatgttggaccacccattccttccgacattgtatgcatcatttcagacaaagacacatatatgtcttattgttgactattgtgctggtggggaactctttatgctccttgataggcaacctatgaaggttctgaaggaggatgcggtcaggttctatgctgcagaagtggtcacagcacttgaatacctacattgccaaggtataatctacagagacttaaagccagagaacattttacttcatagagatgggcacatttcattgacagactttgatttgtcttgcttgacatcctgccgaccacaagtgtttcttccacacgatattgataagaagaaaaagaggaggaagagcaggagtaatcccatattttttgctgaaccaatgcgagcatcaaattcttttgttggagattattaccggagctggccatacgagtgctgtagattggtgggcgctaggaattcttctatatgagatgttatatggttatacacccttcagagggaaaacaagacaaaggacatttgctaatattctgcacaaggatatcagatttcctgcgagcatacaggtgagcctggcggcaaggcagctgatataccggttgctacaccgagaccctgcaaataggctaggttcctatgagggcgctatggagatcaaacaacaccccttctttcgtggcataaactgggctctagttcgtgccgccacgcccccagagctggaggctcccctccaggatacattggaggccacactgcctcctcctgcagctgatgcggctcacaccgatatgttctgatcatacattgatccatgatgctacatgttaatttgcttaaaggaagaaaaaatattagatgatgaagatgcatgactttggcatagatgagaacaataatgtatgttaaggactaattatcttgatccatctatgcatgctcacaattagaataagattggatgtgtatattgtttctgtggttgcaatatacgcacgagtctatgaaaggatctatggatagcttgaggggatgacagacactaggcatgttgattagtactcctccgtttcgttttacaagtcgtttccaacagcttcgtgctgattaaggaatctatgaatc

SEQ ID NO: 16336 - DNA, 582 bp, Zea mays
  Clone ID: MRT4577_114899C.1
ttttacttcataggaatgggcacatttcattgacagactttgatttgtcttgcttgacatcctgccgaccacaagtaatgtcacttcattaatataccttaatggacaattcatggctattagtttaactccttggtctatttttcttagttgcacttaagtcactattattgttgtttgataggtgtttcttccacacgatattgataagaagaaaaagaggaggaagagcaggagtaatcccatattttttgctgaaccaatgcgagcatcaaattcttttgttggtacagaggagtacattgcaccggtatttatatatatatgtaatatgttgttgctccactttatctatgtgattttccctaacattttcatttcttgtctctatttgacatgtgtgatagtcatcatctgttttatcaatccttgtattgtatgcttgctgtaggagattattaccggagctggccatacgagtgctgtagattggtgggcgctaggaattcttctatatgagatgttatatggttatacaccgttcagagggaaaacaagacaaaggacatttgctaatattct

SEQ ID NO: 16337 - DNA, 281 bp, Zea mays
  unsure (1)..(281): unsure at all n locations
  Clone ID: MRT4577_11489C.1
attgcattcgctgattgatgcaatcaaatttatgattgatcctaaggtaaaggaacgagctgttgagctagcgaagtcaatcgaatcagaagacggtgtggatggggctgtaaaatcctttttaaaacatcttccacagaaaagggattccgagacgacaccaactgcgccagagccaacgttcgtgcaccggctgcttcaccctgtaaacagatgctttggcatggcatcctaccccgntttnagacccccgtttattttgggnncnccgganaattnnc

SEQ ID NO: 16338 - DNA, 167 bp, Zea mays
  Clone ID: MRT4577_1148C.1
ctgttcctcgagcaactcaactatcgtctgctgcaactaccatgacgtcactcgacacttatatgacgaatgattcagtagcggttggaacggttgtatgctcctgaaggactggctcgctgtcgtcgaccaagaaacagaatcatcagccagacgattcaggctgc

SEQ ID NO: 16339 - DNA, 429 bp, Zea mays
  Clone ID: MRT4577_114900C.1
gtcgaaatcgccaagtgggctcatcgtcggggtgacggggcgggatccgcgccgccggcgtgggacttcacgtgcggggacgctcgggacgaaaaggattggcgagggaccttcacggatggaccagggtggtggtcgtcgtcacgacgaggaagatcttcggccgatgagcccgttatttttcaccggagttcctcgtggccgcggagtcgcccctcgtcgtgagtagtgctctctacgcctccaaccgccggtaacttcgtcttgaggatggaagtcttttcctcatgatgaacacatacgagatgaagatacgatctaagcatgataagaataaacgccgaaggtatcaccagattgatagcttcggcttgtaatgatgatgaagtatgatgatgatgctgaccgaaggggaaaaagactacttgg

SEQ ID NO: 16340 - DNA, 251 bp, Zea mays
  Clone ID: MRT4577_114901C.1
acgcagcgctacataacacaggctcatacacactcttgctttaaattaactggagcactgctcagctgaaggcgtcggtcacagatctgggactgcaagaggacgcacacagcttcaaccaccaagctcaaagctgaccttacacctatcgaccgcgccgaatacaaagaacatgagcaagtcctagttctgagacgccttcaatctattgtaaatatacacaacgcatccccttgtctatgtccctactg

SEQ ID NO: 16341 - DNA, 2310 bp, Zea mays
  Clone ID: MRT4577_114902C.1
ggatctttcgctttccttaccccgtgcacgtgcctgcttgatacactacgaccacagattctttggcagaccgctaccaagtgcaagtgtgcaacccacacacatcactcacagtctcacggtgtctctgtgcgcgcgcgtgggacacaggagggagagagacacagagaagggggcgggacgatcaactctagctcagctgggatagctgaaattgctgataggtggaccggatacagggtgcaatgatgcgtgccggcgcatagatagggagagggacgggagagagagccccgactcgggggcgcggaccgccgggtgttgtgtttgtgtgcatgtagcgccgtacacgctcgcgcgtgtgcagcataaaggtagcccgccaacgactcggcacgctcatgcttctacctctgcgtcgtctagttcattcttcgtgacagtccggggcagcaggtggcgaggtcggcaccgccccaggttgcgagtgcggatcgatgcgccggtagcatttgcgtgggcttcgccgtgccgcggcccacgatgccggaccgccggccggccgccgtcacccagcagttctttccgcccactactacggccgcgcagcaggcgacgatggaggagcaatgccacgtgcccgccggtagcgcggcggagcagtgggtccggtcgtcggcgtccaggaagagccggcgcggcccgcggtcacggagctcgcagtaccgcggcgtcaccttctaccgccgcaccggccgctgggagtcccacatctgggactgtgggaaacaggtgtacttgggtggattcgacacggcgcgggccgctgcgagggcctacggccgatccgcgctctagtcccgcggcctgaccgcgtacgctaacttctctcttgactacgactacgacggcatggagaaggtgaaggacttgaccatggtggagttcgtcatgccggcagatgagtgcagcagcggctctccccagggcagctccaggtgccgtggcgtcaccggcaacgcaggcggcagcagcagggcctcctcctgccggcccgccggcgaccgctgcgtcatcatcgggattttccacaccggccacgacgctgcccacgcctaccacatcgccgccatcccgtccgtcgggcccgccgccgccaccgacgtcgtcgacccatcccacgaccagcatgtgaggatcaagaagcgcgcactgtagcaggagctgggactcggcctgggcagtttcccccccggtccgctccccctctccggccgttgctactttttcggttttgccccccggggcgggatgctggttacttgtagccgatcgattggattcctggaggaggagctgacgagagtcgcctaccatcaacctgctgccggcatgttcggccgaccggctgataaaaacgtccacgtagcaccgccgccacaccggcaatggcagcagcagcagcaggggaaccgctcctgtctggatacgctgccgcagcaactggcggcgacgctgagctgcacttgagagtcgggcagccgcgctcgccggcccatccccaacgacagcggcattaactgggcctgcgcgccgccgtacgccaccgccggcgctggcacggatgacgaggacgccagcagcgccgccgctgcggcatcactaggatttccactgtgggccctgcgtgcggcgccttcctcgcccagctggcccagccgctgcgcctttcctgtcgtcccgcgccaccaacagtgacgctgctgggccacgtactgacggcgactggtgacctgctggaaccgccgccggcctgtttcccttttctaggtaaaagcagtggcagaggggcgagctagcgacagcgtgcctcgtcatccatcgtccctgcgccgtggctggcggggtgggaaaaaggtctgagcagttttgagcgtccggaggagctcgacgatttcctgccctcgaatagtcacttggggtggccactagttattatttctttccttccccctcgttgattctgctacccattatcgcctccgtctcccgctgcatgcataatacggctctcgcgcagttggacgttaatggcccggtgtccggcggccggctcctccccccgggaccccctgcccactgcgaggcctttttccacatcgagtatttctgctagtcgatcgcttggattattcacgactgtattagcctatagcttacacgacacaagtcaaatcgcaaatggcgccttcctcccgcatgatgaacaccacgttatatatttttctttgcgccgcctgggacgggttg

SEQ ID NO: 16342 - DNA, 219 bp, Zea mays
  Clone ID: MRT4577_114903C.1
agcagtaaatttgcattatattagttaacactgatgatggccaggccacacacatcaatattcagaggagttgattagtgcaagactggagctgcgagaggagctggagctgtttgaggatggggctgagcgcctccatgagcttctcgcacgggtggttgtgcacgccctcgtacgtggtcaccactatgctcgtgtccttggccagccgctgcacct

SEQ ID NO: 16343 - DNA, 308 bp, Zea mays
  unsure (1)..(308): unsure at all n locations
  Clone ID: MRT4577_114904C.1
gggacccgcggccagacgcgccaggggagggccacaacgcccccaccgaccggggagccgcgtccgccaggcccgccgaggtccagcccgcccgagccagcggatcgagaggccggcggcggaagaggatgaccgctcgctcttgaggggggggggangaaccaaagaccaccactcgctccacaacgccaccaacagccccggggaggggcgcgacccaaaatcaacacgaaccggcacacgccgaggcccagctgctcaagcaccgtgaccaccccaccggaagacgcgacgcaggccgccatcga

SEQ ID NO: 16344 - DNA, 380 bp, Zea mays
  Clone ID: MRT4577_114905C.1
taaatggtttaaaatgtcaccagttctcttagtctgattttaaataaatcaagagcccagtacaagtctattgctcacttattcataccatgcatataagcatatttccttttttcttattcatgcccggaaaaaggggcatttccaataaccttttttccaaaaaaaatcaatgtccccttaatgccggggttggaaatcccacccttagcgccttttactttacttacccccgtggaacccccccaccttgcccagaaccagagtgtttttcattcatatacagaaacttgttgctggaaacccgaccaggaaccaaaatttccaaaatttacagcaccaccccggccttgctggggacaatacaataccccgggtgt

SEQ ID NO: 16345 - DNA, 319 bp, Zea mays
  unsure (1)..(319): unsure at all n locations
  Clone ID: MRT4577_114906C.1
tgggtaccctcgnaggccggccgggcacagnacagctccgtggtgtgcaatggcaacctctcacctcagatcccgtactcctgctactcgacgccggcgccgggctgctcctgctccaagattcgctggcggggcagagaagtatctgtgcaccggtcgcgcccgacagagagtcgacgactgagggcttcacccggctccggctccggaggcagccacagcatagacgctcaagcaccaccatggcaagccgaccatgcgcacgacgggcaaccatgcggacatggctgcgaccactaacacgagatcgactgacggg

SEQ ID NO: 16346 - DNA, 311 bp, Zea mays
  unsure (1)..(311): unsure at all n locations
  Clone ID: MRT4577_114907C.1
ccggccgggatcccttttaatcgtcatttgaacagcgtatcgtttgttacaaactcatgcgattcgaacaaaaataatacaaagccgcaacaaacggcgtacgcctcttgcacgacgcccctgcctgcgtgctactatttctggaaagaagacaccttcgctcttggccaggtagataatctttaacgaacaaaaacccgctttcaaccccgacgcttgacgtacgnnattgganncacttcgnnntactttacgactatcacctacacctagcgaccccagacaaaaaaaaaaaaaaaaaacccgcggcc

SEQ ID NO: 16347 - DNA, 246 bp, Zea mays
  Clone ID: MRT4577_114908C.1
cgtagtcttcctcccacaaaacctgcgccacatcttcatcctcctcctcgtcacctcctccaatcgtgccggcggcgcacaaggtagatcatctgagcctattcatcgcaacctcaagatcccccggggaagaaggggccatgagtcccacggcgtcttgcagaagatatagaacctactcctacaggctattagaagctgaaggcaattacaatcatcaagaacaatcaaatgatgcaacggcta

SEQ ID NO: 16348 - DNA, 1785 bp, Zea mays
  Clone ID: MRT4577_114909C.1
aattcggcacccggccggcggccggggttgagagcaccacgccaccccttcctgtctctctgctcctccgcatccgcttgtgcgcccgtgccgctcactgcactccattcccaatctctctgcctcccctgcctgtctctccacgccagtgcgcgcagatccggcgggtgtgaagaggagctcatcacatcctctgctgcttcttctgtccaataagagctagctagctagctagctcgccgattcaacagcaagcggcggcagtgatgcgcggacttgtcctcgcatagccaagatccgtccagcagcggcagcttgagcgcagacagattcaagaatggaggagaaagcggcggacgcgacggcgacagtggcggcggcggcggcagcggcagcggatcaggacggcgcggtgtactgcagcgagcacccgtacccgccaggcgcggcagcggcggccggggcgggcgccggcggcatctgcgccttctgtctgcaggagaagctcggcatgctggtctcgtcgtccaagtccagccccttccacccgccgccgcagcagccggtctccgccgcgtcgccgtcctcgacgacgccgccgccgtccaaccgcgcctcctccgaggcgccgccgccgccactctaccctcccgcggcgtcgcgcaaggtgatgcccgcgcagagcgcgggcggcggcggcggcgggctcaagaggagtaagtcggtcgcgccgcggccggaggagccgctgccgccgcccgcggtcacggcggacagcccgcgcaagaagagcttctggtccttcctccacctctcgtcgtcgtcaggcagccacaagggcggcgcgtcatcggcttcggcgggcagcggcggcgccgcgaggaggaactccgtgtcggtggcgtcggcctcgtcggcgtcgctcgggggccggctggaggcgatcgtggagccggagagcccgggccgccggagcgagggctcctcgtcgtcgtcgttcgggcggaaggtggcgcgagcatgcatgcgggggtagcttcatggggttgatgctgccgctgcgtaagcgatcaatggccggtgaatcatcatccatccctcgaccatatatactagtactacataaatgtctccatctttattagtgttctcatgtccatgccttacgatttttaagcagaacctggtcctgtttatgttgaaaatgttgctatggatctagctatagctactgcctttacatttgggattcctgtctccagtggcaatacggcacccgacggcgccagcgccagcgccagcgggagcgcgaggggctccggctcgcggagccaccggagctgggcttgggcgctggcgagccccatgagggcgctcaggccgaccagctcctcgtccagcaagagcatcatggccgcgcccacagccgcgtgaggaagggcagcggcagcatgcatgcagatgcgggggtagcttcatggggttgatgctgccgctgcgtgagcgatcaatggccggtgaatcatcatccattccatccctcgaccatatatactagtactacataaatgtctccatctttattggtgttctcgtgtccatgccttacgatttttaagcagaacctggtcctgtttatgttggaaatgttgctatggatctagctatagctactgcctttacatttgggattcctgtctccagtggccaagaaaactgtggaacttgttaatctgtttaacccctggagtatttgtctgggcaattcatcgtatgcttcatgtt

SEQ ID NO: 16349 - DNA, 1081 bp, Zea mays
  Clone ID: MRT4577_11490C.1
cattataatatgttaaacaaagctaatatattagtctccttgtaggttacaacatggtttatcgttctcttgctttgataaatgatggcattttattgtttattacaaaaacagtatgcctcatctgtctttatctacaactgtgctggcagtctgttttgaccttttctaacaatcaaagttctccagggctcaagaacagcaacttggacgcatgtgtacttggagctctcgaggttcttgccactggtgttacaatcacgttcttggacagagctggccggagaatcctccttattatatcttcttgtgggatgaccctaagccttcttgcggttgctgttgtattttacatcaaggataatatttcacatgattctgacatgcataacatcttaagtatggtgtcgttggttggtgtcgtggcttatgtcattgccttctgcttcggcatgggtgccattccatggatcattatgtctgagatccttccggttagcatcaagagtgtggcaggaagctttgcgaccctagccaactggttgacatcctttgggataacaatgacagcaaatttgctcttgagctggagtgctgcaggcacatttgcctcctacatggtcgtgagtgcgttcactctaatgttcgtcatcctctgggtgccagagacgaagggaagaacccttgaggagatacagtggtccttccagtagtgagctgcagcagcattcatcagtaaatgcagtcatcagcaaggtctggtctgagctgctgtatgtggtgtggcggcatttcttcttctttttgtactgcaatctcttctgtggcatcatttggtgtgtaagtttcctgcatgacattgatagtagggattaacttgcatttgtgacaaattagttgatagtgataggatccctttttgacgtccccatatcctccgtgtggcggcatgggatgtcaaaaggaaagggatggagttttctcgcttttggtgtagcaggcctccctttggtcaagtagtcacagacccattttttttttgtcattggattggatacgttacagggttcgcccccccccc

SEQ ID NO: 16350 - DNA, 675 bp, Zea mays
  Clone ID: MRT4577_114910C.1
ccgaggcgccgccgccgccactctaccctcccgcggcgtcgcgcatggtgatgcccgcgcagagcgcgggcggcggcgggctcaagaagagcaagtcggtcgcgccgcggccggaggagccgctgccgccgcccgcggtcacggcggacagcccgcgcaagaagagcttctggtccttcgtcatcctactggctctcggcacccgacggcgccagcgccagcgccagcgggagcgcgaggggctccggctcgcggagccaccggagctgggcttgggcgctggcgagccccatgagggcgctcaggccgaccagctcctcgtccagcaagagcatcatggccgcgcccacagccgcgtgaacggcagcggcagcatgcatgcgggggtagcttcatggggttgatgctgccgctgcgtaagcgatcaatggccggtgaatcatcatccatccctcgaccatatatactagtactacataaatgtctccatctttattagtgttctcatgtccatgccttacgatttttaagcagaacctggtcctgtttatgttggaaatgttgctatggatctagctatagctactgcctttacatttgggattcctgtctccagtggccaagagaactgtggaacttgttaatctgttcaacccctggagtatttgtctgggc

SEQ ID NO: 16351 - DNA, 134 bp, Zea mays
  Clone ID: MRT4577_114911C.1
gcctattgattgatctttctttcattaaaggcccccacactcactgtccactatccagaagggaaacctcccttaccaaccaaattattgaatccaccaacccgcggttaaacgcgggcggaaaagggcgcgct

SEQ ID NO: 16352 - DNA, 818 bp, Zea mays
  unsure (1)..(818): unsure at all n locations
  Clone ID: MRT4577_114912C.1
gcccgcgcagtacgcgggcggcggcggcggcgggctcaagagagtaagtcggtcgcgccgcggnccggagagccgctgccgccgcccgcggtcacggcggacagcccgcgcaaaaagagcttctggtccttcctccacctctcgtcgtcgtcaggcagccacaagggcggcgcgtcatcggcttcggcgggcagcggcggcgccgcgaggaggaactccgtgtcggtggcgtcggcctcgtcggcgtcgctcgggggccggctggaggcgatcgtggagccggagagcccgggccgccggagcgagggctcctcgtcgtcgtcgttcgggcggaaggtggcgcgctcgcgctccgtgggctgcggcagccgcagcttctcgggcgacttcctggagcgcctctccaccggcttcggcgactgcgcgctccggcgcgtcgagtcccaccgcgagcccaagcccaaggccgcgctgggccacctgggcggcggcgaggagcacgagcaggaccaggaccagcaccaccgcatcaagtgcgccggtttcttcggcggcggcctgggcgccgcggccccgccttcgtcatcctactggctctcggcacccgacggcgccagcgccagcgggagcgcgaggggctccggctcgcggagccaccggagctgggcttgggcgctggcgagccccatgagggcgctcaggccgaccagctcctcgtccagcaagagcatcatggccgcgcccacagccgcgtgaagggcagcggcagcatgcatgcggnggtagcttcatggggttgatgctgccgctgcgtgagc

SEQ ID NO: 16353 - DNA, 233 bp, Zea mays
  Clone ID: MRT4577_114913C.1
aaagccaaaagacccgaaatatatattggaccagtgcctctacagttcgcttattcatataatacaagctctactataggggctagctgtggtaaaatactgagaaacattagatgttggggtttaaaacattagaacaatacgtaatccatgggataaaacaatccgctgaacatggaatgaagttccgtattggcagcggaactcgaagagatagatagctgatagcatca

SEQ ID NO: 16354 - DNA, 409 bp, Zea mays
  Clone ID: MRT4577_114914C.1
ccagggaggttagtgccggccaaggggcaccgaaaggttttcctcctagatttctggggaccttgctccctctgcttggttcaaaccccctacaaaaaagggtggggggcttggtagctgcaatagtgactggccggggcattcgcggtctgagggggtcaaaagcccggaaaaataatttctcttttttccaagccgtctgaaggccaaccgggcccttggcgctttccctaaccgaagccagaaaactggtttggatttggcattaagaaaaaaaaagaaattaagcaccggattattggcaataattggtgggtgacacccacttctggttcaagggggggtttgcttccaaaaaaaaaaaaaaaaaaaaaaggacctggcccggccgggccgttgaaagggccaa

SEQ ID NO: 16355 - DNA, 374 bp, Zea mays
  unsure (1)..(374): unsure at all n locations
  Clone ID: MRT4577_114915C.1
tccaagaatggggctgacgtacgactacacgctacacctacntcagcccccccactttccgacaattaacccgaactgctacggtctcaacctactacgagggaatggggaaaaccccttccgtgcgtaacacggattttctatctaactagagtattaccgagaaggttaataagatcgaagaagtctagatcgactaaagtgaaactaacgataattttaagactctcgtcttatatattcagatagagagaaagactatatacatcgttaataaataagagaagtagaataaggttatcatcttccaggttctatagattaagaagtagtatatcaagtaggaggagaccattaactatctccagatcgca

SEQ ID NO: 16356 - DNA, 316 bp, Zea mays
  Clone ID: MRT4577_114916C.1
gctcgcatcacctgaaccacttgacaaccagccagatagctaaccaaccgccgcagccaagaacaggcgggagacaacttgccccgtacagacagcatgttcaactccaacatcaagtacgcgggcgtcgcccagatcgacagccgaccggtgctgcagtcggtgggcaaccgactgacagggcctgacgcctaacgcccgctaaagaaaagacacgcctacagggtgtgtaaccaaccgctgatgaccaaatgcgtgaatcaactgcacctataagactaaggtgaatttctatgccggctccggcctgaatttg

SEQ ID NO: 16357 - DNA, 560 bp, Zea mays
  Clone ID: MRT4577_114917C.1
gggaccctcgaggccggccgggccgggttttctctcccacagagcgctcctctattccctataggtattctgccacggcggtgtcgctctcgttacgtaccacggcttacatcacatcatgaggcaccatctccatcatccaagaagaaccgccgcggagacctagaaatacctctcacttggggaggtcttgtgcgacaagaatgacaacaatctgaccaaacgctatgtggttgacgcgcacaacttggtcgagcgtgaatctcgtgtaccactaccagtctcatgagtatgggtgcgaaaccttctcttggctcaagtactactggtatgtcaccatggatagcgttgacaacctcccgaacttcctcatcctgccatccgaggatgtggctaacacactcaataagtcttcgaagcccctgtctcaaggccttctactctggaccacctggagtccgtgactccgggcctcgtcgtgatgaaaatgaagctgataagtgtgactgcatccatggttacaaaggatgtcatccccttgctccaggtaattttgctgg

SEQ ID NO: 16358 - DNA, 361 bp, Zea mays
  unsure (1)..(361): unsure at all n locations
  Clone ID: MRT4577_114918C.1
ttacgcagcagtcctatccaggtcaaaccgacctccgagcgggtacagtgctctggacaaggaggtccagatggaggggatgccgatgatgtcacagttcacactggattcggatgaggagaaggaagaggaagtgatcacctctacagcagctccagtggcaaatggcggngagtcccatgacgagatcccactgcacgaaccaggttccaagtgacggagatgaaatctgggctgttcttctgtcgattagccaagtggaggagggtgtcgacagagctggcacactggggcttcatgtttgtgtgttttggtacatcattttaatatgggtttcactttctgatatttggtaatatgt

SEQ ID NO: 16359 - DNA, 307 bp, Zea mays
  Clone ID: MRT4577_114919C.1
acccactctgaactcaaaaataatataaatttcaactaaatcttttgattttattcctataattttatatacagtcatcgtttatatttaacagtagttattgcccaaatatacttataaatttcaacccttatctattttaacttttataaaaaaactattactaactacattaatccatttttctaatacaaaattccaacaatttctctaacttaataattaatttctattccaaaattctaatcattttcttactttataaattttttaaaaacaccacttaaatttctttacaatacccttt

SEQ ID NO: 16360 - DNA, 350 bp, Zea mays
  Clone ID: MRT4577_11491C.1
gtaacacataatggccttagctacatgggatccatacacaatccggaatttttttgttgacattaaaagaaaatatgatatttttataaaaaagacaggcaaatcccagcagacattttgtaaaaaaaaaatagcgcaggtcatttccatgccggttacaaaggggcacaacctttccttttttatcaaaacagaaaaagggcccatggccatgtataaaacccaacttgaactgaacgagaaatattacacgtattcaggacaacatttgaacattccaagggatagttaatatgtattaaatacaaaccatagcacttaactttttttggacacacctaaacaaccac

SEQ ID NO: 16361 - DNA, 256 bp, Zea mays
  Clone ID: MRT4577_114920C.1
ggagcccccaacaatccataaggggcgatagggcctcgatggttttaagccctggaacaccgaaaggattatggggtgggaacaaacccattttttcttacaaacctaaattccagcccccttactaaaaaaccttaaggaccatgcccggaattatgggagccccaaaaacttgcttagccgaatatgggggcccaaaccccccttggggatggaccccaccgtttttttcgcgaggggggggcgcccctgggcc

SEQ ID NO: 16362 - DNA, 303 bp, Zea mays
  Clone ID: MRT4577_114921C.1
gcccgcgacgcctgctgaaaggggaccgctactggggacaaccggatcgcggacagaagctagttgctgctgtaccggttggtgcgccaggagctcggctgcatgttcctcagcggctagaagctctaattcaactaggagtagtgcaacatggcgtttatctgcatcagccacggctggcttgatgaacccatgctggagtggctaatggagtgagacagctagccgatgcccagcagcatcagcttgtagacgctatgagtcagcatgcattctgacagcctggcatggactgacgacgag

SEQ ID NO: 16363 - DNA, 629 bp, Zea mays
  Clone ID: MRT4577_114922C.1
ggggtaccggcgccctctctcgagttttttttttttttttttttttttttttttttttttttttttttttttttttttttttttttgggaacgggaaaacatgaacccccatctaattattttaaaaagggctaaacaggaccctcgggcgattaaatattgggggcagaaaaacactgccagtctgccattttacaaaaaaaaactataaacttttgttcaccaaggacatatgcaggaaactaaaacatgcatatgcatgaaatcagaacagccttcaaaataaaagccggcctgccctttgggcaactaaaaaggagccatatcctgggcaaaccttttccatccacagggggggaaccatttatgggtgaaattatccgcaatagcttttgacaactttcatgtttatgcccaagcccgattaaccccccaaacaactgactttgaaaacaagttttggtgccctttcctgaaaacagttttgttaaaaagggcctggcatttgacatttgcctaacaaactttggaaatcgattccaatggggaaactcaaacaagcttttgttcatcctaacatagttaaaggaaaaagatgttcctgaagaacagcctgagaaaagccttga

SEQ ID NO: 16364 - DNA, 256 bp, Zea mays
  Clone ID: MRT4577_114923C.1
ctccttcctcccgcgctccgactttgactacctcgctgacacactcatcccccaaccgtcttcatcttctccgccttccaatctgctcggcgtcctccggctctcgtgctctctcattctctttttcccctacggcgagaatgcggacatgttgcctttgttactctggatgccaccactgtcactggctccacgcctctctcgccggtcgttcagagtgatgggcttatgcacccggcgcaccgcatccagcagc

SEQ ID NO: 16365 - DNA, 407 bp, Zea mays
  unsure (1)..(407): unsure at all n locations
  Clone ID: MRT4577_114924C.1
gagcggcgggcgggaagtacagangagaaacaaaactagggagtagagagaggaaacggaggagaggtggccaggtggtggagggcggtgacgggacaaagtagtggcctgggcgtgccggcgcggaggaggttgcggccatggagaatggcgcggccacgcggccctgtcctctgcttgcaatactgtcccctccttctcccctctcttccgggtcctcattcccgctttttcccactctctcgtgctcccccctttctccctctcgctcctcccccttgctttcttccttcctctctgccccctgatttgtttcctttcttgcttgtgantataattgtttttttttttttcccccccccccccccgtgtttttttttgtttttattatttttattttttttgtt

SEQ ID NO: 16366 - DNA, 236 bp, Zea mays
  Clone ID: MRT4577_114925C.1
ttttgagcgggtgtgtggttttttttttgttttattgcaaggggccaacccggaaaaaatttgtccccccctcaggtttctgggggtaaggggcgccccggaattttaaaggaacatatttactcctagtttacaacttggccccaaaagggattactggggttggtcaccccccccgtccggggcaaacctactggtcctttttggcgggtacccccgatcttatttatgtgggg

SEQ ID NO: 16367 - DNA, 255 bp, Zea mays
  Clone ID: MRT4577_114926C.1
cttactttgtgaacaactgtatcttcttctacgagccgaagtgcatcaagactggtttctacgacaatggctcgcactcaccgttaaggtgttcctcgtgccacttcttatgcaactccaccattgatccttaccttgtctcacaccatctcatcctttcttatgcttcttttgtcaagctatacctatacaagtctcatctttaccagaacgggaagattgtaatactactggatttcttgtggtactaacctt

SEQ ID NO: 16368 - DNA, 576 bp, Zea mays
  Clone ID: MRT4577_114927C.1
ctgcgcgttgtggaccagccggaggaggaacccagtggcgctggcgcggcgccggggctgcacgagttccagttcttcggccacgacgaggaccacgacagcgtcacgtggctgttcaccgacccgtcgccccacctgcaccgcgggccggcggccgccgaggtcgggaacgcggtggtggccgaggctgagcagcggaggccgccgccggtgttcgtcgacgggtacgcgcacgcgcagtacggggagctgccgggtcacggcctcacgttcgacgtgccgctgagcggccggggcggcggcgaggtggcctccgtggcgccggtgctggaggcagggctggggctaggcggcggcggcagcgatctggccacgtcctccagcgccacaatcatgtccttctgcggtaccacgttcacagacgcggcgagcgccgtcccgggcgacgcggccgcagcggcgcccaacggcagcgcaagtggtgccgccgacccggcagtggaccgcgaggcgaaggtgatgcggtacaacgagaagcggaagaggaggttctacgagaagcagattcggtacgcc

SEQ ID NO: 16369 - DNA, 356 bp, Zea mays
  Clone ID: MRT4577_114928C.1
attcagcggagattcatcagttctgttcacgttctttgacttgattgagattgataaatcatcaatcaaacgaacaaagaaacaaacaaatatcgtcatagattcaacagcaagcaagcaagcaagcaaacaaacaaaattactgtgtaggaaatggctccccttgcacacttccttctacgcccattgcagccttgatttacttcaggcaccagaaaacacttgcaactgtaaactagactccataacactaagaacaattgccaagaggtgccagtgtccattgaactttgaaatcatgacaagtgacacaacacgagttttatgctcaaagggcaccggtgtgtttgtgtgtg

SEQ ID NO: 16370 - DNA, 306 bp, Zea mays
  Clone ID: MRT4577_114929C.1
gtccgcaataacaagccccctgaggattaacgcaagatccaaggatcgtgaccacgacctatcaactcctggacgatctacagaggagatgtattccctcaatggcgtcactggcatcaagtaccctgatcatttctatgagctgcgcgtcctcccctatactgacgccaaaacctgcatcatgtctgaatagcctgcccgctgggaatatttgcctcactctgataggctttaagggctctctgactccggatggctctaagaaaatacacagaagtggggggaagattcgatacgcctggttac

SEQ ID NO: 16371 - DNA, 472 bp, Zea mays
  Clone ID: MRT4577_11492C.1
tctgctttctcgcgggcaaataaaaacgtgtagaacgacggtgtagtaggcagatctactccttgtgccgctacgctagcccgctaccgaagatcgggcccgtttcaaccggttcgttggtctgagcggagctaagatggggcgcatttcattttttggtcctttcgtctgattggagaagtgcccattccggtatcgctccccggcctccaaatacgcaccgacacagaacgtgttcgtacgcacgtacacatggtatgcgcaccgtgctgctggccatagccgttgactcaccgggattcactcctctctcgcgtgtgtgtgtgtggcttccttgcagttgggtacgggccctacttcggcaagaaggtggacccggagcccgggcggtgccggcgtacggacggcaagaagtggcggtgctccaaggaggccgccccggactccaagtactgcgagcgccacatgcacc

SEQ ID NO: 16372 - DNA, 300 bp, Zea mays
  Clone ID: MRT4577_114930C.1
cttctggtgtttttttacaatactacctttcccatattttttttcatttcaaaaaatactaccactttaaacccatcatcttcaatgtctcgtacaatcccattcccaaaaagcattcccaacaaatgactgcgatatcattaatacccacttcgagttcaacaacccacataacaccaacagtagcaaattcattatacccttcaaatacatccacacccaccacatggccttcctatcacattcatggtcaacatccaccaaagttgacaaacgatcttcaaaatccaaacttacata

SEQ ID NO: 16373 - DNA, 257 bp, Zea mays
  Clone ID: MRT4577_114931C.1
gcgtttgtgtgtatgtatgagagtctttgtgcatttcgcgagcgcgaagggcacgcccggtaagctgtcctatgacgagagccagatcaaaacgtacatgtatgtaaagggcactgactcggctaaccagtgctggaccatcgacagttgcttcttgtcgttatcgatcaaggccggtaagaaccatatgaagaagctttgactgtaaccgacgtccatgaccgccaaggcaaagggcatctccaagtactcgtctt

SEQ ID NO: 16374 - DNA, 271 bp, Zea mays
  Clone ID: MRT4577_114932C.1
ctcttcccttctctcctccctttctttcttctcttactcaatcctctgaatcgttgtcactgcgtacatcggataccctcagtgttgggtcaagttcttcatcccactttgtatagaaaaatctgtatccgcagtaggatgctatgatcaaacaggagccttctctagcttcttagcataagttgtggagagggaaacactcggacatcaagctgacagaattgcttggcaagaaaaggaaagcaaccgcttaagagagaggcaaaacatt

SEQ ID NO: 16375 - DNA, 838 bp, Zea mays
  unsure (1)..(838): unsure at all n locations
  Clone ID: MRT4577_114933C.1
cattgggtacctcgaggccggccggggctcaacacctacgtgagtactactacgtacactcctcctctatacatcatctgttctctgttcagttgatgactagactagatagctgcctcataaaacaaaggtctgctttggttcgatctgtgtgtgtgtcttttgtttatgtccaacgaaactgatgggagaagaaagcctttcgaccggcgtcgtcgtcagagagttgccgaacgtgcgtgtgtggtcggcgagtctagaaaccttccacaaccttccgagagcgagcgaggagacgtacacgtaacgtaaggccgccggtcgaaacgtagaaactgagcaaggcggcggccagggcttcttcctttcctttccttgtgtcgtttgtgcaacgacctggctatcggtttccgtttcccggtgtgtgtagtgtacccctacgcacgtagcacaacacctgtactacgccacctgtcacctgtgtgacctttgcttcgagatgtacaacatggtacagcagacagtcaatcagagtacgcgtttaattagtagtaataggaagtggtggcttcattcgtcctcgtcgcgatacacctagcagcaacacgtacgcgcgcaaaaaggtgctgcgactgcgagagtgngagctgttccgtggaataagcaaagcaaagcaaagcaaattaggcgcgcgcctgacacgccacagcgttctagtgcgcctgcggtcgattatcaatgggaacagttaggaatctcaaggaagcttcgcgcgcgtgaatgagcctttctggctcttcctatgcgtgtggtctactactagaagctaatttagcta

SEQ ID NO: 16376 - DNA, 5013 bp, Zea mays
  Clone ID: MRT4577_114934C.1
atggatcctaaagggaagggaatcgtgatcaacgacaaggagaaggagtccttcgtcaacgagccaagggatgacaattccaacgactcgggctcgggccacagacgcaaagatgggaagaagaagaagacaagacgcatcaaggagatcgtctactacgacagcgatgagtctacttcctcccaaaaggacgacgaccacaacgaatacgagagaaagaaaccggtcaattcgaacttttcttttgattactctcgtattcctcaaagtactaatgctcatttattatctattccacttggtaaacctcctcattttgatggagaggactacggattttggagtcacaaaatgcgtagtcacttgttctctctccatcctagcatatgggagattgtagaaagtggaatgcactttgatagtacggatagtcccatgtttattaatgaacagattcataaaaatgcacaagctactactgtgttgctagcctctttgtgcagggacgagtaccataaggtgagcggcttggacaatgccaagcagatctgggacaccctcaagatctctcatgaggggaatgatgtcaccttgctcaccaagatggagttggtggagggcgagcttggacggttctcaatgataaggggcgaggagccaactcaaacatacaaccggctcaagacccttatcaacaaaataaggagctacggaagcacgcgatggacggatcacgacgtcgtccgcctaatgctaaggtcctttaccgttcttgatcctcatttggtgaacaatattcgtgaaaatcctaggtacaccaagatgtcgcccgaagaagttctggggaagttcgtaagcgggcgaatgatgatcaaggaggcaagatatgtggatgacgcgttgaacggtcctattcatgagcctcaacccattgctctcaaggcaacgaggagcaaggaggcgctaccgagcaaggtggcgcaagttgaggcggccgggctaaataatgaggagatggccctcatcattaagcgcttcaagacggcgtttaaaggtcgcaagggacaaccaagcaagaccaagacaaaggagaagcgctcgtgcttcaaatgtggactcgccgccaccgccttcaacaagtcatccctcttccccaacgagcgtcacacttgcctcatggcaagggagaagaaagtaagcactcatgatactagtacttatgcttcttcaagtgaggatgagtctagtgatgatgatgagatagattactcatgcttattcaagggattagatagatctaaaattaataagattaatgagttgattgatgctttgaatgacaagaatagattactagaaaaacaagaggatcttttatatgaggagcatgataaatttgttagtgtacaaaattctcttgctctagaaattaaaaggaatgaaatgctctctagtgaattatctacttgtcatgaatccatctctaaattaaaaagtgttaatgatgatttgaatgctaagttagaaatagctagtaaatcaacatcttgtgtagaaattgttgaaacttgcaataggtgtaaagattttgacattgatgcttgtagtgaacacctagtttcaatttccaaacttaatgatgaattggctagtcttaatgctcaacttaagactagcaagagtaattttgataagctaaaatttgcaagggatgcctacacaattggtagacacccctcaattaaggatggacttggctacaagaaggaagccaagaacttgacaagccataaggctcccatctccgccaaggagaaagggaaggcccctatggctagtagtgtacaaaagaaccatgcctttatgtaccatgataggagacaatctagaaatgcttataggagatgtaacgcatatgatgcttttgattctcatgacatgtttgcttctagttcttcttatgtgcacgatagaaatgttggtaggagaaatgttgttcataatatgcctaggagaaatgttgttaatgttcctaggaaagtttatgcatccgggggttcaagctggattatcgacagcgaatgcacaaaccatatgacgggggagaagaagatgttcacctcctacgtcaagaataaggattcccaagattcaattatattcggtgatgggaatcaaggcaaggtaaaagggttagttgagtctcttggttacaatttgctatctgttagtcaactatgcaatatgggatataattgtctttttacaaatgtagatgtgtctgtctttagaagaagtgatggttcactagcctttaagggtgtattatacggcaagctttacttagttgattttgcaaaagaagaggccggtctagatgcatgcttaattgctaagactagcatgggctggctgtggcatcgccgcttagcacatgtggggatgaagaaccttcacaagcttctaaagggagaacacgtgataggtttgactaacgtacaattcgaaaaagatagaccttgtgcagcttgtcaggataagtctgaaacccaagggaccctcaagcgcttcctcaggagagctcaaaatgagtttgagctcaaggtgaagaagataaggagcgacaacgggtccgagttcaagaaccttcaagtggaggagttccttgaggaggaagggatcaagcacgagttctccgctccctacacaccacagcaaaatggtgtggtagagaggaagaacaggacgctaatcgatatggcaaggacgatgcttggagaattcaagacccccgagcgtttttggtcggaagccgtgaacacggcttgccacgccatcaacagggtctaccttcatcgcctcctcaagaagacttcgtatgagctactaaccggtaacaaacccaatgtatcttactttcgggtatttgggagcaggtgctacattctagtgaagaagggtagaaattctaaatttgctcccaaagctgtagaagggtttttgttaggttatgactcaaatacaaaggtgtatagagtcttcaacaaatcatcgggtttggttgaagtctctagcgacgttgtatttgatgagactaatggctctccaagagagcaagttgttgattgtgatgatgtagatgaagaagatgttccgacggccgctatacgaaccatggcaattggagaagtgcggccacaggaacaagatgaacgagatcaaccttcttcctcaacaacggtgcatcccccaactcaagacgatgaacaggttcatcaaaaggaggcgtgtgatcaagggggagcacaagatgatcacgtgatggaggaagaagcgcaaccggcacctccaacccaagttcgagcggtgattcaaagggatcatcctgtcgaccaaattttgggtgacattagcaagggagtaactactcgatctcgattagttaatttttgtgagcattactcctttgtctcttctgttgagcctttcagggtagaggaggccttgcgagatccggattgggtattggccatgcaggaggaactcaacaacttcaagcgcaatgaagtttggacactggtgcctcgtcccaagcaaaatgttgtgggaaccaagtgggtgttccgcaacaaacaggacgagcacggggtggtgacgaggaacaaggctcgacttgtgacaaaaggttatgcccaagtcgcaggtttggactttgaggagacgtttgctcctgtggctaggctagaatcaattcgtatcttgctagcatatgccgctcaccattctttcaggttgtaccaaatggatgtgaagagtgctttcctcaatgggccaatcaaggaggaggtgtacgtggagcaaccccctggcttcgaggatgaacggtaccccgaccacgtgtgtaagctctctaaggcgctctatggacttaagcaagccctaagagcatggtatgaatgccttagagacttcttaattgctaatgctttcaaggttgggaaagccgatccaactctttttactaagacttgcgacggtgatctttttgtgtgccaaatttatgtcgatgacataatatttggttctactaaccaaaagtcttgtgcagagtttagcagggttatgatgcagaaattcgagatgtcgatgatgggcgagttgaactacttccttgggtttcaagtgaagcaactcaaggacggcaccttcatctcccaaacaaagtacacgcaagacttgctgaagcggtttgggatgaaggacgccaagcccgcaaagactccgatggggaccgacggacacaccgatctcaacaaaggaggtaagtccgttgatcaaaaagcataccggtcaatgatagggtctttactttatttatgtgctagtagaccagatattatgctaagcgtatgcatgtgtgctagatttcaatccgatcctaaggagtgtcacttagtggcggtgaagcgaattcttagatatttggttgctacgccttgcttcgggctctggtatccaaaggggtctacctttgacttggttggatactcagattccgactatgctggatgtaaggtcgataggaagagtacatcagggacgtgccaattcttaggaaggtccctggtgtcgtggaactctaagaaacaaacctccgttgccctatccaccgctgaggccgagtatgttgccgcagggcagtgttgcgcgcaactactttggaggaggcaaacccttcgggaccttggctacaatctgagcaaagtcccactcctatgtgacaatgagagtgctatccgcatggcggaaaatcctgttgaacacagccgcacaaagcacattgacatccggcatcactttttgagagaccaccagcaaaagggagatatcgaagtgtttcatgttagcaccgagaaccagctagccgatatctttaccaagcctctagatgagaagaccttttgcagactgcgtagtgagctaaatgtcttagattcgcggaacttggattga

SEQ ID NO: 16377 - DNA, 1626 bp, Zea mays
  Clone ID: MRT4577_114935C.1
atggcgattggagatgtacggcctcaggaacaactggagcaagatcaaccgtcttcctcaactatggtgcatcccccaacccaagatgatgaacagcctttcagggtagaagaggccttgctagatccggactggatgttggccatgcaagaggaactcaacaatttcaagcgcaatgaagtttggacactggtgcctcgtcctaagcaaaatgttgtgggaaccaagtgggtgttccacaacaaacaggatgagcacggggtggtgacaaggaacaaggctcggcttgtggcaaaaggttatgcccaagtcgcaggtttggactttgaggagacattcgctcctgtggctaggctagaatcaattcgtatcttgctagcatatgccgctcaccattctttcaggttgtaccaaatggatgtgaagagcgctttcctcaacgggccgatcaaagaggaggtgtacgtggagcaaccccctggcttcgaggatgaacggtaccccgaccacgtgtgtaagctctctaaggcgctctatggacttaagcaagccccaagagcatggtatgaatgccttagagactttttaattgctaatgctttcaaggttgggaaagccgatccaactctttttactaagacttgcgatggtgatctttttgtgtgccaaatttatgtcgatgacataatatttggttctactaatcaaaagtcttgtgaagagtttagcagggtgatgacgcagaaattcgagatgtcgatgatgggcgagttgaactacttccttgggttccaagtgaagcaactcaaggacggcactttcatctcccaaacgaagtacacgcaagacttgctaaagcggtttgggatgaaggacgccaagcccgcaaagacgccgatgggaactgacggacacactgacctcaacaaaggtggtaagtccattgatcaaaaagcataccggtccatgataggttctttgctttatttatgtgctagtagaccggatattatgcttagcgtatgcatgtgtgctagatttcaatccgatcctaaggagtgtcacttagtggcggtgaagcgaattcttcgatatttagtcgctacgccttgcttcgggatctggtatccaaaggggtctaactttgacttgattgggtactcagattccgactatgctggatgtaaggtcgataggaagagtacatcagggacgtgccaattcttaggaaggtccctggtgtcatggaactctaagaaacaaacctccgttgccctatccaccgctgaggccgagtacgttgctgcaggacagtgttgtgcgcaactactttggatgaggcaaaccctcagggactttggctacaatctgagcaaagtcccactcctatgtgataatgagagtgctatccgaatagcggaaaatcctgttgagcacagccgcacaaagcacattgacatccggcatcactttttgagagaccaccagcaaaagggagatatcgaagtgtttcatgttagcaccgagaaccagctagccgatatctttaccaagcctctagatgagaagaccttttgcaggctgcgtagtgagctcaatatcttagattcgtggaacttggattga

SEQ ID NO: 16378 - DNA, 5253 bp, Zea mays
  Clone ID: MRT4577_114936C.1
atggatcctaaggggaagggaatcgtgatcaacgacaaggaaaaggagtccttcgtcaacgagccaaaagatgataaatccaacgactctggctcgggccacagacgtaaagatgggaagaagaagacaaggcgcatcaaggagatcgtctactacgacagcgacgaatcctcttcttcccaaaaggacgacgacaacgactacaggaagacgattgtagagaatggaatgaaatttgatagctcggatagtcctatgcttataaatgaacaaatccatagaaatgcacaagctactactgttcttttagcatctttgtgcagggaagaatacaataaggagagcggcttggacaatgccaagcagatatgggacaccctcaagatctctcacgagggcaacgacgtcaccatgctcaccaagatggagttggtagagggcgaacttggaagatttgctatgataaggggggaggagccaacccaaacatacaaccggctcaaaacccttgtcaacaagataaggagctatggaagcacgcgatggatggaccacgacatcgtccgcctaatgctaaggtcctttaccgttcttgatcctcatttggtgaataatattcgtgagaatcccaggtacaccaaaatgtcgcccgaagaaattcttggaaaatttgtaagcgggcggatgatgatcaaggaggcgaggtacgtcgatgacgcgttgaacggtccaatccacgagcctcaacccattgctctcaaggcatcgagaagcaaggaggcactaccaagcaaggtggcgcaaattgaggcggccgggcttaatgatgaagaaatggctctcatcattaagcgcttcaagacggcattaaggggtcgcaaggagcatcccaacaagaccaagacgaaggggaagcgctcatgcttcaagtgtggtaagattggtcactttatcgctaattgtcccgataatgatagtgaccaggaaaagaagagtgggaaatgggaaaagaagaagaattacaagaaggcaaagggcgaggctcatattggaaaggagtgggattcggattgctcctcgtctgactccgacaacgaaggactcgccgccaccgccttcaacaagtcatccctcttccccaacgagcatcacacgtgcctcatggctaaggagaagaaagtaagtactcgaaactctacttatgcttcttctagtgaggatgagtctagtgatgatgaaatagactattcatgcttatttaaaggattagatagatctaagattgacaaaattaatgaattgattgatgctttaaatgataagaataggctactagaaaagcaagaggatctcttgtacgaagaacatgataagtttgtagaggctcaaaaaacccttgcattagaaattaagagaaatgaaatgcttgcttgtgaattgtctacatgccatgattcaatttctaaattaaagagcatcaatgatgacttaaatgctaaactagtagaagcacaaaaatccaactcttgtgttgaacatgttgaaatttgcactaggtgtaaggatgttgatattaatgcttgtagtgaacacttagtttccatttcaaaattgaatgatgaattagctagtcttaatgcccaacttaagactagcaagagtgaatttgaaaaactaaaatttacaagggatgcctacactattggtagacacccctcaattaaggatgggcttggcttcaagagggaagccaagaacttaacaagccataagactcctatctccaccaaggagaaagggaaggctcctatggctaatagtgttaagaagaatcatgctttcatgtactatgataggagatactctagaaatgcctttagaagtaatgatgtttttgattcacatgcctatgattcttatgccatgactgcttctagttcttcctatatgcatggtagaagtatgactaggagaaatgctattcatcacgtgcctagaaagaatactattcatgctcctaggaaagtagtaaatgaaccttctacaatttattgtgctttaaatgcttcctttgctatttgtagaaaggataggaagatagttgctaggaagttaggggcaaaatgcaagggagacaaaacttgcatttgggtccctaaggatatttgcactaacctggtttatgcatccgggggttcaagctggattatcgacagcggatgcacaaaccatatgacgggggagaagaagatgttcacctcctacgtcaagaataaggattcccaagattcaattatattcggtgatgggaatcaaggcaaggtaaaagggttagatgtgtttgtctttagaagaagtgatggttcactagcctttaagggtgtattagacggcaagctttacttagttgattttgcaagagaagaggccggtctagatgcatgcttaattgctaagactagcatgggctggctgtggcatcgccgcttagcacatgtggggatgaagaaccttcacaagcttctaaagggagaacacgtgataggtttgactaacgtacaattcgaaaaagatagaccttgtgcagcttgtcaggcaggtaaacaggtgggaggagcgcatcacagcaagaatgtgatgaccacatcaagacccctggagctgctacatatggacctcttcggacccgtcgcctatctaagcataggaggaagtaagtatggtttagttattgttgatgacttttcccgcttcacttgggtgttctttttgcaggataagtctgaaacccaagggaccctcaagcgcttcctcaggagagctcaaaatgagtttgagctcaaggtgaagaagataaggagcgacaacgggtccgagttcaagaaccttcaagtggaggagttccttgaggaggaagggatcaagcacgagttctccgctccctacacaccacagcaaaatggtgtggtagagaggaaaaacaggacgctaatcgatatggcgaggacgatgcttggagaattcaagacccccgagcatttttggtcggaagccgtgaacacggcttgccacaccatcaacagggtctaccttcatcgcctcctcaagaagacttcgtatgagcttctaaccggtaacaaacccaatgtatcttactttcgtgtatttgggagcaaatgctacattctagtgaaaaagggtagaaattctaagtttgctcccaaagctgtagaagggtttttgttaggttatgattcaaatacaaaggcatatagggtcttcaacaaatcatcgggtttggttgaagtctctagcgacgttgtatttgatgagactaatggctctccaagagagcaagttgttgatcttgatgatgtagatgaagaagatgttccaacggccacgatacgcaccatgacgattggagatgtaaggcctcgggaacaattggagcaagatcaaccgtcttcctcaactatggtgaatcccccaacccaagatgacgaacaggtacctcaagtggaggcgcatgatcaagggggagcacaagatgttcaagttgaagaggaagaagcacctcaggcacctccaacccaagttcgagcggtgattcaaagggatcatcccgttgaccaaattttgggtgacattagcaagggagtaactactcgttcaagattagttaatttttgtgagcattactcctttgtctcttctattgagcctttcagggtagaagaggccttgctagatccggactgggtgttggccatgcaggaggagctcaacaacttcaagagaaatgaagtttggacgctggtgcctcgtcctaagcaaaatgttgtgggaaccaagtgggtgttccgcaacaaacaagacgagcacggagtggtgacgaggaacaaggctcgacttgtggcaaaaggttatgcccaagtcgcaggtttggactttgaggagacttttgctcctgtggctaggctagagtccattcgtatcttgctagcatatgccgctcaccattctttcaggttgttccaaatggatgtgaagagcgctttcctcaacgggccaataaaggaggaggtgtacgtggagcaaccccctggcttcgaggatgaacggtaccccgaccacgtgtgtaagctctctaaggcgctctatggacttaagcaagccccaagagcatggtatgaatgccttagagatttcttaattgctaatgctttcaaggttgggaaagccgatccaactctttttactaagacttgtgatggagatttgtttgtgtgccaaatttatgtcgatgacataatatttggctctactaataaaaagtcttgtgaagagtttagcagggtgatgacgcagaaattcgagatgtcaatgatgggcgagttgaactacttccttgggttccaagtgaagcaactcaaggatggcaccttcatctctcaaacgaagtacacgcaagacttgctaaagcggtttgggatgaaggacgccaagcccgcaaagactccaatgggaaccgacggacacaccgacctcaacaaaggaggtaagtccgttgatcaaaaagcataccggtcaatgataggatcgttactttacttatgtgctagtagaccggatattatgcttagcgtatgcatgtgtgctagatttcaatccgatcctaaggagtgtcacttagtggcggtgaagcgaattcttagatatttagttgctacgccttgcttcgggatctggtatccaaaggggtctacctttgacttaatcggatactcagattccgactatgctggatgtaaggtcgataggaagagtacatcggggacgtgccaattcttaggaaggtccctggtgtcgtggaactctaagaaacaaacttctgttgccctatccaccgctgaggccgagtacgttgccgcaggacagtgttgcgcgcaactactttggatgaggcaaaccctccgggactttggctacaatctgagcaaagtcccactcctatgtgataatgagagtgcaatccgcatggcggaaaatcctgttgaacacagccgcacaaagcacattgacatccgacatcactttttgagagaccaccagcaaaagggagatatcgaagtgtttcatgttagcaccgagaaccagctagccgatatccttaccaagcctctagatgagaagaccttttgcaggttgcgtagtgagctaaatgtcttagattcgcggaacctggattga

SEQ ID NO: 16379 - DNA, 8172 bp, Zea mays
  Clone ID: MRT4577_114937C.1
tcaatccaggttccgcgaatctaagacatttagctcactacgcaacctgcaaaaggtattatcatttaaaggcttggtagagatatcggttagtttcttatcgggactaacatgaaacactttcatatttcccttttgcttgtggtctcccataaagttatgcctaatgtctatgtgcttcgtgtggctttgttcattcgtagtatccgtcatgcggataacactctccttatcacagaggagtgggactttgctcagattgtagccaaagtccctgagggtttgcctcatccaaagtagttgcgcgcaacactgtcctacggcaacatactcggcctcagcggtggatagggcaacgaaagtttgtttcttagagttccatgacaccagggaccttcctaagaattggcacgtccccgatgtactcttcctatcgaccttacatccagcatagtcggaatctgaatatccaattaggtcaaaggtagacccctttggataccagagcccgaagcaaggcgtagcaactaaatatctaaggattcgcttcactgccactaagtgacactccttaggatcggattgaaatctagcacacatgcatacgcttagcataatatccggtctactagcacataaataaagtaaagaccctatcattgaccggtatgcttagcgttctacccggtttccacctttgttgaggtcggtgtgtccgtcggttcccatcggcgtctttgcgggcttggcgtccttcatcccaaaccgctttagcaagtcttgcgtgtacttcgtttgggagatgaaggtgccgtccttgagttgcttcacttggaacccaaggaagtagttcaactcgcccatcatcgacatctcgaatttctgcgtcatcaccctgctaaattcttcacaagactttttattagtagaaccaaatattatgtcatcgacataaatttggcacacaaaaagatcaccgtcacaagtcttagtgaaaagagttggatcggctttcccaaccttgaaagcattaccaattaagaaatctctaaggcattcataccatgctcttggggcttgcttaagtccatagagcgccttagagagcttacacacgtggtcggggtaccgttcatcctcgaagccagggggttgttctacgtacacctcttccttgattggcccgttgaggaaagcgctcttcacatccatttggaacaacctgaaagaatggtgagcggcatatgctagcaagatacgaattgattctagcctagccacaggagcaaacgtctcctcaaagtccaaacctgcgacttgggcataaccttttgccacaagtcgagccttgttcctcgtcaccaccccgtgctcgtcctgtttgttgcggaacacccacttggttcccacaacgttttgcttgggatgaggcaccagtgtccaaacttcattacgcttgaagttgttgagctcctcttgcatggccaacacccagtccggatctagcaaggcctcttctaccctgaaaggctcaatagaggagacaaaggaataatgctcacaaaaattaactaatcgagatcgagtagttactcccttgctaatatcacccagaatttggtcgacgggatgatccctttggatcatcgctcgaacttgggttggaggtgccggttgagtttcttcctccatcacatgatcatcttgtgctccccctcgatcacacgcctcctgttgatgaacctgttcatcgtcttgagttgggggatgcaccatagttgaggaagaaggttgatcttgctccttttgttcctgtggtcgtacatcaccaatcgccatggttcgtgtagcggccgtcggaacatcttcttcatctacatcatcaagatcaacaacttgctctcttggagagccattagtctcatcaaatacaacgtcgctagagacttcaaccaaacccgatgatttgttgaagaccctatacgcctttgtatttgagtcataacctaacaaaaacccttctatagctttgggagcaaatttggaattcctacccttcttcactagaatgtagcatttactcccaaatacacgaaagtacgatacattgggtttgttaccagttagcagctcatatgaggtcttcttgaggaggcggtgaaggtagaccctgttgatggcgtggcaagccgtgttcacggcttccgaccaaaagcactcgggggtcttgaactctccaagcatagtcctcgccatatctatgagcgtcatgttctttctctctaccacaccattttgctgaggtgtgtatggagcggagaactcgtgcttgatcccctcctcctcaaggaactcctccacttgaagattcttgaattcggacccgttgtcgctccttatcttctttaccttgagctcaaactcattttgagctctcctgaggaagcgcttgagggtcccttgggtttcagacttatcctgcaaaaagaacacccaagtgaagcgggaaaagtcatcaacaataactagaccatacttacttcctcctatgctcagataggcgacgggtccgaagaggtccatatgcagcagctccagaggtcttgaagtggtcatcacattcttgctgtgatgtgctcctcccacttgtttacctgcttgacaagctgcacaaggtctatctttttcgaattgcacgttagtcaaacctatcacgtgttctccctttagaagcttgtgaaggttcttcatccccacatgtgctaagcggcgatgccacagccagcccatgctagtcttagcgattaagcatgcatctagaccggcctcctcttttgcaaaatcaactaaataaagtttgtcgtctagtacacccttaaatgctagtgaaccatcacttcttctaaatacagacacatccttgcattttgcccctaatttcctagcaactatcttcctatcctttctacaaatagcaaaggaagcatttaaagcatgataaattgtagaaggaccattcataactttcctagcagcatgaacaacattctttctcggaacatgaattccatttttcctaagtatttctctatcctttatataggttgcaatggaagtatacaaagcacagtcaagtgaatcaaaagtattacatcttttatgagactgtcttctatcattgtacataaaaacatgattcatattagtactactagccacaagggccttcccattctcattggtagaaatcacatcattatgacttgtagagttcttggcttccctcttgaagccaagcccatccttaattgaggtgtgtctaccaatcgtgtaggcatccctagcaaattttagtttatcaaaatcacttttgctagccttaagttgggcattaagactagccatttcatcatttaactttgcaatagaagctatgtgttcactacaagcatcaatatcaaagtctttacatctattgcaaataacaacattttctacacaagttgttgatttactagctatttctatcttagcattcaaatcgtcattaatgctccttaagctagaaatcgtctcatggcaagaagataattcacagaaaagcatttcatttcttttaacttctaaagcatgagatttttgtgcttctacaaatttgtcatgttcttcatacaacaaatcttcttgtttttctaaaagcctattcttatcattcaaggcatcaattaactcattaattttatctaccttgattctatctaggcccttcttctcccttgccataaggcatgtgtgacgctcgttggggaagagggatgacttgttgaaggcggtggcggcgagtccttcattgtcggagtcggaggaggagcaatccgagtcccactcctttcctagatgtgcctcgcccttggccttcttgtaatttttcttcttttccctcttgctcccgtgttcctggtcactttcattatcgggacagttagcaataaaatgaccaatcttaccgcatttgaagcatgagcgcttccccttggctttgatcttgcttggctgtcccttgcgacctttaagcgccatcttgaatctcttgatgatgagggccatctcttcatcattaagtctggcggcctcaatttgtgctaccttgctgggtaacgcctccttgctccttgttgccttgagggcaacgggttgaggctcattgattggaccgtttagagcgtcgtccacatacctcgcttccttgatcatcattcgcccgcttacgaattttccaaggacttcttcgggcgacattttggtgtacctgggattctcacgaatgttattcaccaaatgaggatcaagaacggtaaaggaccttagcatcaatcggacgacgtcgtggtccgtccatcgcgtgcttccgtagctccttattttgttgataagggtcttgagccggttgtatgtttgtgtcggctcctcgccccttatcatcgcgaatcgtccaagctcgccctccaccaactccatcttggtgagcaaggtgacgtcgttcccctcatgtgaaatcttgagggtgtcccagatctgcttggtgttatccaagccactcactttgtgatattcatccctgcacaatgaagctagaagaacagtagtagtttgtgcattcttatgaatttgctcgttaatgaacaagggactatcagaactatcaaagtgcattccactctctacaatctcccatatactaggatgaagagaaaacaagtgactacgcattttgtgactccaaaatccgtagtcctctccatcaaaatgaggaggtttaccaagtggaatagataataaatgagcatttgcactttgaggaatacaagagtagtcaaaagaaaagttcgaattgaccggtttccttctctcgtagtcgttgtggttgtcgtccttttgggagaaagtagactcatcgctgtcgtcgtagtagacgatctccttgatgcgtcttgtcttcttcttcttcccatctttgcgtctgtggcccgagcccgagtcgttggacttgtcatcaatctccccctttttggtgattgatgccaaaacaaacaagtgttcattacaaaaataaagtactgaataataaacgttctccccctttttggcaccaagaaccaaaaagagagagagagaaacgccaatccaaggatcaccagtggggaggaggatgatgaggagcgaagaggtgttgcgccaggtcggaggcaaagtgttcctctccagactgggccggaggaggagcactgccagacgggtcctggggcggagggtaagaggacgattggcccggatccccgtgatatgggggagggtcaaactgctccggatcatcaaaataagtttcttcttcttcgacgtcatcggctgatgaaaaaggtaccccatacgcctgctggtaccactcgttgacatctggaggagggggtgaagaggtacatcaggagaacgaggggcgaagggagtacccaaagcggaagcttgacgacgaaggttgtcgtcggtctcccgctgacgtcgagccacctcatggacatctgcagcaatatttcggcacatggagaagaaggccgcaaacccgtgggccaggcggacacccatcccacggccacgacctcgaccacgaccacgaccacgtggtgtgggagatccgcggccaggggaagggcgcgaggcaccaccagcagcagcagcagcaccagcaccggcagacggaccagcagatgtatgaccacgagaactggagggggctttcctgaggcgcccagctggattgttgggatcaatccagaaaggggtgtatgactgatgtcgggtgcctttctcaaatctgaattgggtcacgacctcaatcatcttcataatgaatggagcatgaagacaccccttcaaaggaaagcaggctgcatgaataatttcctgccatatcatgtcaaagacattaaccctttctgagctgtttggtttcataaaagagagcaagaccttgctctccccaaggatgttcatctgatttcccccttttggaatgagggtcatcctgcagagggagttgatataatgataatacttatgaatgttggttgactcccaatactttccagactcagacagatgaaggtccttggcttcatctcttgtgggctgccggaaatcatgaatcttgatcttgtctccagatatatcgttgtcagaaaaaccaagaatgtgagcaaaacgacgatagctcaccttgtaccaactaccttcaatgaagaagttcagataggggtagttgtaatgactctccacgccagcaagctttatccagagagtggagtagaattgagcaatcacttcatcattccaatcatattggaatgtcatgatgttcttcatttgcttccttccacaggccctcagtgcctgtgacatttctgggtccccaatcgcttcacaaccttcccagttaatatatcgttgatgaaggatgggttgatgcttcttgggaagaatgactgaattatagaaatccacgtggtgaagagtccaaaagcgatttccatcgatcctgacatcgcgaatacgcaatacaggattttggaaacgaagatcttggagaagagcagaccctccactggcagtgaagtcagtgactggctcattgccagtacactgagcctctgcacgatggaggaccaagccgcgaatcacaggagcttgggccgggggaagatcaacttcatcgtccttcccaccatcatcatcacttgcaggctcccatgcctgcggattcgtcgcaggtcgagaccgaccggaaggagtccgggaagtccgaccgcgagcactttgagaccctgaggcctcagcacccggcatgacattgccgcttccgcgccctcgcttggatcgagagcgaggtggggtatcaccatggatttcctggtcatccgaggagtcggattcgaccaccgacgggttccttcgacgcaccattctaagaaataagaaatagaacctcgatccgaagatggggtcaagatctcccaacgaaatagaggaagatggtggaaacacgccgggaagaacggatctccaaccacacttccaaaagggtgagggctcgagagagtttggagtggagagaggagagaatgagatggcggcggcggaaccaaaatctctaagggtttgcttcatccatagcaactgtgcacaacatgccccagctgctatgtattcagcttctgcagtggagagtgcaacacaattttgtttcttggaactccatgacactaaggaccgcccaaggaattggcaagtcccagtagtgctttttcgatctactttgcaatcggtataatcttcctcatttaggtcgagatgtccatttgatgacattggagtcttggcgtgctttgctttttccatgccaaacttcttgagcatatcttgagtatatttagtttggcatagaaaggtaccttccttgagttgtttgacttgaaatcccaggaagtatttaagctcgcccatcatagacatctcaaacctgttcgtcattactttgctaaactcttcacaaaatttttcattagtactaccaaatataatgtcatcaacatatatttggcacacaaataattcattatcaacttttcgagtaaacaaagtagagtcagcttttcctattgtaaatccatttttaattaaaaaatctttaagacagtcataccaagctctaggggcttgtttaagcccgtagagtgccttgtgaagaagataaacatgatttggcttctttgggtcttcgaagcccggtggttgctccacatatactctttcttgtagtggtccatttagaaaagcgctcttgacatccatttgatatagcttgaaatcatggttagtagcataggcaattaatattctaattgattctaaccttgctaccggcgcatatgtttcaccaaaatcaagtccttccacttgagtatagccttgggcaaccaaccttgccttgtttcttgtaacaacgccattttcatcttgcttgttcctaaagacccatttagtttcaatcacattttgtttgggtctttggactaaggaccagacttcattcctagtgaagttgttcaactcctcttgcat

SEQ ID NO: 16380 - DNA, 341 bp, Zea mays
  Clone ID: MRT4577_114938C.1
gtctctgctactcacctagccgccagtcatgggcatgatcaagatcggaatcaacgggttcggaaggatcggctggctcgtggtcagggtcgtcctgcagagcgaggatgtcgagctcgtctgcgtcaacgaccgcttcatcaccacggattacatgacctacatgttcaagtacgacaccgtgcacggtcaatggaagcacatgcgacattaccctcaaggactccaagacgcttcttgttggcgagaagccggtcaccgtctttggcatcaagaacctccgagagattccgtgatgtgaggctggtgctgtatatgtcgtgcagtccatcggtgtcttc

SEQ ID NO: 16381 - DNA, 5121 bp, Zea mays
  Clone ID: MRT4577_114939C.1
atggatcctaaagggaagggaatcgtgatcaacgacaaggagaaggagtccttcgtcaacgagccaagggatgacaagtccaacgactcgggccacagacgcaaagatgggaagaagaagaagacaagacgcatcaaggagatcgtctactacgacagcgatgagtctacttcctcccaaaaggacgacgaccacaacgaatacgagagaaagaaaccgattcataaaaatgcacaagctactactgtgttgctagcctctttgtgcagggacgagtaccataaggtgagcggcttggacaatgccaagcagatctgggacaccctcaagatctctcatgaggggaatgatgtcaccttgctcaccaagatggagttggtggagggcgagcttggacggttcgcaatgataaggggcgaggagccaactcaaacatacaaccggctcaagacccttatcaacaaaataaggagctacggaagcacgcgatggacggatcacgacgtcgtccgcctaatgctaaggtcctttaccgttcttgatcctcatttggtgaacaatattcgtgaaaatcctaggtacaccaagatgtcgcccgaagaagttctggggaagttcgtaagcgggcgaatgatgatcaaggaggcaagatatgtggacgacgcattgaacggtcctattcatgagcctcaacccattgctctcaaggcaacgaggagcaaggaggcgctaccgagcaaggtggcgcaagttgaggcggtcgggctaaataatgaggagatgacactcatcattaagcgcttcaagacggcgcttaaaggtcgcaagggacagccaagcaagaccaagactaaggagaagcgctcgtgcttcaaatgtggtaagattggtcatttcattgctaactgtcccgataatgaaagtgaccaggaaaaggggaacaaaagggagaagaagaagcattacaagaaggccaaggacgaggcacatatcggaaaggagtgggattcagattgctcctcctccgactccgacaatgaaggactcgccgccaccgccttcaacaagtcatccctcttccccaacgagcgtcacacttgcctcatggcaagggagaagaaagtaagcactcatgatactagtacttatgcttcttcaagtgaggatgagtctagtgatgatgatgagatagactactcatgcttattcaaaggattagatagatctaaaattaataagattaatgagttgattgatgctttgaatgacaagaatagattactagaaaaacaagaggatcttttatatgaggagcatgataaatttgttagtgcacaaaattctcttgctctagaaattaaaaggaatgaaatgctctccagtgaattatctacttgtcatgaatccatctctaaattaaaaagtgttaatgatgatttgaatgctaagttagaaatagctagtaaatcaacatcttgtgtagaaattgttgaaacttgcaataggtgtaaagattttgacattgatgcttgtagtgaacacctagtttcaatttccaaacttaatgatgaattggctagtcttaatgctcaacttaagactagcaagagtaattttgataagctaaaatttgcaagggatgcctacacaattggtagacacccctcaattaaggatggacttggctacaagaaggaagccaagaacttgacaagccataaggctcccatctccgccaaggagaaagggaaggtccctatggatagtagtgtgcaaaagaaccatgcctttatgtaccatgataggagacaatctagaaatgcttataggagatgtaacgcatatggtacttttgattctcatgacatgtttgcttctagttcttcctatgtgcatgatagaaatgttggtaggagaaatgttgttcataatatgcctaggagaaatgttgttaatgttcctaggaaagtttatgcatccgggggttcaagctggattatcgacagcggatgcacaaaccatatgacgggggagaagaagatgttcacctcctacgtcaagaataaggattcccaagattcaattatattcggtgataggaatcaaggcaaggtaaaagggttagttgagtctcttggttacaatttgctatttgttagtcaactatgcaatatgggatataattgtctttttacaaatgtagatgtgtctgtctttagaagaagtgatggttcactagcctttaagggtgtattagacgacaagctttacttagttgattttgcaaaagaagaggccggtctagatgcatgcttaattgctaagactagcatgggctggctgtggcatcgccgcttagcacatgtggggatgaagaaccttcacaagcttctaaagggagaacacgtgataggtttgactaacgtacaattcgaaaaagatagaccttgtgcagcttgtcaagcaggtaaacaggtgggaggagcgcatcacagcaagaatgtgatgaccacatcaagacccctggagctgctacatatggacctcttcggacccgtcgcctatctaagcataggaggaagtaagtatggtttagtcattgttgatgatttttcccgcttcacttgggtgttctttttgcaggataagtctgaaacccaagggaccctcaagcgcttcctcaggagagctcaaaatgagtttgagctcaaggtgaagaagataaggagcgacaacgggtccgagttcaagaaccttcaagtggaggagttccttgaggaggagggaatcaagcatgagttctccgctccctacacacctcagcaaaatggtgtggtagagaggaagaacaggacgctcattgatatggcaaggactatgcttggagaattcaagacccccgagtgtttttggtcggaagccgtgaacacggcttgccacgccatcaacagggtctatcttcaccgcctcctcaagaagacctcatacgagcttctaaccggtaacaaacccaatgtatcgtactttcgtgtatttgggagtaaatgctacattctagtgaagaagggtaggaattccaaatttgctcccaaagctgtagaagggtttttactaggttatgattcaaatacaaaggcgtataggttcttcaacaaatcatcgggtttggttgaagtctctagcgacgttgtatttgatgagactaatggctctccaagagagcaagttgttgatcttgatgacgtagacgaagaagatgttccgacggctgctatacgaaccatggcgattggtgatgtgcgaccacaggaacaagatgagcaagatcaaccttcttcctcaactatggtgcatcccccaactcaagacgatgaacaggttcatcaacaggaggcgtgtgatcaagggggagcacaagatgatcatgtgatgggggaagaagcgcaaccggcacctccaacccaagttcgagcgatgattcaaagggatcatcccgtcgaccaaattctgtgtgatattagcaagggagtaactactcggtctcgattagttaatttttgtgaacattactcctttgtctcttctattgagcctttcagggtagaagaggccttgctagatccggactgggtgttggccatgcaagaggagctcaacaacttcaagaggaatgaagtttggacgctggtgcctcgtcctaagcaaaatgttgtgggaaccaagtgggtgttccgcaacaaacaagacgagcacggagtggtgacaaggaacaaggctcgacttgtggcaaaaggttatgcccaagtcgcaggtttggactttgaggagacgtttgctcctgtggctaggctagaatcaattcgtatcttgctagcatatgccgctcaccattctttcaggttgtaccaaatggatgtgaagagcgctttcctcaatgggccaatcaaggaggaggtgtacgtggagcaaccccctggcttcgaggatgaacggtaccccgaccacgtgtgtaagctctctaaggcgctctatggacttaagcaagccccaagagcatggtatgaatgccttagagatttcttaattactaatgctttcaaggttgggaaagccgatccaactcttttcactaagacatgtaatggtgatttgtttgtatgccaaatttatgtcgatgacataatatttggttctactaataaaaagtcttgtgaagagtttaacagggtgatgacgcagaaattcgagatgtcgatgatggacgagttgaactacttccttgggtttcaagtgaagcaactcaaggacggcaccttcatctcccaaacaaagtacacacaagacttgctgaagcggtttgggatgaaggacgccaagcccgcaaagactccgatggggaccgacggacacaccgacctcaacaaaggaggtaagtccgttgatcaaaaggcataccggtcaatgatagggtcgttactttacttatgtgctagtagaccggatattatgcttagcgtatgcatgtgtgctagatttcaatccgatcctaaggagtgtcacttagtggcagtgcagcgaatccttagatatttagttgctacgccttgcttcgggctctggtatccaaaggggtctacctttgacttgattggatattcggactccgactatgctggatgtaaggtcgataggaagagtacatcggggacgtgccaattcttaggaaggtccctggtgtcatggaactctaagaaacaaacttccgttgccctatccacagctgaggccgagtatgttgccgcaggacagtgttgcgcgcaactactttggatgaggcaaaccctcagggactttggctacaatctgagcaaagtcccactcctatgtgataatgagagtgctatccgcatggcggaaaatcctgttgagcacagccgcacaaagcacatagacatccgacatcactttttgagagaccaccagcaaaagggagatattgaagtgtttcatgttagcaccgagaaccagctagccgatatctttaccaagcctctagacgagaagaccttttgcaggttgcgtagtgagctaaatgtcctagattcgcggaacttggattga

SEQ ID NO: 16382 - DNA, 227 bp, Zea mays
  Clone ID: MRT4577_11493C.1
tttggatttggatataaaatctctctgaaccttttattgatcatcacaaaaatgatagcggccgacaaacaaaaatgcagcagcattagcgacaaccttacagctaggtatcaagccagcatcagcagtccaaaagcaccccttaacccagcggtgcgcgtgccaaggtccctagcagaagagcgtactaggaggcttggagccttgaaccatcaacagccggggcg

SEQ ID NO: 16383 - DNA, 420 bp, Zea mays
  Clone ID: MRT4577_114940C.1
ggtccctcagccgccggccccgtcccctcagctcccatatccgctcccctacctctccgcatctcccgtctccgtcgtctcgtctctgctcctcacctcgccgccagccatgggcaagatcaagatcggaatcaacggtttcggaaggatcggcaggctcgtggccagggtcgccctgcagagcgaggatgtcgagctcgtcgccgtcaacgaccccttcatcaccacggattacatgacctacatgttcaagtacgacaccgtgcacggccaatggaagcacagcgacatcaccctcaaggactccaagacgcttctctttggcgagaagccggtcacacgtctttggcattaagaaccccgaggagatcccgtggggtgaggctgtggcttagtatgtgccggagaccacaccggtgt

SEQ ID NO: 16384 - DNA, 4698 bp, Zea mays
  Clone ID: MRT4577_114941C.1
atggatcctaaggggaagggaatcatgatcaacgacaaggagaaggagtccttcatcaacgagccaaaggatgacaagcctaccgacttgggctcgggccacagacgcaaagatgggaagaagaagacaagacgcatcaaggagatcgtctactacgacgacagcgatgagtccacttcttcccaaaaggacaactacgacaacgactgcgagagaaggaaaccggttaattcaaacttttcttttgactactctcgtattccgcatagtacaaatgctcatttattatccattccacttggtaaacctcctcactttgatggagaagactacggattttggagtcacaaaatgcgtagtcatttgttctctctccatccaagcatatgggagatagttgagaatggaatgcattttgatagtaatgatagtcccatggatgaatatcacaaagtgagcggcttggatagcgccaagcaaatttgggacaccctcaagatctctcatgaggggaatgatgtcacaatgctcaccaagatggagttggtggaaggcgaactcgggagattcgctatgataaggggagaagagccaactcaaacgtacaaccggctaaagacccttgtcaataagataagaagctatggaagcacgcgatggacggatcacgacgtcgtccgcctaatgctaaggtcttttactgtccttgatcctcatcttgtaaacaatattcgtgagaatcctaggtacaccaagatgacgcccgaggagatacttggaaagttcgtgagcgggcgaatgatgatcaaggaggctagatatgtggatgatgcattgaatggcccaatccaagagcctcaaactatcgctctcaaagcaacaagaagcaaggaggcgttaccaagcaaggaaaagaagagtggaaaatgggaaaagaagaagaattacaagaaggcaaagggcgaggcacatattggaaaggagtgggattcggactgctccacgtccgactccgacaacgaaggactcgccgccaccgccttcaacaagtcatctctctttcccaacgagcatcacacatgcctcatggctaaggagaagaaaggcttagatagatctaagattgacaagattaatgaattgattgatgctttaaatgataagaataggcttctagaaaagcaagaggatcttttgtatgaagaacatgataagtttgtagaggcacaaaaatcccttgcattagaaattaagaggaatgaaatgcttgcttgtgagttgtctacatgccatgattctatttctagcttaaagagcataaatgatgatttgaatgctaagttaaaaataactagtaaatcaacatcttgtgtagaaaatgatgttatttgcaataggtgtagagattttgatattgatgtttgtagtgaacacatagcctctattgcaaaattaaatgatgaagttgctagtcttaatacccaacttaagactagcaaaagtgaatttgacaaattaaaatttgcaagggatgcctacacaattggtagacacccctcaattaaggatggtcttggcttcaagagggaagtcaagaacttaacaagccataaggcttccatctccacaaaggagaaggggaaggcccctatggtttatgcatccgggggctcaagctggattatcgacagcggatgcacaaaccatatgacgggggagaagaagatgttcacctcctacgtcaagaataaggattcccaagattcaatcatattcggtgatgggaaccaaggcaagagatgtgatggttcactagcctttaagggtgtactagacgacaaactttatttagttgattttgcaaaagaggatgccggtctagatgcatgcttaattgctaagactagcatgggctggctgtggcatcgccgcttagcacatgtggggatgaagaaccttcacaagcttctaaagggagaacacgtgataggtttgactaacgtgcaattcgaaaaagatagaccttgtgcagcttgtcaagcaggtaaacaagtgggaggagcacatcacagcaagaatgtgatgatcacttcaagacctctggagctgctgcatatggacctcttcggacccgtcgcctatctgagcataggaggaagtaagtatggtctagttattgttgatgacttttcccgcttcacttgggtgttctttttgcaggataagtctgaaacccaagggaccctcaagcgcttcctcaggagagctcaaaatgagtttgagctcaaggtgaagaagataaggagcgacaacgggaccgaattcaagaatcttcaagtggaggagttccttgaggaggaggggatcaagcacgagttctccgctccctacacacctcagcaaaatggtgtggtagagaggaagaacaggacactcattgatatggcgaggactatgcttggagagttcaagacccccgagtgtttttggtcggaagtcgtgaacacggcttgccacgccatcaacagggtctatcttcaccgccttctcaagaagacctcatatgagctgctaactggtaacaaacccaatgtatcgtactttcgtgtatttgggagtaaatgctacattctagtgaagaagggtaggaattccaaatttgctcccaaagctgtagaagggtttttattaggttatgattcaaatacaaaggcgtatagggtcttcaacaaatcatcgggtttggttgaagtctctagcgacgttgtattttatgagactaatggctctccaagagagcaagttgttgatcttgatgatgtagatgaagaagatgttccaacggccgcgatacgcaccatggcgattggtgaagtacgaccacaggaacaaaaggagcaagatcaaccctcttcctcaactatggtgattcccccaactcaagacgatgaacatgttcatcaacaggaggcgtgtgatcaagggggagcacaagatgatcatgtgatggaggaagaaactcaaccggcacctccaacccaagttcgagcaatgattcaaagggatcatctcgtcgatcaaattcttggtgatattagcaagggagtaactactcgatctcgattagtaaatttttgtgagcattactcctttgtctcttctattgagcctttcagggtagaggaggccttgctagatccggactgggtgttggccatgcaagaggagctcaacaacttcaagagaaatgaagtttggacgctggtgcctcgtcctaagcaaagtgttgtgggaaccaagtgggtgttccgcaacaaacaagacgagcacggagtggtgacaaggaacaaggctcgacttgtggcaaaaggttatgcccaagtcgcaggattggactttgaggagacttttgctcctgtggctaggctagagtccattcgtattttgctagcatatgccgctcaccattctttcaggttgttccaaatggatgtgaagagcgcgttcctcaatgggccaatcaaggaggaggtgtacgtagagcaaccccctggcttcgaggatgaacggtaccccgaccacgtgtgtaagctctctaaggcgctctatggacttaagcaagccccaagagcatggtatgaatgccttagagatttcttaattgctaacgctttcaaggttgggaaagccgatccaactcttttcactaagacttgtgacggtgatctttttgtgtgccaaatttatgtcgacgacataatatttggttctactaataaaaagtcttgtgaagagtttagcagggtgatgacgcagaaattcgagatgtcgatgatgggcgagttgaactacttccttgggttccaagtgaagcaactcaaggatgacaccttcatctcccaaacgaagtacacgcaagacttgctaaagcggtttggaatgaaggacgccaagcccgcaaagactccgatggggaccgacggacacaccgacctaaacaaaggaggtaagtccgttgatcaaaaggcataccggtcaatgatagagtcattactttacttatgtgctagtagactggatattatgcttagcgtatgcatgtgtgctagatttcaatccgatcctaaggagtgtcacttagtggcagtgaagcgaatccttagatatttagttgctacgccttgcttcaggctctggtatccaaaggggtctacttttgacttgattggatattcagattccgactatgttggatgtaaggtcgataggaagagtacatcagggacgtgccaattcttaggaaggtccctggtgtcatggaattctaagaaacaaacctccgttgccctatccaccgctgaggccgagtatgttgccgcaggacagtgttgcgcgcaactactttggatgaggcaaaccctcagggactttggctacaatctgagcaaagtcccactcctatgtgataatgagagtgctatccgcatggcggacaatcctgttgaacacagccgcacaaagcacatagacatccgacatcactttttgagagaccaccagcaaaagggagatatcgaagtgtttcatgttagcaccgagaaccagctagccgatatctttactaagcctctagatgagaagaccttttgcaggttgcgtagtgagctaaatgtcttagattcacggaacttggattga

SEQ ID NO: 16385 - DNA, 5358 bp, Zea mays
  Clone ID: MRT4577_114942C.1
atggatcctaaggggaagggaatcgtgatcaacgataaggagaaggagtccttcgtcaatgaggccaaagatgacaagcctaccgactccggctcaggtcatagacgaaaggaagggaagaagaagaagacgaggcgcatcaaggagatcgtctactacgacgacagtgatgagtctacttcttcccaaaaggacgacgaccacaacgactacgagcaaaggaaaccggttaattctaacttttcctttgactactctcgtattccgcaaagttcaaattcacatttgctttccattccactcggcaagcccccacactttgatggagaggactacggattttggagccacaaaatgcgtagtcacctattctctctccatcctagtatatgggagattgtagatagtggaatgcactttaatagttcggatagtcctatattcattaatgagcaaatccataagaatgcacaagctactactgttcttctagcttcattgtgcagggatgaatataacaaattggtggagggcgagcttggacggttcgcgatgataaggggcgaggagacaactcaaacatacaaccggctcaagacccttatcaacaaaataaggagctacggaagcacgcgatggacggaccacgacgtcgtccgcctaatgctaaggtcctttaccgttcttgatcctcatttggtgaataatattcgtgagaatcccaggtacaccaaaatgtcgcccgaagaagtcttaggaaaattcgtcagcgggcgaatgatgatcaaggaggcaaggtacgtggacgacgccttgaatggaccgatcaatgaaccacaaccttttgctctcaaagcaacaagaagtaaggaggcgctacctagcaaggtggcacaaattgaggcggtcggacttaatgatgaagagatggctctcatcatcaaacgcttcaagacggtactaaagggtcacaaagggcagccaagcaagaccaaggcgaaggggaagcactcatgcttcaagtgcggtaagtttggtcattttatcgctaactgccccgataatgatagtgaccaggaaaagggaaacaagagggactccgacaatgaaggactcgccgccaccgccttcaacaaatcaaccctcttccccaacgagcgtcacacatgccttatggcaagggagaagaaggtatgtactcacaactctacctatgcttcttcaagtgaggacgaatctagtgatgaggatgaagtagattattcatgtttgttcaagggtttagatagatctaagatagacaaaattaatgaattaattgatgccttgaatgaaaagaatatacttttagaaaagcaagaggatttgttgtatgaagaacatgataagtttgtagaggctcaaaaatcccttgcattagaaattaagaggaatgaaatgcttgcttgtgaagtgtcaacatgccatgattctatttctaacttaaagagcataaacgatgatttaaatgctaaactagtagaagcaaataaatccaacttttgtgttgaatatgttgaaatttgcactaggtgtaaagatattaacattgatgattatagtgaacacctagcttgtatttctaaattaaatgaagaggtagctagtcttaatgcccaacttaagactagcaaaagtgattttgagaaactaaaatttgctagggatgcctacacggttggtagacacccctcaattaaggatgggcttggcttcaagagggaagccaagaacttaacaagccataaggctcccattcccactaaggagaaagggaaggctcctatggctactagcactaaaaggaatcatgcttttatatatcatgataggagacaaactagaaatgcttataggagttataatgcgtacgatgatttttctcatgctatgtttgcttctagttcttcatatgtgcacaatagaaatgttggtagaagggatgttgttcataatatgcctagaaaaaatattattcatgctcctaggaaagtagtgaatgaaccatctacaatttattgtgctttaaatgcttcctttgcaatttgtagaaaggatagaaagataattgctaggaagttaggggcaaaatgcaagggagacaaaacttgcatttgggtccctaaagatatttgtgctaaccttgtaggacccaacatgagttgggtttatgcatccgggggttcaagctggattattgatagcggatgcacaaaccatatgacgggggagaagaagatgttcacctcctacgtcaagaataaggattctcaagattcaattgtattcggtgatgggaatcaaggcaaggtaaaagggttagtagagtctcttggttataatttgctatctgttagtcaattatgcaacatggggtataactgtctattcacaaatgtagatgtgtctgtctttagaagaagtgatggttcactagcttttaagggtgtattagacggcaaactctatttagttgattttgcaaaagaagaggctggtctagatgcatgcttaatagctaagactagcatgggctggctgtggcatcgccgcttagctcatgtggggatgaagaaccttcacaagcttctaaagggagaacacgtgataggtttgactaacgtacaattcgaaaaagatagaccttgtgcagcttgtcaagcaggtaaacaagtgggaggagcacatcacagcaagaatgtgatgaccacttcaagacccctggagctgctgcatatggacctcttcggacccgtcgcctatctgagcataggagggagtaagtatggtctagttattgttgatgacttttcccgcttcacttgggtgttctttttgcaggataagtctgaaacccaagggaccctcaagcgcttcctcaggagagctcaaaatgagtttgagctcaaagtgaagaagataaggagcgacaacgggtccgagttcaagaaccttcaagtggaggagttccttgaagaggaagggatcaagcacgagttctccgctccctactcaccgcagcaaaatggtgtggtagagaggaagaacaggacgctcatcgacatggcgaggacgatgctaggagagttcaagacccccgagtgcttttggacggaagccgtgaacacggcttgccacgccatcaaaaaggtctaccttcatcgcctcctcaagaagacgtcgtatgagctactaaccggtaacaaacccaatgtatcttactttcgcgtatttgggagcaagtgctacattctagtgaagaagggtagaaattctaaattcgctcccaaagctgtagaagggtttttgttaggttatgactcaaatacaaaggcgtatagagtcttcaacaaatcatcgggtttggttgaagtctctagcgacgttgtatttgatgagactaatggctctccaagagagcaagttgttgattgtgatgatgtagatgaagaagatgttccgacggccgctatacgaaccatggcgattggagacgttcggccacaggaacaagatgaacgagatcaaccttcttcctcaattatggtgcatcccccaactcaagacgatgaacgggttcatcaacaggaggcgtgtgatcaagggggagcacaagatgatcatgtgatggaggaagaagcggaaccggcacctccaacccaagttcgagcgatgattcaaagggatcatcccgtcgaccaaattctgggtgacattagcaagggagtaactactcgatctcgactagttaatttttgtgagcattactcctttgtctcttctattgagcctttcagggtagaggaggccttgctagatccggactgggtgttggccatgcaggaggagctcaacaacttcaaaaggaatgaagtttggacactggtgcctcgtccgaagcaaaatgttgtgggaaccaagtgggtgttccgcaacaaacaggacgagcacggggtggtgacgagaaacaaggctcgacttgtggcaaaaggttatgcccaagtcgcaggtttggatttcgaggagacctttgctcctgtggctaggctagaatcaattcgtatcttgctagcatatgccgctcatcattctttcaggttgtaccaaatggatgtgaagagcgctttcctcaacgggccaatcaaggaggaggtgtacgtggagcaaccccctggcttcgaggatgaacggtaccccgaccatgtgtgtaagctctctaaggcgctctatggacttaagcaagccccaagagcatggtatgaatgccttagagactttctaattgttaatgctttcaaggttgggaaagccgatccaactctttttacaaaaacatgtgatggtgatttgtttgtgtgccaaatttatgtcgatgacataatatttggttctactaaccaaaagtcttgtgaagagtttagcagggtgatgactcagaaattcgagatgtcgatgatgggcgagttgaactacttccttgggttccaagtgaagcaactcaaggatggcaccttcatctctcaaacgaagtacacgcacgacttgctaaagcggtttgggatgaaggacgccaagcccgcaaagacgccgatgggaaccgacggacacaccgacctcaacaaaggaggtaagtccgttgatcaaaaagcataccggtcaatgatagggtcattactttacttatgtgctagtagaccggatattatgcttagcgtatgcatgtgtgctagatttcaatccgaccctaaggagtgtcacttagtggcggtgaagcgaattttgagatatttagttgctacgccttgcttcgggctctggtatccaaaggggtctacctttgacttggttggatactcagattccgactatgctggatgcaaggtcgataggaagagtacatcggggacgtgccaattcttaggaaggtccctggtgtcatggaactctaagaaacaaacttctgttgccctatccaccgctgaggccgagtatgttgccgcaggacagtgttgcgcgcaactactttggatgaggcaaaccctcagggactttggctacaatctgagcaaagtcccactcctatgtgataatgagagtgctatccgcatggcggaaaatcctgttgagcacagccgcacaaagcacatagacatccggcatcactttttgagagaccaccagcaaaagggagatatcgaagtgtttcatgttagcaccgagaaccagctagccgatatctttaccaagcctctagatgagaagaccttttgcaggctgcgtagtgagctaaatgtcttagattcgcggaacctggattga

SEQ ID NO: 16386 - DNA, 4974 bp, Zea mays
  Clone ID: MRT4577_114943C.1
atggatcctaagggcaaggggatggtggtcaatgataaggagaaggagtccttcgtcaatgacccaaaggagaacaagcctactgactcgggctcgagccgcaaaagaaaagatggaaggaagaagaaaacaaggcgcatcaaagagatagtctactacgacagcgacggatcctcttcttcccaaaaggacgacgacaacgactacgagaaaaagaagacggttaattcaaacttctcttttgattattctcgtattcctcaaagtaccaatgctcatttactctccattccacttgatggagttggtggaaggcgaactcgggagattcgcgatgataagaggggaggagcaacccagacatacaacaggctcaagaccctcgtcaacaagataaggagctatggaagcacgcgatggacggaccacgacgtcgtccgcctaatgctaaggtcctttattgtacttgatccacatctggtaaacaatattcgtgaaaatcctaggtacaccaagatgtcgcccgaagaaatccttgggaaatttgtaagcggacggatgatgatcaaggaggcgagatacgtggatgatgcattgaatggcccaatccacgagcctcaaaccgttgctctcaaagcgacaaggagcaaggaggcactacctagcaaggtggcgcaaattgaggcggtcgggcttaatgaggaagaaatgacccttatcatcaagcggttcaagacggcgctaaagggtcgcaaggagcaccccaacaagaacaagacgaaggggaagcgctcctgcttcaaatgtggtaagattggtcattttatcgctaattgtcccgataatgatagtgaccaggaaaagaagagtggaaagtgggaaaagaagaactacaagaaggcgaagggcgaagcacatcttggaaaggacgaggatgaatctagtgatgatgatgaaatagaatattcatgcttattcaagggcttagatagaactaagattgataagattaacgaattgattgatgctttgaatgataagaatagattactagaaaaacaagagaaccttttatatgaagagcatgataaatttgttagtgcacaaaattctcttgctttagaagttaaaaggaatgaaatgctttcttgtgaactatctacttgtcatgaaaccatttctactttaaaaggtgttaatgatgatttaaatgctaaagtagaagtagcaaataaatctaactcttgtgtagaacatgttatgatttgcaataagtgcaaagattttaatgttgatgcttgtagtgaacacctagtttgcatatctaaattaaatgatgaagtggctagtcttaatgcccaacttaagactagcaagagtgaatttgacaagctaaaatttgcaagggatgcctacacgattggtagacacccctcaattaaggatggtattggcttcaagagggaagtcaagaacttaacaagccataaggcttccatctccgccaaggagaaagggaaggcccttatggctagtagtgctcaaaagaaccatgccttcatgtaccatgataggagacattctagaaatgtttatagaagttatgatgcttttgattctcatgccatggttgcttctagttcttctattatgcatgatagaaatttagctcggaaaaatgctatgcctagaaaaaatattgttcatgttcctaggaaattaatgaatgaaccttctacaatttattatgctttaaatgcttcctttgctatttgtagaaaggataagaaagtagtggctagaaaattaggggcaaaatgcaagggagataaaacttgcatttgggtccctaaagctatttgtactaaccttgtaggacccaacatgagttgggtttatgcatccgggggctcaagctggattatcgacagcggatgcacaaaccacatgacgggggaaaagaggatgttctcttcctacgtcaagaacaaggatccccaagattcaaccatattcggtgatgggaaccaaggcaaggtgaaagggttaggaaaaattgctatttcttccgagcactctatttctaatgtattcttagttgagtcgcttggatataatttgttatccgtaagtcaatcatgtaatatggggtataattgtctattcacaaatgtagatgtgtctgtctttaaaagaagtgatggttcattagcttttaaaggtgtattagacgacaaactctatttagttgattttgcaaaagaggaggccgatctagatgcatgcttaattgctaagactagcatgggctggctgtggcatcgccgcttagcacatgtggggatgaagaaccttcacaagcttctaaagggagaacacgtgataggtctaactaatgttactttcgaaaaagatagaccttgtgcagcttgtcaagcagggaaacaggtgggaagctctcatcatgccaaaaatgtgatgacaacatcaagacccctggagttacttcatatggacctcttcggacccgtcgcctatctaagcataggaggaagtaagtatggtcttgttataattgatgatctttcccgcttcacttgggtattctttttgcaggataaatctgaaacccaagcgaccctcaagcgcttcctaagaagagctcaaaatgagtttgagctcaaggtgaagaagataaggagcgacaatgggtccgaattcaagaacattcaagtggaggagtatcttgaggaggaaggaatcaagcacgagttctccgctccctacacaccacaacaaaatggtgtggtagagaggaagaacaggacgctcatagacatggcgaggatgatgcttggagagttcaagacccccgagcgtttttggtcggaagccgtgaacacggcttgccacgccatcaaccgggtctaccttcatcgcctcctcaagaagacttcgtatgagctactaaccatttttgggagtaaatgctacattctagtgaagaagggtagaaattccaaatttgctcccaaagcggtagaagggtttttgttaggttatgactcaaatacaaaggcgtatagggtcttcaacaaatcatcgggtttggttgaagtctctagcgacgttgtatttgatgagactaatggctctccaagagagcaagttgttgatcttgatgatgtagatgaagaagacgtgccaacggccgcaatacgcaccatggcgattggagatgtgcggccacaggagcaaaatgcgcgagatcaaccttcttcctcaacaatggtgcatcctccaactcaagacgatgaacaggttcatcaagaggagacgtgtgatcaagggggagcacaaaatgatcatgtaatggaggaagaagcacaacaggcacctccaactcaagtccgagcggtgattcaaagggatcatcccgtcgaccagattttgggtgacattagcaagggagtaactactcgatctcgattagttaatatttgtgagcattactcctttgtctcttctattgagcctttcagggtagaggaggccttgctagatccggactgggtgttggccatgcaagaggagctcaataacttcaagagaaatgaagtttggacactggtgcctcgtcccaagcaaaatgttgtgggaacaaagtgggtgttccgcaacaaacaagacgagcacggggtggtgacaaggaacaaggcacgacttgtggcaaaaggttatgcccaagtcgcaggtttggactttgaggagacttttgctcctgtggctaggctagagtccattcgtatattgctagcatatgccgctcaccattctttcaggttgttccaaatggatgtcaagagcgctttcctcaacgggccaatcaaggaggaggtgtacgtggagcaaccccctggcttcgaggatgaacggtaccccggccacgaatgtaagctctctaaggcgctctatggacttaagcaagctccaagagcatggtatgaatgccttagagattttttaattgctaatgcttttaaggttgggaaagtcgatccaactctatttactaagacttgtgatggtgatctttttgcgtgccaaatttatgtcgatgacataatatttggttctactaaccaaaagtcttgtgaagagtttagcagggtgatgactcaaaagtttgagatgtcgatgatgggcgagctaagctacttccttgggttccaagtgaagcaactcaaggatgggaccttcatctcccaaatgaagtacacgcaagacttgatcaaacggtttgggatgaaggacgccaagcccgcaaagactccaatgggaaccgacggacacaccgacctcaacaaaggaggtaagtccgttgatcaaaaggcataccggtctatgatagggtctttactttatttatgtgctagtagaccggatattatgcttagcgtatgtatgtgtgctagatttcaatccgatccaagggagtgtcacttagtggctgtgaagcgaattcttagatatttagtcgctacgccttgcttcgggatctggtacccaaaggggtctacctttgacttgattggatattcagactctgactatgttggatgtaaggtcgataggaagagtacatcggggacgtgccaatacttaggaaggtccctggtgtcatggagttctaagaaacaaacctctgttgccctatccaccgctgagaccgagtatgttgcagcaggacagtgttgcgcgcaactactttggatgaggcaaacccttagggactttggctacaatctaagcaaagtcccactcctatgtgataatgagagtgctatccgcatagcggataatcctgttgaacacagccgcacaaagcacatagacatccggcatcattttttgagagaccaccagcaaaaggggatatcgaagtgtttcatgttagcaccgagaaccagctag

SEQ ID NO: 16387 - DNA, 4479 bp, Zea mays
  Clone ID: MRT4577_114944C.1
atggatcctaaagggaagggaatcgtgatcaacgacaaggagaaggagtccttcgtcaacgagccaagggatgacaagtccaacgactcgggctcgggccacagacgcaaagatgggaagaagaagaagacaagacgcatcaaggagatcgtctactacgacagcgatgagtctacttcctcccaaaaggacgacgaccacaacgaatacgagagaaagaaaccggtcaattcgaacttttcttttgattactctcgtattcctcaaagtactaatgctcatttattatctattccacttggtaaacctcctcattttgatggagaggactacggattttggagtcacaaaatgcgtagtcacttgttctctctccatcctagcatatgggagattgtagaaagtggaatgcactttgatagtacggatagtcccatgtttattaatgaacagattcataaaaatgcacaagctactactgtgttgctagcctctttgtgcagggacgagtaccataaggtgagcggcttggacaatgccaagcagatctgggacaccctcaagatctctcatgaggggaatgatgtcaccttgctcaccaaaatggagttggtggagggcgagcttggacggttcgcgatgataaggggcgaggagccgacacaaacatacaatcggctcaagaccctcatcaacaaaataaggagctacgggagcacgcgatggacggaccacgacgtcgtccacctaatgctaaggtcatttaccattcttgatcctcatttggtaaacaatatacgtgaaaatcccaggtacaccaagatgtcgcccgaagaagttcttgggaaattcgttagcgggcgaatgatgatcaaggaggcgaggtacgtggacgacgccttgaatggtccgatcaacgagccgcaaccccttgctctcaaggcaacacgaagcaaggaggcgctacctagcaaggtggcacagattgaggcggccggacttaatgatgaagagatggctctcatcatcaaaagattcaagacggtgcttaaaggtcgcaagggacaaccaagcaagaccaaagccaaggggaagcgctcatgcttcaaatgcggtaagcttggtcattttattgctaactgtcccgacaatgatagtgatcaggatcaagggaacaagagggagaaaaagaagaactataagaaggcaaagggcgaggctcatcttggcaaggagtgggattcggactgctcttcgtccgactccgacaatgaagcactcgccgccaccgccttcaacaagtcatccctcttcctcaacgagcgacacacttgcctcatggcaagggagaagaaagtaagcactcataatactagtacttatgcttcttcaagtgaggatgagtctagtgatgatgatgagatagattactcatgcttattcaagggattagatagaaccaaggtagacaaaattaatgaattgattgatgccttgaatgataggaatatacttttagaaaagcaagaggatttgttgtatgaagaacatgataaatttgtagaagctcagaaatctcttgctctagaaattaagagaaatgaaatgctctctagtgaactatcttcttgtcatgaaactattgctaagttaaagagtcttaatgatgatttaaatgctagactagaagtagctagtaaatctaattcttgtgtagaaattgttgaaacttgtaataggtgtaaagattttgacattgatgcttgtagtgaacacctagtttcaatttccaaacttaatgatgaattggctagtcttaatgctcaacttaagactagcaaaagtaattttgataagctaaaatttgcaagggatgcctacacaattggtagacacccctcaattaaggatggacttggctacaagaaggaagccaagaacttgacaagccataaggctcccatctccgccaaggagaaagggaaggcccctatggctagtagtgtgcaaaagaaccatgcctttatgtaccatgatagaagacaatctagaaatgcttataggagatgtaacgcatatgacgcttttgattctcatgacatgtttgcttctagttcttcttatgtgcataatagaaatgttggtaggagaaatgttgttcataatatgcctaagagaaatgttgttaatgttcctaggaaagtttatgcatccgggggttcaagctggattatcgacagtggatgcacaaaccatatgacgggggagaagaagatgttcacctcctacgtcaagaatagggattcccaagattcaattatattcggtgatgggaatcaaggcaaggataagtctgaaacccaagggaccctcaagcgcttccttaggagagctcaaaatgagtttgagctcaaggtgaagaagataaggagcgacaacgggtctgagttcaagaaccttcaagtggaggagttccttgaggaggaagggatcaagcacgagttctccgctccctacacaccacagcaaaatggtgtggtagagaggaagaacaggacgctaatcgatatggcgaggacgatgcttggagaattcaagacccccgagcgtttttggtcggaagccgtcaacatggcttgccacgccatcaacagggtctaccttcaccacctcctcaagaagacgtcgtatgagcttctaaccggtaacaaacccaatgtatcttactttcgtgtatttgggagcaaatgctacattctagtgaagaagggtagaaattctaagtttgctcccaaagccgtggaagggtttttgttaggttatgactcaaatacaaaggcgtatagagtcttcaacaaatcatcgggattggttgaagtctctagcgacgttgtatttgatgagactaatggatctccaagagagcaagctgttgatcttgatgatgtagatgaagaagatgttccgacggccgctatacgaaccatggtgattggtgatatacgaccacaggaacaaaaggagcaagatcaaccttcttcctcaactttgatgcatcccccaactcaagacgatgaacaggttcatcaacgagaggcgtgtgatcaagggggagcacaagacgatcatgtgatggaggaagaagcgcaaccggcaccaccaacccaagttcgagcgatgattcaaagggatcatcccgtcgaccaaattctgggtgatattagcaagggagtaactactcgatctcgattagttaatttttgtgagcattactcctttgtctcttctattgagcctttcagggtagaagaggccttgctagatccggactgggtgttagccatgcaggaggaactcaacaacttcaagcgcaatgaagtttggacactggtgcctcgtcccaagcaaaacgttgtgggaaccaagtgggtattccgcaacaaacaggacgagcacggggtggtgacgaggaacaaggctcgacttgtggcaaaaggttatgcccaagtcgcaggtttggactttgaggagacgtttgctcctgtggctaggctagaatcaattcgtatcttgctagcatatgccgctcaccattctttcaggttgttccaaatggatgtgaagagcgctttcctcaacgggccaatcaaggaggaggtgtacgtggagcaaccccctggcttcgaggatgaacggtaccccgaccacgtgtgtaagctctctaaggcgctctatggacttaagcaagccccaagagcatggtatgaatgccttagagactttctaattgttaatgctttcaaggttgggaaagccgatccaactctttttactaagacatgtgatggtgatttgtttgtgtgccaaatttatgtcgatgacataatatttggttctactaaccaaaagtcttgtgaagagtttagcagggtgatgacgcagaaattcgagatgtcgatgatgggcgagttgaactacttccttgggttccaagtgaagcaactcaaagacggcaccttcatctcccaaacgaagtacacacaagatctgctaaagcggtttgggatgaaggacgccaagcccgcaaagactccgatggggaccgacggacacaccgacctcaacaaaggagggtctttactttatttatgtgctagtagaccggatattatgcttagcgtatgcatgtgtgctagatttcaatccgatcctaaggagtgtcacttagtggcggtgaagcgaattcttagatatttggttgctacgccctgcttcgggctctggtatccaaaggggtctacctttgacttggttggatactcagattccgactatgctggatgtaaggtcgataggaagagtacatcagggacgtgccaattcttaggaaggtccctggtgtcgtggaactctaagaaacaaacctccgttgccctatccaccgctgaggccgagtatgttgccgcaggacagtgttga

SEQ ID NO: 16388 - DNA, 363 bp, Zea mays
  Clone ID: MRT4577_114945C.1
cacccaagcgttttgtcaagagttcttcttggtaggcaaggcaaaagcagaagcaaaaaaagaaaggccttgttgcccatggggagcttagggttcttgtggacgctttcggaccaccccaagcttcccaaggggaaacccgtggctttcgtcctgcttgaccgattgggccaggcccacccccaccagtacaactgcattcatgttgctcaaacttctgtcatggacttgcttaagaatggcgcttctgagaaatggagacttgtgaaggcttatggaacaactgtgggccttccatcttatgatgacatgggcaacaatgaagttggtcacaatgcacttggtgcttgtccaattttcgcc

SEQ ID NO: 16389 - DNA, 242 bp, Zea mays
  Clone ID: MRT4577_114946C.1
cggacgcagtgggcgcgacgtcgtgcgcaggacgccgtgggcaggactcttgcggatgaagacaagggacttaccgtcctacggagatcaatatgtccatcttaatgtcagcatccgcgaagatttaacgtgtagacagcggtagctgatcgaggaattacggaaagacgagcaaggatatcaccacaatgacgccaaggcagcagctggagcatcaccgggacagccggtcttaggagctc

SEQ ID NO: 16390 - DNA, 990 bp, Zea mays
  Clone ID: MRT4577_114947C.1
gacgacgcggaggcggagcgtccggcggcttcgcgtacctctccgcggcgtcccccgcctacgacgctgcgtgccgccgcatcgccaggtacgccggcgcggcggtgctgtccgtcgactaccgccgctcgcccgagcaccggttccccgccgcctacgacgacggcttcgcggcgctccgcttcctcgacggcgggcccgggcccgaccccgaccccggcgcgatcgcgggcgccccgccgatcgacgccgcgcgctgcttcctcgcgggggacagcgccggcggtaacatcgcgcaccacgtcgcccgccgctacgcgctggacccttccgccttcacgaacctccgcctcgccggcctcatcgccatccagcccttcttcggcggccaggagcgcacgcccgccgagctgcggctcgtcggcgcgcccatcgtctccgttccgcgcaccgactggatgtggcgcgcgttccttccccacggcgcggaccgcacccacgaggcgtcatcccccgacgtcgccaccgcgggcatcgacggcgcccctgatttcccgcctgccacggtcgtcatcggcgggtacgacccgctgcaggactggcagcgccggtactgcgacgcgttgcgcggtaaggggaaggaggtgcgggtgctggagtaccccgacgccatccacgccttctacgtcttcccggagttcgcggagtccaaggacctcatgctacggatcaaggagatcgtcgccagcagcgagtgatgggggacggacggcgtgggcgcgcgcagctgtcgctcagatgcgtggtggatgtatctgcgactgtgctaagtggctagggtcagtgttgtggactggacggtgctgtctagtgtgtgacgtggttcgtcgtgtgggacgcgccacaattaaactagtgttaaataatgatgacgatcggcaatgataattctaattttcgtgttagaaaaaaaaaaaaaaaaaagcggcc

SEQ ID NO: 16391 - DNA, 318 bp, Zea mays
  Clone ID: MRT4577_114948C.1
agagggcaagagggagggtggggcaagaaaagaggagggggaggggccccccaaacacacaaaaagagaggaaagcggtcaagcacgcggagaaagagagctggatagagagagggacacagagacggagggagagggacgagaggacacgacgaagaccctggggcagctgaagaagcggtgagcacagggaaaggaagccagtggagcggaacaacaaacaggagatgggggaagctcagagacccacgggaacaaggagaacggaccagacaagcagacgaagagaaaacaaggacaaggcgggaggctcggaac

SEQ ID NO: 16392 - DNA, 301 bp, Zea mays
  Clone ID: MRT4577_114949C.1
cccacgcgtccgcggacgcgtggtgccccttctctcaccgccacatccgtcctgaggcgaggccacctacccggcgtccactcgttggccggtcgccggcagccggggcgggaccgcgtctcggtgctttctccagcgatcccgccgccccgcgtttcatggcgtaagtcctccagtctgatctaaaagacccccaatcttatgctgctgtactgcgtgaattacatattggcgatatcgcctttgtgtcaagagaacagtgcttgggttttggggttcaacaatggagcagggatctgga

SEQ ID NO: 16393 - DNA, 2362 bp, Zea mays
  Clone ID: MRT4577_11494C.1
aattcggcacgaggtttttttttttttttttttgcatcgttggaagttgactggtggacgaactccgcgccgccgccgtcctggatgacgccgcacgcacgaggtgcaagtgcaaacgaccgcgtccgagtccggatccgccaccaccgcgccctcgccgcactacaggcacgtggagcccatcggcggtgagccggaggctggagcacgcgcggcggtggcggcagcggctgcgcttgcggcggaaggaacggggtggggattcgaatcgaaggagcagcggcgatctactgttcccttgtattatgcccgcaactttacttctcaaagccaaaggtgtgcctacccacccaggcctccccttatgccccgtcccgtccccccttaccttggctctttctcctaaaaaaaaatactctcctatactatactagtgccaaattgcttctgcattctcttcccttcctgcatttcctcctctgtctcatcggggacccctgtccctcgtggcgacggccggtcgaccgccgctgccgaggacttcgccggcgacgaccacccccccgcccactacattatatgttgaagaatggcttggagctaacagtactgacaccaacttttggttatgatcagaagcgactggagtgcagtaatgaatctctaattgtttgcaatataagaaccagatacctcattcaaatggtttttccatgttacagattggtagccaagaacaaagagaaaaacacacaacagtaatgggtcacgaccatatgtctcgtataaagatgcatatggcagaaggttcttttggtgacaggatccggtgccagcaacctgggtgcaatgaggttgtcgatagaagggtagtgtactgcaaaattcacagtggagagttgtcatgccaacagttcagttacctccagagcggactggagagctcaggtttatctgtgcgccctgttaacgacagccaatttaagggatctgtttccattgcagcagtgccatgcactgagcaagagttacatgtcaagcatgaaggtggtgatcgaggtaaactaaaggatagttctgggtacactttgggtcaggctgcacaatttatcttctctggggcaagcatgctttgcaagaacgataactgcagcaagcaagcacacgagaactcaatccactgtaagttgcatagcggcggcgttaacaagggctgcatggcacggggctgtacaagaggtgcgcatggaggcacacctttgtgcattgggcacggaggtgggaggcggtgtgtggtccctggatgcccaaatgcagcatgtggccaaggccgtagcgaccgctgcgtgaggcacggtggcggcaagagatgtaaattcgaagggtgcgcgaagggcgcgcaagggaacaccgatcactgcataaggcacggtgggggaaggcggtgcaggttccaaggatgtacaaagagtgcgcagggacgcacagatttctgcatcaagcatggtgggggcagccggtgcaggttccaagggtgtggcgcgagcgcaaaatggggaacggatttgtgctctgtgcacaggaagagcctgttgggcggtgacaatgccatccctgaagctttggccgccccttcagaaaaacgacgccgggccaagacgccccaaagggaagcgaagccgtccgaggtcttccaagagaatgtcacaacagcagctactgctggtaacagcacacagcacacgggcttccttctcgtagctgcccctgttgctaaccgtgacatactgaccaatggtatggcagtgacggggcaagctgcaatagccccccaacggatagtggcaccgatgttcatgagatcaccaacgccatctggatcagtggctgcctcggcacagaggtgggaggcgggagcaagcaggggtatgctgggtctgtagaaaggtggtataatttgggaaggcttggagacaccttgcccaagatagttctctgattattggctttcagactgagaaacctctgaaacttgacagccttgtgccgtcaacggactctagtgatgtcctgtgcagctgtgctctctcatttgtattgtaaattgtaatgcaaatctctagttgttcttgtgtatgttctcttgtcgccttgtagtagcgtggaaaccggtcgggggaccatctggaactttggatgataagcaataatattgtggcatggcctagctttgcaggtccagttggacttttttaaaaaaaaaaaaaaaaaaaagtagtggacattttacacattatttttttgtaccccacaaatatatggtaagtagagagactctaactctcatcaagatgatgacact

SEQ ID NO: 16394 - DNA, 390 bp, Zea mays
  Clone ID: MRT4577_114950C.1
gagctagttgtgggtacacgcgtcgaagctcggaattcggctcgaggaactttggaaaacctatgttgtgggaccccgggttggcaatggtaatgcgggggagtttaacacagattttgcaacgcaccatacagtttatggcgccagagctgtttggtgaaaactacaacgaggtggaggatatatactttatgggcatgtgcatgctcgagatggagactggagagtgcccttacagtgaatgtcagggctttgtacatatacacaagaagatttctgaaggtttaaaaccagtagttttctccaaggtaaatgatgcctaagtaaggagttttatagagagctgcctatcttcagctgctgattgacagccagctagcgagctcttga

SEQ ID NO: 16395 - DNA, 382 bp, Zea mays
  Clone ID: MRT4577_114951C.1
acgtaagatatacggagatgaaccaagatgatattattagagagtaggaggtactacattggtgttatagaggcgcaagtcgaagatagtgctatatggtgcacatcgaaataaatgcatgtaaggctatagaagcacaggccatctctcaccccatgaataggagggaggctaatatgatagggacggaaagtggcgtaatggcatattctaaaaaaataggctatggtattaccaagatgccacatagtactattgataggaaacaaacggggccttatattttggtgcactttttatttgcacatatacttttacaggttgtctgaaattggtaaaaacacgtgtggtagtacataaatattgttgggaaaaaggctat

SEQ ID NO: 16396 - DNA, 143 bp, Zea mays
  Clone ID: MRT4577_114952C.1
tttcgctgctaacgcaatataccactgtcggcaacgatctgaaatccaacgaagctaagctttttcatccaaatggtgcttgtactgcatgctaacagcgataacacaaatggattggaaaaagtaattgccactaaaatacc

SEQ ID NO: 16397 - DNA, 278 bp, Zea mays
  Clone ID: MRT4577_114953C.1
cccaaccccccaaagaatttagatggcccgggtcccccatagtaaaaccagatagaagttggggggccatggacctccccgctggaaagcatgttttataaggcttcccccagagccgccgccccccttgggactgccaacccccccttcaggaggcccctggccatcaacattaaaaaagccggatgtcctaagtatgaccggggctccaccgtcccctccaaactgaccgggggacatgctgccccccatgctgccttagctccagggccaatcca

SEQ ID NO: 16398 - DNA, 134 bp, Zea mays
  Clone ID: MRT4577_114954C.1
agcgtggtcgagaccactctaagccgcaatttaaggacattggtggcggttcctagctgggcccagagatggacatagctgtgggcagtgatgagaagtgatgcaatctgaattacacatacatacgcacacaa

SEQ ID NO: 16399 - DNA, 242 bp, Zea mays
  Clone ID: MRT4577_114955C.1
atggggccgggtgattttttctatgaaaaatggggcctaaccctgaaatgcacaaacttttcccgaaaggaatcccacttaaaacatggggaacccaagagaaaacctgggcgcacaggggaaatggtatcccccttgctgaaacagaaaaccgaacaggggtaaacaaaaaatacaaacccgggggagaaaaagaaaagactggacccccaaaaaaggggataaactaaaaggacccttat

SEQ ID NO: 16400 - DNA, 389 bp, Zea mays
  Clone ID: MRT4577_114956C.1
aggaatgtgtctcaagaaaaggagttcatcaaagtattttatatactatattatatgatatggtgaattaagtctgatgtaataacagtgtgtaaattaatgtataacgagcgaataacaaaaaaaaaaaaaaaaaaaaaaaaaaaaaaaaaaaaaaaaaaaaaaaaaaaaaaaaaaaaaaaaaaaaaaaaaaaaaaaaaaaaaaaaaagaaaaaaaaaaaagggggggccccccaaaaggttcaagccttacttacgctttaatgaaaggtaaaaccccttcaaaagggccaccaaattcaaattcacgggccttctttttaaaaagccggaacgggaaaaaccttgggtttaccaaacttaagccctttgaaaaaaaaccccctttc

SEQ ID NO: 16401 - DNA, 198 bp, Zea mays
  unsure (1)..(198): unsure at all n locations
  Clone ID: MRT4577_114957C.1
cgcctgcggtaccggtccgnatttcccggtcgaccacgcgtccgggcgggagagtcgccgggaccattcgaggtggcagacgcatgacacctgagtacaggcgtggaagagaaggtggtttgtgttgcgcagtggccgtttgactggagacccggatgtcctggagtnttacnnnntcgatcctgcctggatgcctat

SEQ ID NO: 16402 - DNA, 558 bp, Zea mays
  Clone ID: MRT4577_114958C.1
ggggggttttttttttttttttttttttttttttttttttttttttttttttttttttttttttttttttttttttttttaaaaaactaaaaagggcctttcttatttcgggggccccccaaacctcatccaaaaaacttcatttttgaaccatagcccataagccatctaaaagggggccccccccaggggggggtggggggaaaaccccggggggtttgccaaaacaaggggggtgaagggcaccaattggtgcagttgtaaaagggggcccgcgttaggcatagcgggccgggaaaacggcaacaactgttgttgggtcaaaaaggcagcagggcccacatcaactagctggctgaatgggaaaagttgttgctgctgtaaaaaaaccccaaagttcaatgctgctagttgggtgaaaggaaaaaaatgctggggggaggcaacaactaactggctgaaagggaaatggtggtgcaaaaaacccgcaaagttcaatgccccccgttggttgaatggaaaaaaccgatgttgctgaaagaatccaccaagggttgc

SEQ ID NO: 16403 - DNA, 1134 bp, Zea mays
  Clone ID: MRT4577_114959C.1
atcttggcaatgggttatctatggaagtaaagcttatgaaaaggagggaggaaatgcttgtaagataggagcaagagataagaaaagctcttatatccaagaatggtaaaagcgaggaactcaccactcttcagcaacagctacagtctgcaagagaagaagcatcggctgctgtgaagaaactcaaagaagctgaatccgaaacacaagagttacatacaatgacacgcaggatgatcttaagcaaagaagaaatggaagaggttgtcatgaagaggtgttggttagcccgttattggggtttggctgtccaatatggcatctatccagacatctcaatgtcaaaacatgaatactggtcttcacttgcacctcttccatttgagtatgtaacatctgctggacagagagccaaggatggatccgaagcagaaggtaatggtttggaagacgtggacaagcttgttcatgatttgactgttacagcaggggaaggcaacgtagaaaccatgcttgctgttgataaaggacttcaagaactagctttcctgaaggtggaggatgcggtactttttgcccttgcccaacaccatcgtactaatgttgctggagcagctgatccagatattaaatcatctggggatgaaaaattcactgaggcatttgacctaagcaaggaggaggaagaagatgtacagttcaagcaggcttggctcatatatttctggaggagggctaagaccaacaacgtggaagaagatattgccgaggagcgattgcacatgtggatcgatcgacacggccagcaaccaacgtcacatgacgctgtggatgttgagcaaggcatacacgagctgaggaagcttggcatcgagcagctcctgtgggagctctcccgccacgaggcgaaccttgccaaagacagtccatctgatgtcgaggacctgacctaacagtaacagcctgagcggacgacggtggccatctcccacccaaatgcagtccaggctccagccatatatttgtatatcatacagataactgggacatgtaaacattttttgtggttttggtttttcagctttgtcacaaacagttcactgactctccccgatgtacataacttccaccccc

SEQ ID NO: 16404 - DNA, 697 bp, Zea mays
  Clone ID: MRT4577_11495C.1
ggccggggacgagccgacgagggattgtttttttttctttctgcacttgcacttctcaaaggcaagccgaagctgcccttgcccactcttcttctcctctcccccctctttctactaaaaaaatactcctccccacactaaactagtgccaaattgcttccgcattccctccctgcattcccctcctccgagtatccgacccatcggcggtcctctccctcgtggcgacggccgctccaccgccgctgccgagtgggtcttggccggcgacgaccgcccaccggatacagcagcaggctttatgctggaaacttctgcagaaaaacacacaacaataatggggcacgaccatatgtctcgtataaagatgcatatggcagaaggttcttttggtgacaggaaccggtgccagcaacctgggtgcaatgaggttgtcgatggaagggtagtgtactgcaaaactcacagcggagagttgtcatgccaacagttcagtcacctccagagcggactggagagctcagtaccatgcactgagcaagagttacatgtcaagcacgaaggggatgatcgaggtaaactaaaggatagttctgggtacactttgggtcagactgcacaatttgtcttccctggggcaggcatgttttgccagaacgatagctgcagcaagcaagcacatgagaactcattctac

SEQ ID NO: 16405 - DNA, 446 bp, Zea mays
  Clone ID: MRT4577_114960C.1
ccggccgggccatcgctgatggcaaggccagccaggaggatatcaagaaggccgtttccaacgccaagttcaacctcctgagccagaacgacctccgacaacccagcgttgtcctcgccggtactggcattgtcaactccggcaagccttatgactctgctgctcttgccaaggctattgacggcgtttccgccgagtccgtcaaggctgctgccaaggccatgcttgagggtaaggccaccgtctctactgtcggtgacctgtttgtgctgccctacgctgaggatattggtctgcgagtataaaggggggtccaagaaagaaaaaagcttgtaccaacagtcaaagtttagaagaagccgtgggagaggatgtcctctttgtgaatatttgtagtagaaatcttttgaaccattcccaaaaaaaaaaaaaaaaaacccgcggcc

SEQ ID NO: 16406 - DNA, 359 bp, Zea mays
  Clone ID: MRT4577_114961C.1
ccctccttttttatttttttttttttttttttgggggttttttttttttttttgggtttttcccccaccccaaaaaagccctttctcactgtggggaagccccaaacatcatccaaaaacctttatttttgccccttaccccataagaaatgtaaaagggggccccccccaagaaggggtctgggtacaatgctggtgggtctgccaaagcaggtcggttgaccacaggtagcaccagttgctgcaggtgttttgccctgatggtcttgcccaatgactgcaccaaaaatagggccggggattgtggaaacaacaagggccataaaggtatgtcccctgctgccatggcttggccaaac

SEQ ID NO: 16407 - DNA, 184 bp, Zea mays
  Clone ID: MRT4577_114962C.1
gtccacttatgatgtatccatccatggtttgattgaattgcaaccgctacagcaacccggtgggaaccatgggcccctttttcttgaagcagggggaccggcggaagctggggaccaccgaaaagcgggcgctggccaaactgatggcctcctccggctacacgttccctgggttggtgcaccc

SEQ ID NO: 16408 - DNA, 371 bp, Zea mays
  Clone ID: MRT4577_114963C.1
ggccagtagggacaggtggcggtgggggcgcagtctgcgctgggcgcaaagaagcgcgggcgcacggcgggggacaaggagcagaatcggctgaagcggttgctgaggaaccgagtttccgatcagcaggcgcagtagcgggagaatgcgttcattacggaactggatgtgaaggtcaatggcctggaactacgcaatgcgtaactggagcagattgtgtgcactctacaaaacgagaacaacacgctccgccagattctgaagaacacgacggcgcacgcgagcatgacgtaccgcggcctccgcggctgccacggtaaggtctgatacggcggcttgaagcaccacctcgtcatgagctagtgagaaac

SEQ ID NO: 16409 - DNA, 199 bp, Zea mays
  Clone ID: MRT4577_114964C.1
ggccttcgtcgtcatctgcgacggggacggccacttcgagctcggcgtcaaattcgggaagggggttgtcaccaccatccgtgtcgccatcatcctggccaagctttagctcatgcccgttaagatgggctactgcggaaacaagatccgtcatccgcacactattccctataagggcaccagctagtacatatccttt

SEQ ID NO: 16410 - DNA, 412 bp, Zea mays
  Clone ID: MRT4577_114965C.1
ccttgtatctttgttcgacgcacacccgagcatgaagaaccgaacagtgtgccatgggcttgtccctctagatagaggccatgaccgggctgtgttgcgcgccggccgccgcgaggttgccctggatgaaccacccggtcaagagcgactggtcgctgaagctgctccatcaatggccactgagaactgaaggtgactcagaacctgtcccgtagggcctacaagatgcaaagggtcgagcagaagctcgatatcgactttgttatgtccaccgtgtacagcttctacatgaacggactcaatggcgtcggcgaccaggcattggaagagtcaggcgggatatctaccaaggtcaaatctaacagaagccacgggagcttactactaggaatggatgattacaggaggcaag

SEQ ID NO: 16411 - DNA, 408 bp, Zea mays
  Clone ID: MRT4577_114966C.1
aataacactacaaataatatgatatttaaaaatgataaacaatatctaataattaagtattgggaacaaataactaatacattagtgtcctgtaaagaaaaacttgctcatcaaatgggagtgctaacattgactctaaatacccatataacttgttgaatactctgaacgggctaaatcctgttgctgaagcccatgatttggtagtacatgcacaaagatccttgatggtgccgcgggcttacatgagaggggcttgctagcggatgctgctctcctccttcgcgagcatgtttgttatgactatttggaaaatctgtacacacctgatggaggctattgggaactttaaggcttctaccgaagtattctgtgatttgtttcaaccacacaatcagggtcacgaac

SEQ ID NO: 16412 - DNA, 140 bp, Zea mays
  Clone ID: MRT4577_114967C.1
cttatatgcaatgcatatatcatggtgcatatcaacatgacaacaaccatcacggacgcgttgttgcagattagacagtgagggacaccagccaccgaacaacttagttttccttttactctaacgactacctatttggt

SEQ ID NO: 16413 - DNA, 168 bp, Zea mays
  Clone ID: MRT4577_114968C.1
ctgtttttaaagcaccatcaacacacgagcccaacccaatgttatggggagccaaagaaacaacaatcatacctcctatttggttagcaccaaccataagaatcataaacacaacttctttctgcctccaaaaacatctctacttacataatacatcaactcatcaat

SEQ ID NO: 16414 - DNA, 296 bp, Zea mays
  unsure (1)..(296): unsure at all n locations
  Clone ID: MRT4577_114969C.1
cccacgcctacgtaccaactagcatcttattatgcacaataccgnaccaacaagggcaggttaaatatttaggggccttagtctcctaggtctttctgcaagtgctgctaccacaaccacttttccacaatgctcacaagctcctatagcttcctttcattccccataccctttaccagcggcatcttcagtttattaaaaccctaattttaaaccctacacgatccaacattcaatcccaccatgcatcttacatctatcacccatgttccttcaacaacctatatgcctattac

SEQ ID NO: 16415 - DNA, 2032 bp, Zea mays
  Clone ID: MRT4577_11496C.1
tcctcctctgtctcatcggggacccctgtccctcgtggcgacggccggtcgaccgccgctgccgaggacttcgccggcgacgaccacccccacgcccactacattatatgttgaagaatggcttggagctaacagtactgacaccaacttttggttatgatcagaagcgactggagtgcagtaatgaatctctaattgtttgcaatataagaaccagatacctcattcaaatggtttttccatgttacagattggtagccaagaacaaagaggttagctagtggtgatatgcgataaagttttcatatatacaacaataaagctgagaattgtggtctgcaaataatacagttttccttctccatatgtattgtacttagagcaaccaatcttagtgattaacatggccagtttaacccgattctcaaacacccaaattgtgctatttcacaaattacttgatcatcaaactatccttttgtctgtttaaacatatccatttaccctccattcgggtctatgtttgggtttgggagccttatttggatcctggcattctccataaccggtcatatatctactgctgctgatattatatctctgtttcattatttcatagttttatatttgaacttctgcagaaaaacacacaacagtaatgggtcacgaccatatgtctcgtataaagatgcatatggcagaaggttcttttggtgacaggatccggtgccagcaacctgggtgcaatgaggttgtcgatagaagggtagtgtactgcaaaattcacagtggagagttgtcatgccaacagttcagttacctccagagcggactggagagctcaggtttatctgtgcgccctgttaacgacagccaatttaagggatctgtttccattgcagcagtgccatgcactgagcaagagttacatgtcaagcatgaaggtggtgatcgaggtaaactaaaggatagttctgggtacactttgggtcaggctgcacaatttatcttctctggggcaagcatgctttgcaagaacgataactgcagcaagcaagcacacgagaactcaatccactgtaagttgcatagcggcggcgttaacaagggctgcatggcacggggctgtacaagaggtgcgcatggaggcacgcctttgtgcattgggcacggaggtgggaggcggtgtgtggtccctggatgcccaaatgcagcatgtggccaaggccgtagcgaccgctgcgtgaggcacggtggcggcaagagatgtaaattcgaagggtgcgcgaagggcgcgcaagggaacaccgatcactgcataaggcacggtgggggaaggcggtgcaggttccaaggatgtacaaagagtgcgcagggacgcacagatttctgcatcaagcatggtgggggcagccggtgcaggttccaagggtgtggcgcgagcgcaaaatggggaacggatttgtgctctgtgcacaggaagagcctgttgggcggtgacaatgccatccctgaagctttggccgccccttcagaaaaacgacgccgggccaagacgccccaaagggaagcgaagccgtccgaggtcttccaagagaatgtcacaacagcagctactgctggtaacagcacacagcacacgggcttccttctcgtagctgcccctgttgctaaccgtgacatactgaccaatggtatggcagtgacggggcaagctgcaatagccccccaacggatagtggcaccgatgttcatgagatcaccaacgccatctggatcagtggctgcctcggcacagaggtgggaggcgggagcaagcaggggtatgctgggtctgtagaaaggtggtataatttgggaaggcttggagacaccttgcccaagatagttctctgattattggctttcagactgagaaacctctgaaacttgacagccttgtgccgtcaacggactctagtgatgtcctgtgcagctgtgctctctcatttgtattgtaaattgtaatgcaaatctctagttgttcttgtgt

SEQ ID NO: 16416 - DNA, 491 bp, Zea mays
  Clone ID: MRT4577_114970C.1
taggggccttttttttttttttttttcttttttttttttttttttttttttttttttttttttttttttttttttttttttttttttttttttttttttgaaagaaaaggtaaaaccaaaaaaaacccccggggggggccccaaaatacaggggggcaactaaaaggaaaaaaaaaaaaccccaaatatgctgggcaactgaaggtagggacaaactaccccctaatatatttattaggcccacagaaaaccctgggggacgccccccccccaaaagttgaaaaccagggggaacttaacggggacgtcgaggttgacccccaaaaccttgcccttgagggcgggggaaaggaaaacggcgccccccaggccggggaacccgtaccaaaggggggaccaaaagtcggggggaaccttggcgatggaccccttgacaaagcccagaaggttggcgcacccccccagtttcaacgcgttcttgggctacttgc

SEQ ID NO: 16417 - DNA, 661 bp, Zea mays
  Clone ID: MRT4577_114971C.1
cttgatgcctgacgttaaaatccaactgaattcccacaggctttgaactagctgatgacatgcttgattagcagtttagcatttatttaatctagttctactgtcttgttgtcctgcataacaatattagcaatttatcttattttaatcttatcagttatcatctgtatgaccatggattttattacctcaccccctaaactcttgctatagtcactgacagcagcctacaagtttggcattctaataattcctggagttcaaaacttgaaatcaatgtggcgcactgctgctttgctgtataatccaagggaagtgatctttaccttttacttttagaggaaacatccttgattttgattgcttgtactgctgtcctgctagacagctatagtgtactgctgttgagctacagctatattatatatatatatatacggttctgttataggtggacgactataggacgactaggagtcgactaggctcgactaatcgagtaaatcgacgactaatcgtgattagtcaccttatcggtggtcaggcgactagagtcgactagccgactttaaaaccttggtttgaatcgtgttatttgctttaaaatatgtattcatgtaccgattagaaactttgtattatgtacaaataattatttttt

SEQ ID NO: 16418 - DNA, 167 bp, Zea mays
  Clone ID: MRT4577_114972C.1
cataaaaagggaaatatttatattcagttctaataagagacataaattaatacatagtcaaaaaaaaaagtccttggttaataaaacaataacttggtagctattggtagccgaacacccttggtgttcaatgacaaggggtggttgaaatcttatcattagcaaga

SEQ ID NO: 16419 - DNA, 386 bp, Zea mays
  Clone ID: MRT4577_114973C.1
ctcagatttttattgttgaatgagtgaaaaaactgaaggctacatttgctttgcacattaatgagttcaaaaaccttccagttctgtaccatgatgttggaaagttaaatagtggaaggaaaaccgcacaatttaactggagcaagaacatgtgtcaaatagtacaatttacatcctagcaaatttagtttactacgccttttgttggtataacacagttttctatacatatgcctgaggccgccatccttatgatggaagtcggataaatttttttttccattatgaaatcacgaaagggaaaggcgggcttggtgcagcggtagagcctaccgtctgtaaccggaaggtcccaggttcgagccccaacctctacatattatgcg

SEQ ID NO: 16420 - DNA, 1692 bp, Zea mays
  Clone ID: MRT4577_114974C.1
ggacgggtatgctgacaatggtaacgccacggaggctatggctttgttctggaggatggtccaggagggcatggatgtgacggatgcgtctgtgttggcagcactacaagcgtgcggggagcttggatatctcgatgaggtgaggcgtgtccatgagctacttgtgagagttggcttgagctccaatgtgtcggtgacgaacgcgcttatcaccacatacgccaagtgcaagagggcagacctcgctgcccaggtgttcaacgagctgggcaataaaaagacacggatctcatggaatgccatgatccttggcttcacgcagaacgaatgccctgaggatgcagagaggctcttcgctaggatgcagttggaaaatgtgagaccagattcgttcaccctggtcagcgtgattcctgcagtcgcggacatttctgatccgctgcaagcaagatggatccatggatattctatcaggcaccagctagaccaggatgtctatgtcctgacagcccttattgacatgtactccaaatgtgggcgtgtcagcatagctagaaggctcttcgattccgcaagggacagacatgttatcacctggaatgcgatgatccatggttatggttcacatggttttggccaggctgcagttgagctatttgaagagatgaagggcactggcagtttgcccaacgagacaacattcctctcggttcttgcagcttgcagtcatgctggtttggttgatgaagggcagaaatattttgctagcatgaagaaggactatgggcttgaacctggaatggagcactacggtaccatggtggatctacttggacgagctgggaagctagacgaagcttggtctttcatcaaaaacatgcctatagaacctggcattagtgtttatggtgcaatgttaggtgcttgcaagttgcacaagaatgttgaattggctgaagaatcagcacagataatctttgagctgggcccagaggagggggtgtatcatgtccttttggcaaacatttatgcaaacgcttcaatgtggaaagacgtcgcgagggtgaggactgctatggagaagaaaggactccagaagactcctggatggagtattatccagctcaaaaatgaggtccataccttctactctggaagcacaaatcaccagcacgcgaaggacatatacgcaagactggctaagctcatcgaagagatcaaagatatgggctatgtgccagacactgattcaatacatgatgtggaggatgatgtcaaggcacagctgcttaacacccacagtgagaagcttgctattgcatatgggctcattcgaacagcccctggcacgacaattcagataaagaagaaccttcgagtttgtaacgactgtcataatgcaaccaagttaatatctctactgacaggacgggaaataatcatgagagacattcaacgctttcaccattttaaggatggtaaatgttcatgtggagactactggtagtgaaatgttgaaggcagtctgaatatccatttccgagatgatatacagctgctatacaagtatacaattagactaacaggtaaagctaactattctatctttttcaccgaccatgttttgaatttgatcgggggcattcgatatgttgatttaatgaggaatgtataccatgttcttttatagtc

SEQ ID NO: 16421 - DNA, 369 bp, Zea mays
  Clone ID: MRT4577_114975C.1
cccacgacctccgcgcgcgtcaagcgctggctcctcagagaggaggtgaacaacatattggcctgactacagctgcggacacggcgtgagcggcactagcgcctgaaccaatgggcggcgcggatagagggcgccagcttcccccgagtcccgatgagatactacgctctgttgcaagcccagccgacagtgcaggctctgggctgctacctgttcaaggtgcaaaacgagaagggcgcctttttactatgctggcaggagcgcgccatgttttacgtctcctcctggcgcgcacggagcttagagtggaggaggaacgcgttgacgccttcccgtctctgatcagaggatgacacggcccgaccgaca

SEQ ID NO: 16422 - DNA, 936 bp, Zea mays
  Clone ID: MRT4577_114976C.1
agctctttctattcgcgtctcccggccacccgaaccagcgctcggccggccggccggggaatcttccttggcacaccaccgatggcgccactcctcttcgtcccgaacaaaaccttggcaccaccgatcctccacgctcgccaccgcttcgcgcccagacccccatccgccgcggccttcctccgcagattttttcccaccaggccaccggcggcgaaggctgacctcctccgcctcatcgccgaccagggccgcggcctcgagacgcagtccgccccttcccgcctcgctgacatcgtctcctgcatcgacgcgctcgccgccgtatcccccggcgcagacaccgtatccgacgccgccaagctctccggaacctggcgcctcctctggaccaccgagcaggagcagctcttcattgtgcgcaacgccccattcttccgcactgccgccggcgacgtgctccaggtcatcgatgtcgccggcggcgcccttaacaacgtcatcacgtttcctccatcaggcgcattcgtcgtcaatggcgacatcgaggtgcagccgccccagcgagtcaatttcaggcaggttcacacgcgctgctctgagagggagcaactgggaggttccctttccgccgtttggaaaaggatggtgagtgcaacactgcaacatgttcactccttgatggtagcttattatagtactccaatcttttttaggaacacgaggggacagcgccttatgtatggttgcaattaaatcattttagcacacaggaactagaagtctagaatagtaacacaagtttagcaacctggaacataagttcatgtagatcagaaggaagtttgtgggcgtatcattcagttaaattgaatggatgagtgaaaaaaggacatatgcttcctcgtgggatcattggtagcttctaattttcac

SEQ ID NO: 16423 - DNA, 368 bp, Zea mays
  Clone ID: MRT4577_114977C.1
attcggctcgagctcattgatcttatatggctctaatatatccaactatctaatctacttacgcacgaacatgctcaacatatacatgctgctgccgctcgtcctgactctcgcgatggcctacacccccacctcctagacgaggaggacgtacatggcccacatggccaagtcggggacgcccgccaagctcgctaaccacgccaggcggtacaggtcatcggtgaactccgtgtacgactaagactactgcaacatgatgctgtacgcgttctacacctgtctgtacggttcttccgcgcgcctcacgccgtaggaggccagcaacctggcatatcgacggggagtgctcgccttcaacccggatg

SEQ ID NO: 16424 - DNA, 162 bp, Zea mays
  unsure (1)..(162): unsure at all n locations
  Clone ID: MRT4577_114978C.1
accacgcgtgcgcccacaactgatgaaactagatcttttgttcccccgactatctcacattcgcgaaattactagactcctgggcggcctncgctatataacacaacatacctttccagcctcttcaaacttcccacattacaacctgatttgctttaacaa

SEQ ID NO: 16425 - DNA, 936 bp, Zea mays
  Clone ID: MRT4577_114979C.1
cgaagattgccacttccctaacagcatcgagaaggcaatcagaagcgcttttgtaaaggccgacaatgcaattgcggattcccattctcttgaccggaattctgggaccacagcattgacggtccttatatttggcaggacactgcttgttgcgaatgccggtgactgtcgagctgtattaggaaagcgaggccgagctgttgaactctctagagaccacaaacccagctgcatagttgaaaggctcagaatcgaaaacctgggtggtaccgtctttgatggctacctcaacggtcagctggctgtagcaagggcaatcggtgattggcacatgaaaggctccaagggctctgtatgccctcttacaccagaacctgagtttagggaggttaggcttactgaggaagatgagttcttgataataggctgtgatggcctttgggatgtgatgagcagccagtttgctgtttccatggtcaggaaagagctgatggaacacaatgatccacaacggtgctcgcgagagcttgtccacgaagcgcttaggcgcgactgctgtgataacctaaccgtagttgttgtgtgcttctcagcggacccaccccctcaaatcgagatcccaagattccgagtacgaagaagcatctcaatggaagggcttcataggctgaggggtgctcttgacagtaatatctgaagcttaaaagtgtcccttcggctgtaacttctgtcgtcgttgtgatttatatgtaccggtcaccatttgattgttggatgctcacgatgtaatcgagcaattaaccgacattgttctggtacgaatgagagttataggagttgatcatttttttctctggttcagaattccacttgtatgattggatgagctccctgtttattatgaaaactaaaagataatgatgtcattatgggatg

SEQ ID NO: 16426 - DNA, 327 bp, Zea mays
  Clone ID: MRT4577_11497C.1
attcggctcgaggcggcatgacctgttgttcagcgggcggcggtatgacaagggcggggaggatatatcaacgtaggttatgaagaaatagtcaatactaaggtgcttgtttttaatggacaggctgatgagaaatgtaatgagctgggacaccatgggggaaaagtgcaaggatgaatttttgaagtctgatctggggtaggaccagagcggtgccctagagacgaaaactgccaagggtgctagccaagacagtgtgccggggcactgcataccatgtgcatcatgggatgaccttatggactagtgcatggagaagggagcatg

SEQ ID NO: 16427 - DNA, 644 bp, Zea mays
  Clone ID: MRT4577_114980C.1
ttccatggtcaggaaagagctgatggaacacaatgatccacaacggtgctcgcgagagcttgtccacgaagcgcttaggcgcgactgctgtgataacctaaccgtagttgttgtgtgcttctcagcggacccaccccctcaaatcgagatcccaagattccgagtacgaagaagcatctcaatggaagggcttcataggctgaggggtgctcttgacagtaatatctgaagcttaaaagtgtcccttcggctgtaacttctgtcgtcgttggtatgttgaagttttgctccacccattggtgttttgagatagtctcagaataagttttgtagaattattttggaagaaaattttgttgaggtgtaggctaattaatctttttttgttgaggcagtgatttatatgtagcggtcaccatttgattgttggatgctcacgatgtaatcgagcaattaaccgacattgttctggtacgaatgagagttataggagttgatcatttttttctctggttcagaattccacttgtatgattggatgagctccctgtttattatgaaaactaaaagagaatgatgtcattatgggatgaatcatgtgtatggcttggtaaaaaaaaaaaaaatataaattaatttaatat

SEQ ID NO: 16428 - DNA, 431 bp, Zea mays
  unsure (1)..(431): unsure at all n locations
  Clone ID: MRT4577_114981C.1
gacggatgcatccacgcgtgcgattcacaatgcttatgccttactgtaaattactcggaccagcttgtgactaccggaggtctatctccttagctgacgagaacacgctgctctatacgcgtctgctggcgaggtaatccgtaagaagctgtcgctttccctactagctgttagatccaattctacaacttcaatgcaatgcaagctccatccttcaccgctcagggaccagagagacacagagacgtcctgtaaggccgggcctgctctacacactggtgaccaaggaatggcattactctgaactagagacacgtntcttgattaacacgacaggaccaaggccagcagacggaacgatttaagctgcgatactagagctgacacagaatgcgctagatcttgtctctgctgatcagactggtcacttc

SEQ ID NO: 16429 - DNA, 700 bp, Zea mays
  Clone ID: MRT4577_114982C.1
gaaagcctttctaaggtatgaagcgtgccaagttctcaatcaagtacacaggcagaatatgaattatgaagtgctttcagttattcagaagttgaaagcaatctctatcagctacacgtatacgtaaaatcatctgccttgctctacagggtagtaaacacatgtgggagcctcgagccttgtcatcttcctgtacctgcggtggtcgcaaccacgcacaaataacaaattcacggcaggtccacccgctgttaaataaaaaaagacacaaaaaggaaaaaaggcagccaacttgtgtgctactatcatctgtcaggaccggaatttaagcggacaagcggtgcggagataaattagctcatcagcgtgcccgtgcgccgggtctacctgtcggttggacgatggcgagctcgccagtcgccgctcagaattgtagcatgatgatgatgatatgacatatgattgagaagtggcccggtgcagcttgcaccaaagtacagcaacctccactgcgggccgatgggtttgtttgaccatgtgtcacagcttgctcataccaaccacgtcgccggagccggcgacggcggtgacggtagaggagtggcggcgaacgaagtcggccacctgcgcggtgaactccgcggcgcagttgggcttgaacagctccatggcgtggtacccggcgccgtcgagcctggcc

SEQ ID NO: 16430 - DNA, 373 bp, Zea mays
  Clone ID: MRT4577_114983C.1
aagactctagagtgagtcgtattagtgatattacctgtgatgatcggttgagttatgtcgccaataatcttgcgtgtcattcgtacatcctggtggcgatcgcgtccacgctccgtacggtgctcgcacaccacattaagtctctatggcgatgcagatggtcgcctgcgccgtactcaccgttggcgccactgccaccgctggtcgtcgcgaactatgccacggcgcccgaatcaagcagcttctctgcaggcgattacccggacttacgcaccttacttagctcctcattgcgcaccatcggcgcatattagtcgtgatatttctccaggacgctctgagggagatgctgcaggctgcaactggatgtatg

SEQ ID NO: 16431 - DNA, 883 bp, Zea mays
  Clone ID: MRT4577_114984C.1
ggaagaaacagaacttccattatgatagcatgagtagctcttgacatcatcaaaccagactgggaaccgacgcactaacactaccatacaaaatctgattccttcgaagcaaacaagctgcaatgcagtcacatgtaaattttacaaagactgaggcctttaggctgttctgtattacaagatcactttcttcaaaaaaaaaaagtatagctcaggtgcgcctatgcaacccacgccctacctacattacactggaagtcactttggtccagctttaccgaatgaatcacggagggtgacagttctgttgaacacgagcttctcaggagtggagtccgtgtccacggcgaagtaaccaagccgctcaaactggaacttgtcgcccagaactgcagtggcaagcgatggtacagcataagcgtcctttatcacctctttcgagtgcgggttaagatcaccaagccaatcctccaattcagcaggattctctgacatgaacaatttctcgaatagtcttacttccaccttcaatggttcgacaccaggtgctggctcagcaacccagtgcagaacacccttaagtttagaagtcttcaaaggatcatattctgctcgaatttcaacaatatcatcaggagtatcaccatagataacgtctgtgcattttatggggaacgcataccttagcatgacagatttaccaggggccagcccatagtagtcttttgagtccttaaggcgaaaatcagttttctcaatgtagacagttcttgagaacggaagcttatagtgagaggaagcatcagtatcagaagcatctggccacattttcccacggacgcgtgggcggacgcgtgggcggacgcgtgggcggacgcgtggg

SEQ ID NO: 16432 - DNA, 2826 bp, Zea mays
  Clone ID: MRT4577_114985C.1
cctactggcttgtcgactcaaatccgccccccgtccacatgctggccactggtggggtggcgatccctgctatgtctccgccacgagcagccctgcccagcttgaggatgcccccccttttctgtccactcctgagcctgacgcccgtggcgctcaccagtccgcagaagcagttgacgctggctggtctccggcgacggggagtatcatcaactgcaataaattcctttattcgtggaatcgggataacgagaagtgacaatagcttaattcgtgttgatcgtctagaatatcacatcagggaggagcttaacaaaacagcccctcgaaccatggttgttttgcgacctctaaaggtggtaataactaacttggaagaaggaaaagtactagaccttgatggcaaaatgtggcctgatgcttctgatactgatgcttcctcccactataaggttccgttctcaagaactgtctacattgagaaaactgattttcgcctaaaggactcaaaagactactatgggctagcccctggtaaatctgtcatgctaaggtatgcgttccccataaaatgcacagatgttatctctggtgatagtcctgatgatattgttgaaattcgagctgaatatgatcctttgaagacttctaaactgaagggtgttcttcactggattgctgagccagcacctggtgtagagccattgaaggtggaagtaagatttttcgagaaatacttcatgtcagaacatcacactgcaggaaaatgaagacaaagaaatcataaaccacctcccagaaaaggtgagcagttgccactgctgccccaccatctgaggaggaattgaacccgtacactatatttccccaaccagaggaaaacttcaaggttcatacagaaatatttttcagtgatgggaacatatggagagcgcataacacaaaggaaattttagaaaaacatcttaaagcaactggaggaaaagtgatgacccgttttccaccagaacctaatggatatcttcatattggtcatgccaaggctatgtttattgattttggtctggctaaggagcgaaatggccattgctaccttagatttgatgacacaaatccagaagctgaaaagaaagaatacatagatcacattcaggaaatcgtccattggatgggatgggagccctacaaagtaacatacacgagtgactatttccaagctttgtatgaacatgccgttgagttaatacagaaagggctagcatatgtggatcaccagactgcagaagaaatcaaggaatacagggaaaagaagatggatagtccatggaggggtaggccaattgaagagtctctgaaattatttgaagacatgaggcgtgggttgattgcagagggtgcagcaactctccgtatgaagcaggatatgcaaaatgagaacaaaaatatgtctgacttaatagcatatagaataaaattcaccccccatccacatgctggcgacaagtggtgtgtctatccgagctatgactacgctcattgcatggtggattctcttgaaaacatcacacattcgctgtgcacacttgagtttgacatacgtcgcccttcatactactggctacttgttgccttgggcctttatcaaccatatgtgtgggaatattcgaggctaaacatatcaaatactgtgatgtctaaaagaaagttgaatcgacttgtgacagagaagtgggtagatgggtgggatgatccccgcttgttgacactggctggactccggcgacggggagtatcatcaactgcaataaattcctttatccgtggaatcgggataacgagaagtgacaatagcttaattcgtgttgatcgtctagaatatcacatcagggaagagcttaacaaaacagcccctcgaaccatggttgttttgcgacctctaaaggtggtaataactaacttggaagaaggaaaagtactagaccttgatggcaaaatgtggcctgatgcttctgatactgatgcttcctcccactataaggttccgttctcaagaactgtctacattgagaaaactgattttcgcctaaaggactcaaaagactactatgggctagcccctggtaaatctgtcatgctaaggtatgcgttccccataaaatgcacagatgttatctctggtgatagtcctgatgatattgttgaaattcgagctgaatatgatcctttgaagacttctaaactgaagggtgttcttcactggattgctgagccagcacctggtgtagagccattgaaggtggaagtaagattattcgagaaattgttcatgtcagagaatcctgctgaattggaagattggcttggcgatcttaacccacactcgaaagaggtgataaaggatgcttatgctgtaccatcacttgccactgcggttctgggtgacaagttccagtttgagcggcttggttacttcgccgtggatactgactccacacctgagaaactcgtgttcaacagaactgttaccctccgtgattcgttcgggaaagctggacccaagtgactgttcagtgtaatttagggagggcgctggttttgctcggttgcagaggcgcacctgagctatacttttttttgtgaagaaaatgatcttgtaatacagaacagcctaaaggcctcaatctttgtaaaatttacatgtgactgcagtgcagcttgtttgcttcgaaggaatcagattttgtatggtagtgttagtgcgccggttcccagtctggtttgatgatgtcaagagctactcatgctatcataatcgaagttctgttt

SEQ ID NO: 16433 - DNA, 222 bp, Zea mays
  unsure (1)..(222): unsure at all n locations
  Clone ID: MRT4577_114986C.1
tngcaacgcatcnacacnnncccaaaacgcagcagcacnncntctttcatccacntnccaaatngcagaaggaccagggaacagagagacccntcgttttcagnncggaacnggcgagancaatggacgccgccggggaggcctcgncgccgtcgtcnccgtcgaagcngcggganaagcngcggacnacggtgtgctgtngcntcggcgcggtcgcnggcc

SEQ ID NO: 16434 - DNA, 1242 bp, Zea mays
  Clone ID: MRT4577_114987C.1
cttaatagcatatagaataaaattcaccccccatccacatgctggcgacaagtggtgtgtctatccgagctatgactacgctcattgcatggtggattctcttgaaaacatcacacattcgctgtgcacacttgagtttgacatacgtcgcccttcatactactggctacttgttgacactggctggtctccggcgacggggagtatcatcaactgcaataaattcctttattcgtggaatcgggataacgagaagtgacaatagcttaattcgtgttgatcgtctagaatatcacatcagggaggagcttaacaaaacagcccctcgaaccatggttgttttgcgacctctaaaggtggtaataactaacttggaagaaggaaaagtactagaccttgatggcaaaatgtggcctgatgcttctgatactgatgcttcctcccactataaggttccgttctcaagaactgtctacattgagaaaactgattttcgcctaaaggactcaaaagactactatgggctagcccctggtaaatctgtcatgctaaggtatgcgttccccataaaatgcacagatgttatctctggtgatagtcctgatgatattgttgaaattcgagctgaatatgatcctttgaagacttctaaactgaagggtgttcttcactggattgctgagccagcacctggtgtagagccattgaaggtggaagtaagattattcgagaaattgttcatgtcagagaatcctgctgaattggaagattggcttggcgatcttaacccacactcgaaagaggtgataaaggatgcttatgctgtaccatcacttgccactgcggttctgggtgacaagttccagtttgagcggcttggttacttcgccgtggatactgactccacacctgagaaactcgtgttcaacagaactgttaccctccgtgattcgttcgggaaagctggacccaagtgactgttcagtgtaatttagggagggcgctggttttgatcggttgcagaggcgcacctgaactatacagtttgtgaagaaaatggtcgtctaatacagaacagtttaaaggccttactctttataaaatttagggttttttaatctggtgccctcagttttggtgatgtgttcatttgtaccccttgtttacttcgaatcagattttgtatgatagtgttagtgtcataaaaaaaaaaaaaaaaaagcggccgattctaccgtctgt

SEQ ID NO: 16435 - DNA, 439 bp, Zea mays
  Clone ID: MRT4577_114988C.1
cgctactaagcgaaaaacgaatttcagcaaggtttcaaatgaatttcgattcaaaatataaaaatataaatgtcaaattttagttaacaaaacgaaattcggttgacccaatacgaaactgtgaaccctgccttcaacccacccccggattgtaaaccataatataacccccgtggaacttgtagaccataccaaaagggacgcccgaactccttatctgttgttgagaaggtaaatttcgcacggaattttgacaaatgctcacatgaaaatgaaatagaccccggtatcagagagaaccaatggaccagatatcagttcttaattttttgagatgtgttgatgcatgtggacttggatcgatgcactcaagcacatggacttagtcttgtatgagtctgagttcttactatgcattgttgtccctcctgggggtttt

SEQ ID NO: 16436 - DNA, 718 bp, Zea mays
  unsure (1)..(718): unsure at all n locations
  Clone ID: MRT4577_114989C.1
gcaaaccagnagnactttgtacaaagagaaagttagaagcagagcaaaggagactagaagaaaagggccaatagcgtactactcagaagggttgaagcttataaaaacaaggatacatcacgtgaggccatacagaagcactttgaggaaactggcgaagatgagaatgttcaacttataaaaatgtttcaacaccaaactgctggggaatatcgtatcatgatgggcaccgatgtgcgtattcagcgagatcctttggccatgagaatgcgggaagaccagatcaaacagatttggggcggtgatcctgtctatccaacaattaattatgttcaggatcctgatgaagtgattgactacagaggtcctgaatttcatgagcctacccctgaagttgtaccttacctgatggagcatgggataatgatcacaaaggaagagctatatgcacgtctgaatgaagagagagaggacgtcaatcaagacataacgtatattcctgaagctaaagatcctatggctaccgccattgatataggagagcattcttacaatgaagacagtgatgatgaggatgaggatgtcgataaagctgctgcacagcctcaatcactagaggatgaggaagacgatagggatgatgttgcagaagtagaagagaaagtgaaccagaattggagtgctctaaagtctactggacaggctgaaaagcccaagg

SEQ ID NO: 16437 - DNA, 456 bp, Zea mays
  Clone ID: MRT4577_11498C.1
gccggccggggccgggggtttctgctcaaatccgtcgacactatgcgagaaaatttcatctcctacgacatcgaaggaggctgccaaaagagcaaaagtctataatgggagagggagatgaactggagctgatggtcccatgcgacaggccctacgaagatcagcgacaaggtgaggctggggttgaaggggctcatctacgagttggactaggaggacctgttccgcaacagcgacttgctggtgtagctcaacccggcgcgcatgaacgcgctccgtggtggtctacggctagagcgccgcgtgcgagtggatctctcttctgtattacaccgactatagctgtgcatggatcgcggaaccctctcctccctgccgacgtgtacgaccgctccatgtgatgcttctgggcagatcgtagtctgacgacagttctacaaggagagaaacacggtg

SEQ ID NO: 16438 - DNA, 851 bp, Zea mays
  unsure (1)..(851): unsure at all n locations
  Clone ID: MRT4577_114990C.1
ggccgggnaatccatgcccatcccggctcttcttgattttcgtaactacgtgcctctggctcgctcttctcaattcctgctgcatgtccgtcgtgccgccgttgcgcgggcgcagggccaagcgccgccaaaaggcatcagcagagaagaaggcgaccgtggccgcaaggggtaagcagaaggcgcattgagcattctaacagtctgcaactttcattcagaacaggtcgattgcttttgtgtagacttgcagatggatttctgcccccacatgatgtcttgtgctgaaggtgtggactactttcgaatgggagacattagcaagcagttcagctgcttccaagtactgtagctcggctgtagcagctaatgaacgagcgacattaggaagaatcggcatctacacatcgatctggtggaacgggatggtacttacggttggcgccgatccagacgccaattacaacgagatgtaccgacgacggaaatgtgttggtgtcgatccgggcgtcaatcgctacgaggtgtgccggcaacgcgtggacggtccacggcctggcgcagaggtgggtcttccctgcagtgtggccggagggtccgcacgtgcgcgggcggcggcgttcgccaacagcacctagatatcgctttcgggagggaccccgtcgggaggagaggttctagggtttgtcttaggattggcaggccacctaagacgcctccagacgatgtagagtcgaagaaaggttaatgttgaggcgaagaaggctatgttactgtatactcctagggaaaaagtaaaggaacaaaagatatgttattttggttcgaaaaaaaaaaaaaaaaaagcggcc

SEQ ID NO: 16439 - DNA, 302 bp, Zea mays
  Clone ID: MRT4577_114991C.1
gggtacctcgaggccggccgggcccgggaaatacaaaaaaaagggtaaaaaaaaaaaaaaaatgtccccctatagccctctcagatccccatttttgtgctctcttatagagagggaaaatgtgcgctcgtgcgcaaactcgtgcacatatgtgttcctgtgtgcaaaaagtgatatcgctctcacaatcacacaacatataagaccgcaaaaatataaagtgaaaaccctggggcgccaagtgagagatatatctcacaatatttgctgtgctctcactgcccttttcacactcgaaaacc

SEQ ID NO: 16440 - DNA, 155 bp, Zea mays
  Clone ID: MRT4577_114992C.1
tgggccggtacctagggactacgacctgcggcacccgccttggcgtggaagtggtcataagctgccatgctgtctgatacgtgcgtccgatcacagtatcatactatatgcgtagccgaaagcctaaacagaactgccggtgtcgactaatgcac

SEQ ID NO: 16441 - DNA, 1002 bp, Zea mays
  Clone ID: MRT4577_114993C.1
atgaagaacgtcctgttcgatgtcacggaggttaacctccccttcaacgccatcatcggcaggctagccctgtaccagttcatggccattgcccattgtgggtattttgtcctcaagatcccatctccggctggggtcctcaccgtgcagggtgaccgcgccgctgcgcttgcggctgtggaaaagctgcacgccctggtggcagaggctgctcgcccggacgacggagggaggaaccccttgacctccgggaccaaggcgcctaccaaggtgccaaaggcaaatgctgatgtgttcgcatgggagccgtcacagatgcctgggatccctagggaggtgatcgagcaccatctgaagatcaaccctgatgccaagccgatgtctagggaagataggaagcataccgcttttgtaacagtggatgggctttactgctacgttgttatgctgtacggtctgaaaaacgccttgccaacatttgtgcgggcgatgagtaagactttcggggacctgattagggacaaggtggaagtatacgtcgatgacatcgtggtcaagactaagagagggtcgactctagtagaagacttaaccctggtcttcgacagactgcgggcaacccgcacgaagctgaacccggacaagtgcgtctttggtgtctccgcagggaagctgttggggttcctggtttcgcactggggcattgaagcaaacccggagaagatcaaggcaattgaagcaatgaggcctccgacccgtatcaaggatgtccagaagcttatggggtcattagccgctcttagccgcttcatttcaaggctggatgagagggtgctacccttcttcaagatgttgcagaagtccggtccattctcttggaccgaagaggcggaacaagccttccaggagttgaagcagcacctggtgtccctaccaatactggtagcccagagcctggggagccgttgtatctgtacatcacggcggctgcggaagcggtga

SEQ ID NO: 16442 - DNA, 226 bp, Zea mays
  Clone ID: MRT4577_114994C.1
ggggtaaaaaaaaaagctttttttaacaaaaaccctaacagaacaacccaagggttcataggtttcatgggaggcctacattctaacaacaacacctaaaaacctaccggttccatcccgggcttcccgcctacaaaacttttaaaaacatgggcccttgttttatgccaccttcaaaacccaaaaaaaaaaacgggcggcccctgggaaaacccaatggcccctg

SEQ ID NO: 16443 - DNA, 208 bp, Zea mays
  Clone ID: MRT4577_114995C.1
ccccccaaaaaaaaggggggcggtttcactgggtataagttttgggttttgccagggaaaaatttttgcctttccagtgtccaaaaaggaagaaaaaaaaaggggaaaaggtttcaattttgccccttttaaacgcaaaatgcctgacagtataccctccctcctgaacagctggggctgggaaaccccccccaggtcctagtttacg

SEQ ID NO: 16444 - DNA, 461 bp, Zea mays
  Clone ID: MRT4577_114996C.1
tcccgctcgacccacgcatccgggcaccaccacacgttcacggtagcttttagcttatcgtcgtcggcggctaagatgggatcgcttaaactgcagaatcggctggcctttatctttctcaattttgatattgttttattctttctttacctttttttaatcattttttcttcatttttttattttttctttactttttcatttttttttttttttttttttttttattttttctttttttttttttttttatttttttttctattttttcttttttttttttatttttttatattttttttattttttttatattattgtattttttatttattttttactttttatttttttttttttatcttatttttattttttttttttatcttttttttcttttttttatttaattttttttttattttttattttttatttcttaatttttttttttttttttt

SEQ ID NO: 16445 - DNA, 277 bp, Zea mays
  Clone ID: MRT4577_114997C.1
atctcagattgctatcatggtttctagaaaaaaaacgacttacataaaggaaccaaggggccctagagcgatgcgagccacttatgtattttaacacacaatgcatgtgacgcttgaacgcgcttaaagataatccaggtacaaaggtatgttacggggggcccatattctggatccaggtttccttacgctgaggagtacagactggctttgtcgcagttgagcattaacgagaggccactgattcttgtcctgcctccacatgctggggaaactc

SEQ ID NO: 16446 - DNA, 293 bp, Zea mays
  Clone ID: MRT4577_114998C.1
cagactgatatatctgtgagatttatattgatttgagtggatgaagatgagtagatatgatgtgcaaattgactaccatttctttctgcgattgtttctttcatctgttaataacatgcagagaaaataaactgatgaggcgttctgaaatcttatactggaattctgcggggtcctcgttcttgaacggagcaaaattaaaggaattaggaggaacatttttttaagaactcaatagtactccatgagatggggggaagggaccggatcttagctggactttcccaggatag

SEQ ID NO: 16447 - DNA, 478 bp, Zea mays
  unsure (1)..(478): unsure at all n locations
  Clone ID: MRT4577_114999C.1
agcctggatcctgtatagcgttcgcccttcgncttttaattttttttttttttattttaattngggtttcgtttactttttgttgggaccaagctttaacaacttaaatttgtgttcccaaatggcctacttttttgaacaaaaaaggcatcggcctcataaatcacaatatcccttttcaaagaatttctttataaggtgcaaaaggttcctttgacattgctggtcaaaaagggtttagatgcaacaccccggaatggggcccgggaagaaaactacttatttttaagaggggccacggtttcaaatttggcgcaaaataatataattccagtagggaggtgccctccaaaaacattggggcgcttggtgataggccccctctgcagcgccctggtgtggaccacatggtgcagggaccccctgtgccaaacctatttgtacccggggctcttggggccgaacatgtgcacgccgt

SEQ ID NO: 16448 - DNA, 224 bp, Zea mays
  Clone ID: MRT4577_11499C.1
acgcgtgcgaacgctatccaacattttcttgctcccatttaaattcaacctatcctcgcttccttcgacggggaggctctcaccctcatggccaacatcatgatcggaatcaatgggttccgaacgatctgaaggctggtggccaacatcttcctgcagatcgacgacttccaaactcgtacgctgaactaccccttcatcaccaccgattacatgacctacat

SEQ ID NO: 16449 - DNA, 611 bp, Zea mays
  Clone ID: MRT4577_1149C.1
tgtgaatactcgacctgacttggcatattcagttggatatgtgagtagatttatggaggagccccatatggatcatcttgcagctgtgaagcagatcctgaggtacatagcagggacaagagattggggcctgttctattcaaggagaaatggagggagtgatgagctcttgggctatagtgacagtgatatggctggcgacttggatggcagaaagagcacatctgggatccttttctttcttgggaggagtccaatcagctggcaatcaactaagcaaaaggtggtggcgctatcaagttgtgaggcggagtacatcgctgctgctactgctgcatgtcaagctgtttggctggcacgactgcttgctgaaatcaggaactcagagacaagcagacctttgctaagggtggacaacaagtccactatctcgctgattaagaatccagtgcatcacgaccggtcaaagcatattgataccagatttcatttgattcgggagtatgaaaattcagggcaaatcaaggtgaagttcatcagtactgaaaaacagctgggggatattctgaccaagccactcggcaaaatcaagttccaagaactctgcacca

SEQ ID NO: 16450 - DNA, 913 bp, Zea mays
  Clone ID: MRT4577_114C.1
tgttaagccatagatgaacttaccgcgtttaaagaaaaaccttctaaaaatgttcagtcaagagtttcttggcagaaataagaggttgtcaaagagccatctgttggttccttcagaaacttgttactttaccacccagcatgtgtatcagttgatgaagatggggatcgcatttttatctctgacagtaaccatcataggatcatcattagcaacagcaatgggatgattttagattatattggatcttccctaggctatgaggatggaaagtttgagtcagccaaatttttgcgctcagcttcatcattttatcacgctgctgaagactgtcaatttattgtaagattcagagaatcatgctgtcagaaaagcagatttgggaaggactttacaaacagtttatccagtcttcaataaaagcaatggcatctggagctggattaccgataagcttggtatgagaaaagaagctactccaactattcaagattttcatgcagactccatgccacttccatggcatttgatacaaattttagaggacaccttattaggtaggcatcttatagtcgtagtgaacgggcataagccaagctaggaacaaacaaatagttttagatattagttgaaaatagaatggtatgtaaatttctgaattgtccatcattatcgagtccccttgaattattcaaggaaatgcatgtcgaagaagcaggttccggtgcttttattgtttccctagattgataggttactcatactaggcccaaaataatattcaattttattgtgttgatctcaggactagcacttcttaatacccttgaatttctacatatttttatagaacaaaaaatgtatcaggatgaccctattatttaattgactactttgagtagtggtttcttcg

SEQ ID NO: 16451 - DNA, 376 bp, Zea mays
  Clone ID: MRT4577_115000C.1
ggttcttacagaactcttgtccctgcatggaggagctaatgacaagggagttgctcggcttatgctactgtctgacatgcttgataacagggcgctcctgtgcagaacgcatataggcttccgtaaccaagaggggagcttctttgacagatgctaaaaaaagctgtattgactggattgatatcatgactgtatggcataccgctgaacccctgagaagagaggcgtgtatgaaatgctctatcaagtgttgctgcaaacctagggcttgtgctctgaggcaatgatataaagcgctgaaaggtccttttcatagataatggaagtgctggggtgtatccttccactctctataaacattatgctcccgccaatg

SEQ ID NO: 16452 - DNA, 648 bp, Zea mays
  unsure (1)..(648): unsure at all n locations
  Clone ID: MRT4577_115001C.1
aattcggcacgaggtagagagtcacacacgctcgctgctgcctctccttcctctcctcggcaagtgagagaggtgtgaaccgacgaggaagagcacccatccccactgcgcatcctcgattcgattccgtccccttgcctcttgcctcttgggcgtctccgcggctagatggcgtctccccctcccttcgacctctgcggcgatctcgacgacgacgacatcgatgaacccgtcaccgccgtccccaaggatcgccatctccctgccgccgcccctacgccgaacggcctcaacgaccacctcctccgcttcacccgcagcctccagcgccccacccaaaaccctaaccctagccccaatccgccaccgcctccgcccccagccgccgccgaagaacaagtcgagaaggtcaagctcgccggccgccgccgcctatgcaagcttgccaccaccaccaccgccactcagcgagtggatgaagaggaggcggagtgggacaaccaggacgacggtgaaagcatactcgacatcctagacgacctcaccacacgatttgactctctatccgtccagaagcccagcaccgncgcgaggtccangacacaacagctcacccctttgccgtgcgccatcaccgtggacgacgac

SEQ ID NO: 16453 - DNA, 279 bp, Zea mays
  Clone ID: MRT4577_115002C.1
cactaatccaagacaaaacatggctgtgaatgtgagaaccatgtggtcgtcgatgcgggcacatgttgcgatggctgtggcgttagtgttcttggtgagcggcgcagggtgcggtcctcccaaagtccccccaggcaagaacatcacggccacctatagcagagactggttggacgctaaagcgacatggtatggcaagccgacgggtgccggtcccgacgacaacggtggcggttacgggctaaaggacgtgaacaagcccccttcaataacatgggc

SEQ ID NO: 16454 - DNA, 262 bp, Zea mays
  Clone ID: MRT4577_115003C.1
tggcgatgcaggcgccaagggtggcgccgcccgcttgtttggtgatggctgtcctactgccccgccgaaatggactttactgggtgagggtttagcacggtgtgattgagaaaacgacgacgctacctaaattaaaggcggagaagcacatctacccttagaacactagagtattacagatgaggatgtcactacactgccatgcacatgaggcgcgcagtctgtatggcagatggtacacgccctgttgtggcggattaag

SEQ ID NO: 16455 - DNA, 181 bp, Zea mays
  Clone ID: MRT4577_115004C.1
agatgttgagaggaagctagagatggagctgcttcctcgcaccgctcaccggtgagcctgatcatgagtcgggcacgcagcaatgtctatagcggaactgggttcagacggctgagcaggcgactcgttgcgacacgggcctgtctccggcgtacttcttcacggctgtggcggtggcgtg

SEQ ID NO: 16456 - DNA, 215 bp, Zea mays
  Clone ID: MRT4577_115005C.1
ctgcgggccgacgatgaaggacgctctcattgacttcggcttccgcgttggcctgataagagagacgcataattgcacatcttttatgagcatttatgccttctcttatcttgcctatgctgaatccgaatgacccgagagctgcctatctcggggacttcggttcagatggcctaaaagagacgcaaatgcctttttaagaacatttgctcttt

SEQ ID NO: 16457 - DNA, 571 bp, Zea mays
  Clone ID: MRT4577_115006C.1
gctagacctactctggtgcgggcgggtcatatttttgtgcgcggcgatggagatctctgtcggaggctgcccccgggaacccgaaaggctgcgagaagatccctaagaccaagtgcgcagcagcgccacacacgaagagaagggcgccggccacaagcaaggtgcaaacttgacccgacttttgggcagacaggaacggaccactggagggtcctcctactatgacggtaacataaacatagctggagggtgagaagaacacactttgtatgagtacctgcttaaccctaagaaagacattgctgaaaccaagatggtcttccctgggctcaaaaagccgcatgagcgggctgatctaatcgcgtacctgagagaagcaactgcatagcccattggcatgccttgtgtacatgaatagaaaaaccgtttggcatgataataaaaaaacattttaaacaatatgggtcaccctgttagaacagggggcaaacactgttcattattgtcgcacttatggcgtactatatggaatgcctatggtgttagctgtgcacaaataacagttaaactg

SEQ ID NO: 16458 - DNA, 295 bp, Zea mays
  unsure (1)..(295): unsure at all n locations
  Clone ID: MRT4577_115007C.1
ttactgtatctctctgttctctcatgtgcccactctatctgtaaatcgcacngcccgttgatcgctaagctgcngctcaacntcacggcgcaccgggacagcgacccgacccnggacgccgcgaacgcgggtagcagaggcggcagngccggagccgcagggacaacacgacggagccggagacggagccggggggctccaccgcgtncggcacggccaacgacggccnggacgcggacggagggcgcactnccacgccgacgaggcgcagctcaggaacggggataccagggcg

SEQ ID NO: 16459 - DNA, 373 bp, Zea mays
  Clone ID: MRT4577_115008C.1
ctctttttttttttctgaatatattattgagggggacatttaagcaccgtgggggtctttcaggaactatccatatgattgttggtagttgtaccattccaagtgcaacatccattttaaccattattggcagatggcccctattgatttgctctcggaccctggcacctgtccctttgataccgacagaccaaactatccaaccagacttatctaagaactgtccaccgggtgcaaccaattattgacaaccaacaccccaatcattattgaaccatcggatgataactaccactcggcaggctgcctatttcacttgattttggctttagacgaaaacccttcgagacagccccacgccttgtaccgcaca

SEQ ID NO: 16460 - DNA, 323 bp, Zea mays
  Clone ID: MRT4577_115009C.1
atttttcattcactcatcctcttgaagtatagtctcggctgtgctctagaatacgatgggcaaagaccacctgctcgagaggggcgctgtagaagtggatgtcgctgacaaggtactacactcatcctcgcccggatgcgatgatcaaggcgaatgatgtgtttgcctggtagctgtaccgcggcgtgatctgtcgcatgatcatcgccacgctgctgctcctgtatcgtcgcgatggccaccgtgatagagaacgatgaccatacggacgagtaggcagagggcgcagacgcattgtgaggctcaagcatccgattgagcat

SEQ ID NO: 16461 - DNA, 446 bp, Zea mays
  Clone ID: MRT4577_11500C.1
caccttcgtgcgggccggtactcgggatccccctattgtaaccaggctctactccatcatggtcatagcatgttctcttgttgtataaaatggtctctgactactattcactcaagggacgagccggtcttttttctagagattctagagaaggcgagacagagagactccaaacattattctgttgtgtgctaactggcctatatcctatctaaatacctggcaagccaactagcattggagaagcggatcacattcgatgagagcttaaggagcgacatagcacactctaccgcttggcttaaatgactgcgctccttggctttggcttgagcatagcagatatgcttgtttcacctgacgtacaaagagcagaagatactgtatatactcgacaatgtcgagcttgcattgactaatatcatgtgcgcctattgccattaatg

SEQ ID NO: 16462 - DNA, 444 bp, Zea mays
  Clone ID: MRT4577_115010C.1
atcaagcgtagcctcgctcacggctacggttccaaccgccaccttgctctcagcgaggaggacagatgatgggtcatgaatgctattcaagcaaacactgtaaatttcgtgaaaaggatgaacgagataactcaggcgatgaaaactgctcacaatctcttggactctcaaggcgagacccttgagatcatacaacatctgtggtatgagctacatgtaccattggcatatattggactaccaggacatctacatgataaggccgatctagatcgtgcactgaacgacttgcaagatgaaaaacctatattctatgacatgattacgcataagatgatgatacgacatgtgcactagtgtctttacgattaatgatctaggcatgaagaactattagatgatcgaactgttgagataatatagcatttgtccagtacaaatgca

SEQ ID NO: 16463 - DNA, 1531 bp, Zea mays
  Clone ID: MRT4577_115012C.1
atcgaattctcatcttgtagaaaagaaagagtgagagtgagattggcaagggtatagggttcttggtcgatcaaatatctttcccctcttggattctcctcttcctgcttcgttctcgccagatcgatctcactacgtgcctgcgtagctagccactctgtatgcaccatcaccaccaggaccaggccatgggcgacgcgctgtgggacctgctcggggaggagatggcagcggcgggcggggagcacgggctgcccccggggtttcggttccaccccaccgacgaggagctggtcaccttctacctcgccgccaaggtgttcaacggcgcctgctgtggcatcgacatcgccgaggtggacctcaaccggtgcgagccgtgggagctccccgacgcggcgcgtatgggggagcgcgagtggtacttcttcagcctccgcgaccgcaagtaccccacgggcctccgtaccaaccgcgccaccggcgccggatactggaaggccaccgggaaggaccgcgaggtgctcaacgccgccaccggcgcgctcctcggcatgaagaagacgctcgtcttctacaagggccgggcgccgcgcggcgagaagaccaagtgggtcctgcacgagtatcgcctcgacggcgacttcgccgccgctcgccgcccctgcaaggaggaatgggtcatctgcaggatactgcacaaggcaggcgaccagtatagcaagctgatgatggtgaagagcccctactacctgcccatggcgatggacccttccagcttctgcttccaggaggacccaaccgggcatcccctcccgaaccctagtggctgcacccccttccaccacggccacccccaccatagcatgcagccgccgcctccattgccgccgagcaaccatgctggcaaggccgtcttcaccggagcagcagcagcctgctgcatgcaacaagagccggcagacggcagcaacagcgccgtgctgcccatgccgccgttccctcccttcaccaccatcgtcgccggcaagccggcggtcccggcgccgccgccccaggttgtcaacgccggtccacaggagccaccgccacctacctggctggaggcctacctgcagcacactggtgggatcctttatgagatgggtgtgggtccaactgcagcgcccaggggcgcgtgatccggaccgtcggttccttagggttacccccctacgtacgtactgaaacactgatgatccatcgatttacctggtctgtaatgtgcggtgaagcttagtatttccaagtgacatatttcgacaagcacttgtagttattaaaaaagagttatcttgtattcggtggcatcattagtcgtcgttgttatgaaatcatgtgtgcttataacatgcatgaatgcatgcatttggatcatcgatcagagctgtcctctcctgggacgtgctacgtactgtgctcatgcatccatccacatgcaagtggtgcctgctaaaatgtacatccaatgtctatttgtttagcatgcatg

SEQ ID NO: 16464 - DNA, 684 bp, Zea mays
  Clone ID: MRT4577_115013C.1
gctggagctcgggccgcttttttttttttttttttcgaaaaggcccgttacaaggcacgaaaaggcccattacacactatggcagccaccagccagagagccaaccacaaccagccggccagcccagcccaccttgccatttgccacttgccagccaaccaatctcatggctacacagaccatagcccattttactgcacacaaaaacgaaaaaaccctaggtcccgtgcctctggctctcgttctctcgtgatctcctcgagaccctcgactcgtctcgacggcggccggctccccaaccctaagaggcaagaggccaagaccaacccaagtcccgacggcagttcagtattggcttgctgctggcttgctccttgacgcggttgctggctagcttgctgcttgctcctcgacatggtttgttgctggctggctgcaggcttgctgcattgctactgaccggttggggtagggtgccagagccacagaggggcatggctgggctgctggggacagaggggtacggctggcacgattggccgagtggccggctaggggctaagctcgcctagggcgctgccgtagtgccgtctgccacactgcacggctggccgagtggccggcgcccggctcccaggggctgtgcgactggccgactgccaggaggcccgcccggccgacctc

SEQ ID NO: 16465 - DNA, 206 bp, Zea mays
  Clone ID: MRT4577_115014C.1
actttaaggaccacatctacaacgacaccaacatcaaccaaggcttcgcgagctccctcaaggacaactggccccaggccaccggcttcggagacgagaacctggcaccgctcgacaccaccacgccgtacatcttttttaacgccgactacaataacctgctgagccataaagggcttctgcactcggaccaggaactctttaac

SEQ ID NO: 16466 - DNA, 1572 bp, Zea mays
  Clone ID: MRT4577_115015C.1
ttgggaccctcgaggccggccgggacttgtattgcaatttaaggaaggaacacaggtatgcgatattgatatgctgccacaagatgtgaacctcattgagttgcccgatcaaaggaaaatcattggtcgtgatgttggtgctaaagctgtcaccggaatggaagaaggaaagctggatcaatctagctcactaaatctatcggatgttgacctagttggtggtacagaggttgccgctatacacaataatccagtgttggtccagctgtctgcagctggatcttccacagagtcaaataataaacagcaacaagatcctgaaacttttacaggtgccaatgccagtcctacagatgatttatgccagcttccattagataataaggatgttcaggtagttaatatagaatgtggcacaccagttgaagttggtggatttggtttgtcaaaatcaatacacaataatccagtgttggtccagatgtctgtagctggatcttctgcagagttaattaataaacagcaagaagatcctgaaacttttacaggtgccaatgctaatcctacagatgatttatgccagcttccattagacaataaggatgttcaagtaattgacatagaatgtggcacaccagttgaagttggtggatttgatttgtcaaagtcaaaaaataagatggtatgctctagcatggatagcatcatggaccctggcgatggaatacatacggatgttattcctgttgttcaagatggctacagccttgcattttcagattttctcagttctgatataccatgctacccgtcaatgcaatcagatcttcatgctggaataagtgccaacgactcagagggtattaccgttatggatgatcctatatatgggtctctcgctgatattggtttcatggacatgtgggggcagcccactcaagactacgacaaattcttctaggctgccgccgaaggcccaagttcatgaatttgacaaggaaaattagttgagttagctcagtacaggcgacaataaatagatcgggttatatcagataaattagttgagtttagcagcaagatcggccgggccaatgcagcccgcctctccgacttgtcctcggacagaaggtttggattggatggagccacccgttggcccgtgaccgtcctggccgcggcgcaaggtcgcagccgccatgcccaataaggccttagttcggtttgagatggattaaagagatccacctctaaccgaacaagccgacatggaggaaagtcctaagccgacatggcgacacagccgcaggatttacggtgcctcgtctcatctgccaccgtcttcgtccggccctagcccctagcacagcacgtagccggacttgtgtccaccaaagcatcagttgtaattagttgcagtccatgataattcttaatcccgttgttagcccgactgtggagataatttgcaatagttgaccacctgatttgttcatgacagcagtttaaaactggattaacgtagacataggcgctactagatgacggacatgcgtaaaaggtgcgttttgc

SEQ ID NO: 16467 - DNA, 546 bp, Zea mays
  Clone ID: MRT4577_115016C.1
gggcagcccactcaagactacgacaaattcttctaggctgccggcgaaggcccaagttcatgaatttgacaaggaaaattaattgagttagctcagtacaggcgacaataaatagatcgggttatctcagagaaattagttgagtttagcagcaagatcggccgggccactgcagcccgcctctccgacttgtaatcggacaggaggtttggattggatggagccacccgttggcctgtgaccgttctggccgcggcgcaagcgaaggacgcagccgccatgcccaataagacattgtttggtttgagatggattggaggggattcttctcaatccacctctaactgaaccagctctaagccgacatggcgacacagccgcaggatttacggtgcctcgtctcatctgccaccgtcttcgtccggccctagcccctagcacagcacgtagccggacttgtgtccaccaaagcatccgttgtaattagttgcagtccatgataattcttaatcccgttgttagcccgcctgtggagatactttgctc

SEQ ID NO: 16468 - DNA, 478 bp, Zea mays
  Clone ID: MRT4577_115017C.1
acaaacaacagtcccagtttcaactagaaaattcagggggccatgcaacaacaaatggtcagtttcaactagcagcaaatgttcaatttcaactcccaaatggtcagattcaaacatcaaatggttccctgctctttggcttccatgttcaacgcagttgacggggctcgccgtaacccctgccggtgacaggggagctcattgtagctgagcagcgcgcgccccaaaaatagggaccagccggagggggatccccccgtgcctgccagtcgttggagcctgtgcccccccaaaacaggggggggaaggggagacaccctcaacccgggatgggggagcaggccaccccccgaaaaaagggcttgggagtgccccccgcccgaaaaaattaggccaccctgctaaagaaccccctgcattgcgcacgccttggacccaccccccccgtacaccgagggcggcccgtgctgccccatgc

SEQ ID NO: 16469 - DNA, 738 bp, Zea mays
  unsure (1)..(738): unsure at all n locations
  Clone ID: MRT4577_115018C.1
cggggtagtcgtagccgactggtcgccgcgtccccctttccccgcgcagcagcagagcaccatccggtgaccgagcaatggaggcggggggcgtgggcctggcgctgcagacgcgggcggcggccttcggctccggccagcgccggggcggcctacagtcgcccatcgggaggctgagagtcgctgaaccggcgggagctgcggttgccgtgcgggctcgcgggtccaagcccgtcgtaccgctccgtgcgaagaaatcatccgaccagttaactggaaatatatgaagaagggcctatccgtttggttagatgtgcccttggatgctcttgctaggcgtattgctaaagtgggaaccgcttctcgtcctcttctggaccaaccgtccggtgatccatacacaatggccttttctaagctcagcatgcttgcagagcaaaggggtgatgcttatgcaaatgcggatgtaagggtttctctggaagagattgcatctaaacaaggtcatggncgatgtctctaagctgatgccgactgatatcgcaattgagtcacttcataagatcgagagtttcgtcatcgagcacgctgctgataatccagctagcgactcgcaagctgagtcacagatccaaaggatacagaccttgtaatatcttaatccttctgttttgtaccgaagcgtaccccctagagcatcgttggtttatttgttcgttgaagtgtcacgagggagag

SEQ ID NO: 16470 - DNA, 439 bp, Zea mays
  unsure (1)..(439): unsure at all n locations
  Clone ID: MRT4577_115019C.1
ttgggtacctcgaggccggccgggatggcggttttcaggtgagtcctcttcctctcctccctccctccccacgcgttctctcctcccggcgagccccctgctcacccccatgcctcgatgaaatcccctagcccaggcgcaccccctggctatctcctccaacggcgcgaccgctcgtccaccccttccgtgagccaaccatcgccgagcgttggacttcttccccagcgagcagccatctccgccccctgccgagcaattcctctcctcnccgngntgaagcccctcgcgtgtgcctccccatccctcatggccatggttgccctcccctgcgcccaaaacgcagtcaagcatggccccagcggcgtcgtctgccccgggcgtggctccagctcgcccaccccctgcccccttggccaggtgcagcagggcgcgcgca

SEQ ID NO: 16471 - DNA, 375 bp, Zea mays
  Clone ID: MRT4577_11501C.1
cgggcggcctaaagggttggccttggtacctacaacgtttcttcaggagcctccaggggcctttactgccttggacggaaagactctcgatggacggatcataccgcttaatcatgctaacgagaagaccggtggcttacgtggcggctgtggctatgttgcggcggatatggtggtggtggaggctatggtggtgctggtggaagccgtggatactgtggcagcgactatggtggcagctacagcaacatgggtggtggtggtgattatggtgacgctggttgacgttgaggcaactatactgccagacgttgcgaccgcttcgcctacagtaactttggctatgacagtatctccggtggaaacggggctagc

SEQ ID NO: 16472 - DNA, 1474 bp, Zea mays
  Clone ID: MRT4577_115020C.1
ttgggaccctcgaggccggccgggagtcgtatccgactagtcgccgcgtcctcctttccccgcgcagcagcagagcaccacccggcgagcgagcaatggaggcggggggcgtgggcctggcgctgcagacgcgggcggcggccttcggctccggacagcgccggggcggcctacagtcgcccatcgggagcctgagagtcgctgacccggcgggacctgcggttgccgtgcgggttcgcgggtccaagcccgtcgtaccgctccgtgcgaagaaatcgtccggaggtcatgaaaacttgcataactccgttgacgaagcactcctgttgaagagaaaatcagaagaagttctgttctacttaaacgggaggtgtatttacttagtgggaatgatgggttctggaaaaagtactgtggggaagatcatgtctgaagtcttgggttattcgttctttgatagtgacaaattagtggagcaagctgttggaatgccatcagttgcccaaatattcaaggtccatagtgaagccttctttcgggataatgagagtagtgtcttgagagatttgtcctccatgcgacgattagttgttgccaccggaggtggtgctgttatccgaccaattaactggagatatatgaagaggggcctatctgtttggttagatgtgcccttggatgctcttgctaggcgtattgctaaagtgggaactgcctctcgtcctcttctggaccaaccatctggtgatccgtacgcaatggccttttctaagctcagcatgcttgcacagcaaaggggtgatgcttatgcaaatgcagatgtaagggtttctctggaagagattgcatgtaaacaaggtcatgatgatgtctctaagctgacacctactgatattgcaattgagtcacttcataagatcgagagcttcgtcatcgagcacactgctgatagttcagctagcgacgcgcaagctgagtcgcagatccagaggatacagaccttgtagaaccttaatccctttgtttgccacatagagcatcgttgagttatttgtaaaggaatggaagaagggagctaataatccgaagtgtgccgttggctgaaacatcgcctgtcttcactcctggctctgcttctgttcgcttctcatcgtggtttgataccttggtggacatctatgctgacacctcatctcaccaaacatacttgcataccgtcgtcgcccgctcgaacgaagaaacaaagtgccgtttggttcatatatttgtaatgtaatgggtaactgataatgttaaatcatatttgttttagtccaaccgtaatcagataccatactagatatcagtctatatgtaatgagtaactgataatgttaaatcatatttgttttagtccaaccgtaatcagataccatactaaaaatagatatcagtctattcaaatttgttaaaattaaacatttagggcgtccag

SEQ ID NO: 16473 - DNA, 838 bp, Zea mays
  Clone ID: MRT4577_115021C.1
cgacccagcgttcgccccgcgtccgccccgcgtgcgggcgtggggcggcgccagcaacacagccttctctctcctcttctttacacctcggctcccacgagctcgcccacgcgtcggcccgagttgagctataggcgtagccgactggtcgccgcgtcccctctcggctccacccggcgagcgaacaatggaggcggggggcgtcggcctggcgctgcaggcgcgggcggcgggcttcggctccagccggcaccggggcggcctacaggcgcccaccgggagcctgagagtcgctgacccggcgggacctgcggtcgctgtgcgggctcgcgggtccaagcccgtcgcaccgctccgactccgtgcgaagaaatcgtccggaggtcatgaaaactcgcacaactccgttgacgaagctctcctgttgaagagaaaatcagaagaagttctgttctacttgaacgggaggtgtatttacctagtaggaatgatgggttctggaaaaagtactgtggggaagattatgtctgaagtcttgggttattcgttctttgatagtgacaagttagtggagcaagctgttggaatgccatcagttgcccaaatattcaaggtccatagtgaagccttctttcgggataatgagagtagtgtcttgagagatttgtcctccatgcgacgattagttgttgccaccggaagtggtgctgttatccgaccaattaactggagatatatgaagaggggcctatctgtttggttagatgtgcccttggatgctcttgctaggcgtattgctaaagtggaactgcctctcgtcctcttctggaccaccatc

SEQ ID NO: 16474 - DNA, 1583 bp, Zea mays
  Clone ID: MRT4577_115022C.1
ttgggtagctcgaggcccggccggggcacgagcactattttacgtgcccacatttccgccaccgccaccgccaccggctaccacctgccgcctgcgccctgccctccctctgtttttctagacctccggatcgctcagagattgagtcgtagtcgtacccgactggtcgccgcgtccccctttccccgcgcagcagcagagcaccacccggtgaccgagcaatggaggcggggggcgtgggcctggcgctgcagacgcgggcggcggccttcggctccggccagcgccggggcggcctacagtcgcccatcgggaggctgagagtcgctgaaccggcgggagctgcggttgccgtgcgggttcgcgggtccaagcccgtcgtaccgctccgtgcgaagaaatcatccggaggtcatgaaaacttgcataactccgttgacgaagctctcctgttgaagagaaaatcagaagaagttctgttctacttaaacgggaggtgtatttacttagtgggaatgatgggttctggaaaaagtactgtggggaagatcatgtctgaagtcttgggttattcgttctttgatagtgacaaattagtggagcaagctgttggaatgccttcagttgctcaaatattcaaagttcacagtgaagccttctttcgggataatgagagtagcgtcttgagggatctgtcctccatgcgacgattagttgttgccaccggaggtggtgctgtcatccgaccagttaactggaaatatatgaagaagggcctatccgtttggttagatgtgcccttggatgctcttgctaggcgtattgctaaagtgggaaccgcttctcgtcctcttctggaccaaccgtccggtgatccatacacaatggccttttctaagctcagcatgcttgcagagcaaaggggtgatgcttatgcaaatgcggatgtaagggtttctctggaagagattgcatctaaacaaggtcatggcgatgtctctaagctgatgccgactgatatcgcaattgagtcacttcataagatcgagagtttcgtcatcgagcacgctgctgataatccagctagcgactcgcaagctgagtcacagatccaaaggatacagaccttgtaatatcttaatccttctgttttgtaccgaagcgtaccccctagagcatcgttggtttatttgttcgttgaagtgtcacgagggagagaaaaaaaaaaccctgaagtatttcttcttgtaagttgtaaaggaatggaataaaggagctaataatccgaagtgtaccgttggctgaaacatcagtttgatactttggtgaatacctatgctggttgctggacatctcatctcagcaaaacgtaaacaacgtggacttgttgaaccggcgtgggctggctggaaccgtgtaacacccactttgtaataatagagaaacaatttctccttaaaaaaaaaaaaaaaaaaaaaaaacaaaagtcctctgcgttgttaccactgctcaagaacacaataccaagcaatatacatggcatgcccgcggacgcgtgggcggacgctggggtcctagtccgc

SEQ ID NO: 16475 - DNA, 1895 bp, Zea mays
  Clone ID: MRT4577_115023C.1
attgggtacctcgagggcgtgctatacctatcaggctatcactggctctccccgtcaactaaactctagccagtgagtggatgatgggtcggacgggtgacggccgccgccgcgacgtcgacggccggctggaggcgctgctctctggcgccggcggcgaggagccgtggctccggcgcgtggcgctcgcgacggctctggagctgcggctgctggcgcccctggccgcgccggccgtggtggtctacatgctcatcatcgtcatgtcgtcgaccacgcagatcgtgtgcggccagctcggcaacgtccagctcgccgccgcctccctcggcaacaacggcatccaggtcttcgcctacggcatcatgctggggatgggcagcgcggtggagacgctgtgcgggcaggcgtacggcgccgagaagtacgagatgctgggcgtgtacctgcagcgctcgacggtgctgctcacggccaccggggtgccgctcgccgccgtgtacgcgctgtcggagccgctgctgctgctgctggggcagtcgccggagatcgccggcgccgccgccgagttcgcctacggcctcgtcccgcagatcttcgcgtacgccgccaacttccccatccagaagttcctgcaggcgcagagcatcgtggcgcccagcgcttacatcctggcggccagcttcgcgctccacgtgccgctcagctggctcgccgtctacgggctgggcctcggcctgctcggggcctcgctcacgctcagcctcacgtggtgggtgctggtcctgggccagttcgcgtacatcgtgtggagcccgcgctgccgggccacatggaccgggttcacgtgggctgccttcgccgacctgcccgggttcgccggcctgtccgccgcgtcggctgtcatgctggcgctcgaggtctggtacttccaggtgctcatcctcctcgccggcatgctgccggacccgcagatcgccctggactcgctaacggtctgcacgtcgatccagtcatgggtgttcatgatctctgtgggcttcaatgcagctgccagcgtgagggttgggaatgagctgggcgccggcaaccccaggtccgccgcgttctctgcgtgggtggtcacggccctgtcggcgttcgtctcagggatagctggcctcgtcactttcctgctcagggacaagctcagctacatcttcaccggtggcgaggccgtctcgcgcgccgtcgccgacttgtgcccgctgctcgttgggaccattgtgctctgcgggatccagcccgtgctgtcaggtgtggccgttggctgcgggtggcaagcgatggttgcctacatcaacgtcggatgctactacttcatcggcgtacccctcggcgtgctcctcggattcaagttcggtttcgggatcaagggactgtggggaggcatgattgggggtaccctcatccaaacacttgctttgatctggatcacgttaagaactgactggaacaaggaggtcgaggaagcgcggaaaagattggataagtgggatgacaaaaggcagcctcttctcgcaagcaaggagtgatggatgatggtacaggagtggatgaagaagattcagtaggcttctgctagctgatccagtctgaaatcatcttgtagtcgccaccgctaactgcaattcagggatgtactaatgcagagcttctgtggtctcggctctcaggaacataccataccataccacagtcagtttcggttgatggggccttgcgagccgggcgtccgtttcaatcggtatgcgtggacatggcagccgttggctttactcccgtagtacgagcgacagtgccattattttttgtttgctccggtagttttggtggctgccttgcctttttttttt

SEQ ID NO: 16476 - DNA, 548 bp, Zea mays
  Clone ID: MRT4577_115024C.1
gtaaaagaaaaattgttcatttgagaacttacaatgagttttacacacaaatttaaattagacagacataaaaccacttcacagacaatcatttggtaaaattattcagacatgtaaaaaaaaaaagactttatggtaagaaaaaaacagaggactatactcttaacatattggaatgggagctccgttccactcgttgagacattccatcatcggatcaatgattttaccttcacaaatcgccgtgaaaaccttgtcgaactcttctccaggcgacgtcactttctctccggtcaaaagctctgttccaagctcttccctcacgaatctatacaatggatacgacctacattccttgatcctgttcgggatagccgatgttccgttatcgtaggctgctcttgctgcttccacttctttcggtagcactgccttaagctcctcctcgaaagctccaatcttatggaagattgaagtcactgcattcttctcactctcaccattgatcaaagcatggtcaacaataaccttgtctcaagcttctgaat

SEQ ID NO: 16477 - DNA, 662 bp, Zea mays
  Clone ID: MRT4577_115025C.1
cctcgaggccggccgggacgaaacactttggattccgcggcttcgaagctcgggcgccccgctgcttgcggtttcccacctcccatcccaagcaaaagctcgctcgcaaacagcatggtccatgcggacgggacggacagtcagctaatccgtacttggcgggccagcttcgtccagctgcccttttccctatccctcgcctcgggtctccacatttttcatgtcttcttccttcgccctcttctgtcgagtggtttggtcctgtgctgtgctgtgcttggggtcagctgcaggctgccaccggaaaagcgacgagaagcagcgccgatgcttgctgtgagttgctaggaaaagatggatgttcatgttcggcaggccggcggacgccaggaacgtcctgccgtgaaattgcgatgtgttttacgcgtcgcctcgcacccggtcagagtgaccagttggtgcaggggaatttcaggggaaggaccattcgatgggcctccggaggctgcaaggacttcgctctcagcccggcgcaaaaagatttttggccatctcgacagcgctggtaccatgaacatacatgatgtgacgttgtaatctcaccgagtgctttgatccggtcggcatcgaatatttagaaaaaaaaaaaaaaaaaagcggcc

SEQ ID NO: 16478 - DNA, 1201 bp, Zea mays
  Clone ID: MRT4577_115026C.1
cattgggtacctcgaggccggccgggggcaaatgcactcgtttcaggcctgacgtccgtctccaactcgactactatactaccgccgcgctctgctcctgcaccagccgggtcagctgaactgagcatcatatcatggagggaggagccgttcccaagccatcggagaagagggtggccctcgtcacgggcgggaaccggggcatggggttcgagatatgccggcagctggcgtccagcggcctcaccgtcgtcctcaccgcgcggagcgagacgcggggcgccgaggcggcccgcgagcttcgcggcttcggcctgcctgacgtcgtgtcccaccagctggacgtcacggagcccaccagcgctgctcgtctggctgatttcgtcaggaccaagttcggcaagctcgatgtgttggtcaacaacgcgggaatcatgggggtgacgatggagattggcgacgacgaggcagccgtcaaagaaatgatggtaggcaaggaccagaacgagattgcagagtggctgaagcagcggaccacgcagagcgccgagcaagcggaggaatgcgtcaggatcaactaccacggcaccaaaaccgtcacggaagcgctcctcccactcgtgcagtcgtcctcctcctcctcctccggcgggaggatcgtcaacgtcacttcatccttcggcctactcaggtttttcagcggcgaggagctccggcaggagctgagcagcgtcgacacgctgaccacgcagcgcctggacgagctgtcggcgctgttcctggaggactacaggagcggccggctggagccccgcggatggccgaccgaccgggtgtacgcggcgtaccaggtgtccaaggcgctcgtctccgcctacgccagggtcctcgccagggacaaccccgcgctgcgggtcaactgcgtgcacccgggctacgtccagacggagatgaaccgcaacaccggggacctcacggccgcggaaggcgccagggtatccgtcgccgtcgctctcgccgaccagggcggcgtcaccggcgcttacttcgatcgcactcaaatagcttcgttcgtgtaatcctcgagtgctacgcacgcgtagagaagaacacgcaccacgtttaccatgtatttctaccgcaaataatagagctctatgcttgatgcttcacattcaaaaaaaaaaaaaaaaaagtccac

SEQ ID NO: 16479 - DNA, 586 bp, Zea mays
  Clone ID: MRT4577_115027C.1
cccggtcgacccagcgttcgcgtgctacgacctcagcgggtacacgagcgtgcgcgtgcccaccgtgtccttctacttcgacggcgccgccacgctgacgctgccggcgaggaacctgctgctggaggtggacggcggcatatattgcctagcttttgcgccgtcgtcgtcgggcccgtccatcttgggaaacatacagcaggaagggatccagatcaccgtcgactcggccaacggatacattggctttggacccaccacctgctagatcaaatctgttctaaataggccatacgggatgagagtatatagagtccttgtagtacgtaaattgaggtaacaaaaggttgaagaaggcagtgtgtgtgtcagtccagcaccatgatgaatgttgtgcgcctgcactgaaaccgtgggtgatggtctctgtacagatcgtagcatgaacattttcactttgtgcaaggctgcgatgagatgggacgaacatgttcacttggcttgtaaaaggggccaaggctgcgacgcgatgaacctgtttcacttgccttttccaccgtgactaaagtacaatcctctcaacagc

SEQ ID NO: 16480 - DNA, 275 bp, Zea mays
  Clone ID: MRT4577_115028C.1
acggctgctcgtgcggtgtgctcgtgagctcttgattcgataacgctgatggtagctatcgttgggttctgatgactacctgtcataccgcgaacgcagacgacgacggccgtgttctgctgctgtgctcttgctacaccggctgcgagcttgactgcgacccttctaatggggccaagttcgtgtacagcagctccgtcggtccagaccactggggcgccctgagcgccagcttcaggcagtgcgccacatggacgaagcagtccacgatcgac

SEQ ID NO: 16481 - DNA, 296 bp, Zea mays
  Clone ID: MRT4577_115029C.1
tttacgcgtgggcggacgcaagggcggacgcggggacggacacttgggctcaagtacaacagcccagagctcaagatgttatccactgaatcactgaagacatggacgccagcgcagccgggagcatggcaaaaaagggggcgggtgggcccatggatggcggcctgaggaagaagtcagggtgaacgcaacgcaaggccgcactgcatgagcccgtagggcggatcgggcgctacctcaagaagggcctgaacacgcagcgaatgggcaccggtgaccccgactatctcgtcgtc

SEQ ID NO: 16482 - DNA, 326 bp, Zea mays
  Clone ID: MRT4577_11502C.1
ggggggggaaactatggaggggaatacataaagagtgacaatcctcaataaagaagttatacataatcctaaataaagagggacaatcctcaataatgaatagaaatacttcaactaacttttagaactactaatctagactattatgtatagcacaccaactaaattaagatcacactaattattctaacaaatacattgaacataatatttgggatcaccaaaaccctaaactataccattttttggctggtaggacattatattgaatatatacctaatgcacactttgtgtaagttttgcttgaatccatacccacttgaaa

SEQ ID NO: 16483 - DNA, 292 bp, Zea mays
  Clone ID: MRT4577_115030C.1
accaaaggatatgggggggcaaatcagcacccgggggggaacctttatttcagacacaaactttaactgacgccaactgaacaggccacaggagaacaaaaactctgggtgcacatgaataacccatggcacttctttttcaaaaagatggcttgcaccaactgttcctaaaagcccaacattcttcattgcagcccaaaaggtttcacccttcctttttcacccaaaatttttagtacaggacctatccttcccccttggatgccactgcaccaactcacatggtgctgca

SEQ ID NO: 16484 - DNA, 703 bp, Zea mays
  Clone ID: MRT4577_115031C.1
gtataagatataatttcagtacgtaatattgtaattggtggctttggattcaaaaattttaggatttacatataaattggattcgaatattttaggatttacatatgaaaagaataggcatctcataactgccagataggtaacatgtagtaaggcagtgatagatcagtaactgccaaatagttataaaaatataatttatgtttaaggaaaaagtagcaaagacatacaccaaatgagaaattttctatgtacaactacagatatcaacgcaagaccacggcactgcaggccttataacttcgaaatctcgcttccatctccaagcagcttgggagccaaaagacatttcagaagcaagttgcattagcacagagtaaagcagagcaatggcaacccgctgacctagggagcagcaattgcgtcgttgctggcctgtgttcggcgctctactacggcctagccccgcccaaggacgaagaagcgccagcgcacagagaagcacgtcggggtggagctgtgggcccgtgtcgatggccaggaggcgttgtcactgccgctctgctcatagtggaggcggaccgctcgctgtcgcggtcttggcccccggcggccaggaaggaggcggaggagccgacgccgctccgtctgtgagccaaggaagtgaggcgggtggggtgctgtcgcggcctcgtgccgaatt

SEQ ID NO: 16485 - DNA, 194 bp, Zea mays
  Clone ID: MRT4577_115032C.1
ccggaccggcaggcagctcagcatggcacctcgccctccttgagacgccctgctgggcctgttcgccgcggctgtggtggccatcgccgtggacaagctgagcggcaagcggtaccgcctcccaccggggcccccgggcgcccccgtggtgggaaactgcctgcacgagcgccactacctgaaccaccgcaacc

SEQ ID NO: 16486 - DNA, 1147 bp, Zea mays
  Clone ID: MRT4577_115033C.1
gggcaggttccggtgccccgcgtgtttctcgcccgcgctgcgcggactgctgcggcgcgtgctgcacccggacccgttcggcgcgcgctgacgcggacagcatcgtggcgcacccctggttccggcacggcgccagcgacgaggagatgggacgccagctgatgcacggcggcggaggagatgaagacgaagaagcgtgggtcggggcggcggcggacgaggacgacgcgggcagggagccgaccgcgttcgacatcctgagcttctcccccgggtgcgacctgtcggcgctgttcctgggcggggggtgcaaggagcgggtgttcgtgggcgaggccgccgcgggcgtgctgggccgcgtggaggcggccgggcggaagggagggtaccgcgtgcggaaggaagggaagaggggcgtgcgcgtggagggggaggagggcggcgtcgtggccaaagtgagcgtggttaggctcgccgacgccgtgtccgtggtggaggtggtgaaggacgacggcgccgacgccgcgctgttctggaccgagctgcttgagccggccgtgtgcgtgcccgccaccgcgttgtgtcatgtgtgaatattttgttggttcttgtgatgcgtcctgctgtgcgaggctatgctatggatcaagcaaagcaagcgaggaaggaggaagaagatgtgctgtagagttggttggtccgcgctagattgctggtgggtgccgacgaatacgatgcagggtaagctcacctcccaactcccattggatgttgtgttgcttttcatcagtgaatttggcagtcggtcggatagatagatagagatgaggaggcgtatgcagccggggatggagactcaagcatcgttgtgatcaataatgcaaggccgtccgtcattagtgtgatcgagtgccatggacatggacatggacatggaccaccaccaatcaagggaggcttcgtggatcactaggtttcgtccagctgccagcgctatccacaacaacaatccataacccatccaaccagctaagataagttagctagcatgggcaaccccttgttagcggctatggtacgtgacggagccttctgccctgttctcggctttcagcagaaattaagtggacacaagtcaacaacaagt

SEQ ID NO: 16487 - DNA, 399 bp, Zea mays
  Clone ID: MRT4577_115034C.1
cttctcttgtttcgggaggaaatcgatgtattccccggacaaacttcggggatggccggagcctgaaacgcgacaaaacatctttggcctcccctccatgttttcccttccggattggtaacaaaacaattgcatctacgccggagctgaactggactggcctgcactgtgctgtaccaaagactgctcgttggctttagaatgggctccctggttttccgccggaaggaaaacctacaaagaaccccggctttcttcaaaggcccaacccctggatgtacagatcctgcgcgggcttgcgttccgtcccgtcccggtccgggcggaagattgcccagcgcgaggggggcctcttataccaaagatcctgtggcctgttggacaccgtgcccctcccgt

SEQ ID NO: 16488 - DNA, 346 bp, Zea mays
  Clone ID: MRT4577_115035C.1
gttgagcaaagacaaaaattttattcatgggaggcacaaccattgcagagcgagagaccagatctcagaattggacgcgtataacatatataggtctgcgaacatatattgcacgactagaatgcactaccaacggtcctcggacgcaagatgaaggcgcctcgtgggactaacactcacatgacttggaaattaagaatggggtgggaggactcacattttattggctcactaacacgagctactactcatgcatgacattcctgctcatgcactgctggaggatccccttccaggagacactattgctgccactgaacacttggttgaaggaggggagatcacc

SEQ ID NO: 16489 - DNA, 767 bp, Zea mays
  Clone ID: MRT4577_115036C.1
gcgctcaggcggcgggctgcaaatcatcagcatatatcagttcgttccgcaagggaagtcgacgttgagaaaaaaaagcaaaacaaagttctccttacgaaccgttactatgacgttatccccaccaaccggcgtcttcgtccccgtcccgacgtttttcaaacctaagtctgcatctagtaccctccaagccgccgtagacgtccagacacaaatcgatcattcagtgtttctcgccaaaaatggagtgcgcgggcttgtcctgcttggctcaaccggcgaagcaatccacatgtcgcgacaagagcgtatcgatgtcgtgtctggagtgcgcaaaggactcgaagacgcaggcttcaaggactatccgatcatggcgggaacactgatcaacagcgtcgatgagacattggagtggctagaggacttcaagaaagccggtgcacagtggggactggtgcttgcgccagggtatttcggtgcagcagcgagtcaagagggaattagagagtggtttactgttgttgcagacaagagcccgctaccaatactgatctacaactaccccggcgtgacaaacggagtcatggtaacacctgatacctaccgcgtcctcgcgcaacaccccaacattgtcggttgcaagatgtcgcatgccgtcgtctcatggcacaaccaggtctcgctagacccgaaaatcgaccacaacaagttccgcgtctactctggtctcggccaaaactgggtcccattgtcatttttgacgc

SEQ ID NO: 16490 - DNA, 225 bp, Zea mays
  Clone ID: MRT4577_115037C.1
gaccacaaggatattccagatatatgggtagttttgtgtacagctgaacaaagggtaggctcgtgaatcattatcaatgaaaatgttgcccgtcctgtagcatatccacatccaccgtatgctgttactgtcttggctattgatctgacagactgacataatggattctgctgttggaaatttggattttcctgaggagttagagactatagtttcccacactgg

SEQ ID NO: 16491 - DNA, 269 bp, Zea mays
  Clone ID: MRT4577_115038C.1
ccggcgaagctctctcaagctgggcatctagctcattacctactttactcctacgagatacggatcaacatgggggggggtaccttaagtatatcggcgtcgattaccttcttcactccgactccaacctcgtacgctctaatgcatgacacatcacctccattgaaaaaactcagcacataacaggacctcaagaacttagtactgctcctcttcatcacccactttggtaacactcatgctaaaatatacgctcgccacacactctc

SEQ ID NO: 16492 - DNA, 487 bp, Zea mays
  Clone ID: MRT4577_115039C.1
ggcggaccacccttccaagcttgttagttggataagttctgggttgttcgggggaatgggccaccaccaccaaaagagtgatttaccttaaaattgggagatgttgtttttgttagtggaatggaaaggttaaagattggggaaattgtgactcctaggaagggaaaatttccggttgagttgattcgttttttgtaataatggaactggtttattttaatgtttgaaactttgattttaacggtccacattttttcttttttgggatgagatttttgttttaagtattatctttaattgaatttgaaagtgttggacgtggtgttgaatttttttttattttaatttttttttttttcttttatttttttttcttttatttttttatttatttttacttttttttttcttttgtcatttatatttttttattttttatatttatcttacttaatttttttttttttcatctttatttttttttttt

SEQ ID NO: 16493 - DNA, 594 bp, Zea mays
  Clone ID: MRT4577_11503C.1
cggcgcatccgactgtgtggcgttcgtgggcgctcccccgacggacgtcccgatgagcatccggatccgggaccacgtcatcgcgcagtgcagggcgtcgagcgcctgcgccatgctggggtgcgcccgcaccctcggcagcacgcagtgccacaccccggccagcatcatgcggctgttccagaagtccgtcttctgcctgcagccgccgggcgactcgtgcacgcgccgctcggtgttcgactccatggtggcgggctgcatcccggtgttcttccacacggggtcggcgtacgagcagtacccgtggcatctcccccgggacgacggccacctcaggtactcggtcttcatcccggacgccgacgagaggcggcgcaacgtgagcgtcgaggccgtgctccgggcgatccctccgcccacggtggagcggatgcgccaggaggtgatcaggctcatcccgactttgttgtacgccgacccaaggtccaagctggagactctgaaggacgcggtcgacgtcgccattgacgggatactcgacacgatggcggggacccaggatccgccgagacttttcgccgacattttctc

SEQ ID NO: 16494 - DNA, 288 bp, Zea mays
  Clone ID: MRT4577_115040C.1
gggcccaaaattacagggccccataaattatgggggggaaaaaaggaacagggcccaacccccagtttgggggaagggggggaaataaaggccaggacatgggcttatgggaccctcctcgggttttttattttttctaaaccaggatccataaacggggaaacatgcttttttgggcttgggcttaggggccgggggggggaacccccccctaaaaatccatccaggaggggggggcccaaaaaggggggatatccaggacaaatacaggtggtcccatgggggggg

SEQ ID NO: 16495 - DNA, 152 bp, Zea mays
  Clone ID: MRT4577_115041C.1
actgagtgtagtaactagaatcgttcgatgcagattgcggagctctcatgggtactcgacgttctatgcggacggactggtgatattgtaggctcatagtccgtcatctaattgccgtcgtaatcgacggcgacgcgcaattcatgaatgga

SEQ ID NO: 16496 - DNA, 438 bp, Zea mays
  Clone ID: MRT4577_115042C.1
gatgtgttctacctcttttaccaagacgtgtgggggctatggctacttacggttgcgtggatgggcgacacgcggcgcttgatgtgtagtaccgacgcttcgtcggacgtctttgctggtgcaccagccacgtgtcggtcgagaatggcttcatatggtagggcgagatcatcgactataaggtcaacacccaccggcagactgtgtaatgtcgacgatctgattaactgtcctcgtaagggctgaacttgatgcatgaccctatggctaacatgatcggcgaggaacatgatggacgccagatcatcgttgatcaacttcagacgggttgaggtcatcttccgtgcggcggcttcccagtccgattgcatgatcgtcgccggcacgctcaccaacaagatggctccggcccttcgcaaggtttatgaccaaatgcct

SEQ ID NO: 16497 - DNA, 177 bp, Zea mays
  Clone ID: MRT4577_115043C.1
gggttccaaacaacccttttccccaaatattattcctttccatttcaaggggtcattcaggggaggggggacaccgccccccaaggggaggggggacaccccgttactcaagggcggtaaacgagggaaccagctatagggagctaggcagggggtccattacattattactacaga

SEQ ID NO: 16498 - DNA, 222 bp, Zea mays
  Clone ID: MRT4577_115044C.1
aatactacaggtttggtgtatttctgcacaagaaagcttgatctcaaacgcccccttaactgttgatgataccgtccctggcaccaaacacatacagcccttttttttaccgttttcaacagccctatttaaatgggcttactaataccctctgtgaggggtttattcgggaggacagccccaccctttcagcgcctttgtggggggggatttttcccctta

SEQ ID NO: 16499 - DNA, 223 bp, Zea mays
  Clone ID: MRT4577_115045C.1
gccgatacgactccagagtccagaccaagctcttggcctccgcttcttccggccatgtcgcgcttcttccacggcgccgccctcaccgccgccgccgcagttgcgggcctgtcctctgctttctcgcggacctcacttcgtccctcccacttgcggcttctccctcttctccgtcgacgcccatcggccccgtcgcggcctccggtcacctagccctcgtccg

SEQ ID NO: 16500 - DNA, 343 bp, Zea mays
  Clone ID: MRT4577_115046C.1
ggccgctgctgcagaagaagggcgaatggaagaggtgaagagcggcttgaaaacagtatcgtggacaagctgctgctgttgtgctctgttagtgttgtttaatttagtttaataccgtgtgcatgagatatggcacgcgttcttgctcaattacatcaccatggcaatgtctgcaaatccatggattgatggatggatgttggttgtttcttaacattctggacatgttgttcatttgtttctttggctatgtatgttttagcagtccagcgtccccctaaaaaaaaaaaaaaaaaaaaaaaaaaaaaaaaaaaaaaaagtactctgcgttgttaccactgct

SEQ ID NO: 16501 - DNA, 338 bp, Zea mays
  Clone ID: MRT4577_115047C.1
cattgggtacctcgaggccggccgggattcacctttctatgaataccatcgcgactgtctttttcttccggttcgacttccgttccgcaaatccaccgttcggggtcgaccctttacagctgtgtccaactcctctgatattgcggcctggggcagattggagattaacccagactatgcctcctgtctttgacacattcattggagaggtcccttcattgacggatcatgcctaagatacagacaaggcgtgcccagtatccggtaaggatgagagcttattgaaccgacaatcctggattacgaatgccaaaatgagagagactgaaaatgatcca

SEQ ID NO: 16502 - DNA, 1550 bp, Zea mays
  Clone ID: MRT4577_115048C.1
ctcgaggccggccgggaccggcctccctcgtccatccgagtcagagtcttcggctccaagccgccccactgttcctcctcggctccgcgcaccgcgccggcagcgggaggagaggggtcagggtgacgccgatgcaccccaagctgtcgcgggccgcccgcaggctcctctgctgcggcagggccgcctccccggaggacctatctgatgaaggaagtggatcattgaggtgggtgttctcattgagagagcttcgatcagcaacaaacagcttcaattacgataacaacattggagaagggccacttgggagtgtgtattggggacaagtttgggatggttctcagatcgctgtcaagaggttgaagagtgcaaagaatggcacagaagcagaatttgcttcagaagtcgagatattgggaagaataagacacaaaaacctcctgagttttcgtggatattgtgcggatggacccgaacggattctggtgtatgactttatggcaaactcaagtctctatgcacatcttcatggaccacattctgctgagtgtctccttgactggcggaggagaatatctattgccatcaacactgctcgggctctcttgtaccttcaccactatgcaacacctaagataatccatggaagcatcaagaccaccaatgtgttactggattcagacttccaggcacatgttggcgatttcggtctgataaggtttattcctgatggaatggatcatgaaaagattaccagcgaaagccaacgaggctatcttgctcctgagtacattatgttcggcaaaccaactgcaggttgtgatgtatacagctttggaataatactattggagcttgctagtggcaaaaggccgatagaaaagtcgtgttctgttaagacatatggaattcgaaactgggtgctcccgctggcaaggcagggtagatatgatgaaattgcagactcaaaactgagcgacaagttctctgaatctgaactgagaagaatggtcttagttgggctagcatgtactcattcagaatctgaaaaaagaccaacaatgcttgaagttgtgccgttgctgaaaggcgaatcaaaagaaacccttattaagcttgaaagagatgagttgttcagctcagactcgatggtgagttcacaaggaacaccaaccccagatgggggcacagactctgtgccaaaggaagatcaagaactggttggagcgtgaaatgtgatatgttgctactgtaggcgatggtagaatgcggatttgtgttattggttgatgattggtttgtgcggtttgacatgaatgtaaattgtataggcattgttttctgtaaggaggtatttacccatcccttttgagagattaaggaagagcatgggggctggagatagctgtttatgcgaagtggtttttgtatgcaccgcatagaaaatgcacatgttttttcaggatgtttgtatatttctctgatcaggctgtccacatattaagggtccgtttggttcgtgccttgtttttaaaatctggttctac

SEQ ID NO: 16503 - DNA, 325 bp, Zea mays
  Clone ID: MRT4577_115049C.1
ggagaaggatgttgcctcacatttcaaggagtctatgatgaggtttttctaggacgaaaccgagaacgtgtactggttcacgtcacaatccactgtgagctacagagatcggctgaagatgatggtcaggctgatctaccaggacgacctgcagctgggctctacggagaggaagctcgtacaggcgtacaaggagaagccagtcctgtcgcggtccctgtacactttctacgacggagaggactaccttgacgtggaccttgacatgcaccaggtcagatacattgttcggaaggagctagactcgttcagggcactcctcaag

SEQ ID NO: 16504 - DNA, 319 bp, Zea mays
  Clone ID: MRT4577_11504C.1
aacggcatttctggggcgacccacgcgtcgcgggacgagctacacatatcactccccaccgccccgtctcaattcatgcagcggtattaggtgtacgaccacgtgtccctccgtctagccgcagcgcgcgcccgcatctgacagtgtgctgcctactactgctaaacattcgcccaccagttcgcgtgaggaaatagcacacctgctgagcatcgctacgttcgctactctcgcctagccttcttgccctgggcaaggcttgctatgctaggatcagcaggaggagtctctgcctcggcacatgtcatcgatgtgggat

SEQ ID NO: 16505 - DNA, 262 bp, Zea mays
  unsure (1)..(262): unsure at all n locations
  Clone ID: MRT4577_115050C.1
tgaattcggcacgagggcactcgccactgccgtttgatccctcccgctcccccgctccgccatgcgtcccgccgtcctcgccgccctccttctagtggcagcggccgcctccaaggccgccgcactctactcatccggctcccccgtcctccagctcaactccaacaacttcagatcgagggtgctgaactcgaacggcgtggtgctggttgagttcttcgcgccgtggtgcgggctctgcgtgcngnggtcccccgctggg

SEQ ID NO: 16506 - DNA, 677 bp, Zea mays
  unsure (1)..(677): unsure at all n locations
  Clone ID: MRT4577_115051C.1
cattgggaccctcgaggccggccgggaatctaagccgtttttcctcgttctcgatcccccctgccgcttccaaaatacgaaaaaaatagatgcttagctgcacagtccgatatgactggcccatccatcctcccactcaaccatcctaccgaaccgacggggagaaggtgttctgcagcgccaatggccggaaccagaagatccagctggaggaggaatccgagagcaacacgagcagcggttcacctgggacctcctcctcctcctcctcgacctccaacgacgacatcttcatggccggcatggtggtcacgacgtgacctccacccaccggcccaccaccgagccgtttccccgccgaaagcgttttttccatccctcctccgagtacgacagtgggacaggcgatcctacccgatctcgttcacggttcggtgcgaatcgccgtggtcagcatcaccatgctgttgcttttgactcaacaaactgtactactggaggcaggagccaagaaggaataaaacgcggaaaggctctgctgggctcatggggggacattgccgccagacgtcctgggaacctgcgagagatctgcattattttttttttcanaatgacaaagagaggcttaaggaggccacctgccactgaacttctgatccaaaggatgcccgctg

SEQ ID NO: 16507 - DNA, 213 bp, Zea mays
  Clone ID: MRT4577_115052C.1
cgggggggctttttttaagttgggacacaaaaagacaacctttttcaaaaccagtatggatccagcgttcagtggcaccgttcacatttattctaccatatacaagcagcaaaaaagactgcgaccaaacgccattggacgaccctccataggaaagcagaaatctatctttctactagccgactgggtcttgaacatgtgccggatcaggtc

SEQ ID NO: 16508 - DNA, 300 bp, Zea mays
  Clone ID: MRT4577_115053C.1
ctatagcatccttgctccaaaccctggtcactcttatgcaacccgcccatatcgggggaggggcgccctatgacttactttcccaacgcccgtattttcaactattctttaaggagttccccatccaccccggtgcccccagtatcacattctccctccacaacttttacaacatgtgcgtccacaccgctaatcttgattgcttcgcactagccaacaaaaaacttcttttttcgtgcgcgagcacttatggcacacacaaaatgctttactactacgagatccagaacaaaacgtaca

SEQ ID NO: 16509 - DNA, 3022 bp, Zea mays
  unsure (1)..(3022): unsure at all n locations
  Clone ID: MRT4577_115054C.1
cattgggacctcgagccttgcggcgcgacgctagtctgccccctgctcttcgcggctctgccgcactcgtcttctctcttcctcttctctctgtctctcctaccctccgtcaccacctcgtccctatggcaagcgagcttctcccagcctcttcctaccagactatcctcctgccgcaacggacctgacggtttccctccatctggcctccctgtcgcgcgagctgatcgacccacgcaagcgcaatgccgtccagaggctagttcgagctgctgagcgctgatcacggtgaggccacccagatccacccgactgccacccggatttcgcaccttgccttttcttctctcgttcacccagctggctcgctcgctcctccctctctagtgggcaactgccaactgggcgactcgccgacgcccctacgccaggtgctcaggtcttcgtcgggtcttttgccggcgacgaacacacaccagggtattgtgtagagctatcatctccctcggtttcttggaagaacaattatttgacataattatcaccataagatgcctggaattacagaggatggacttgttgcagaggaggtgccgagcggtgtgaatttctctccacagaacgaaagtctgcctgccccaaagtcgacagcagcttcaacgatggcgggtagcatgcaaagcgaggcgcttgagatgcatgttgaggcctccggtgctggggaaccctcaatcgagcaactctacaacaacgtatgcgagatggagagctcaagtgagggtggctccccatcacgcgagagctttggctcggacggggaggagtctagaattgactcggagcttcgacatcttgttgctggggagatggaggccatgaaggtgattgaggaggaagaggagaatgggagtgttgccaacgttgtaccccctgctcctgctgagaatgggaccccagtaaaggaacactcttccagttcgtccaagaagtcgaagaaggcatcaaaatcacagcttgagtctgatgcctctgttggactcaatggaaaggcgtccactgaggaaggtgagagcgaggtcagcaaaccggcaagccgagttggccgacggcggaaatcaaatgccaacccacagaatggaacagaagatgctgggcttgataacccagaccttggtccatttcttcttaaacatgcaagagacttgattgcctcagaaaacccacggcgggcattgaaatatgctctccgtgccacaaagtcgtttgagaagtgtgctggtggaaagccaagcttgaacttagtgatgagtttgcatgttgttgcagcaatctactgcaacttgggaaaatatgaagaggctgtacctgtgctgcatcgatccattgagatccctgtaatcgaggaaggccaggaacatgctctcgcaaagttttctggttgcatgcagttgggggacacctatggcatgctaggtcaaactgcacactcactgcaatggtatgcttctgggcttgaaatacaaaagcaaacattgggagagcaagacccaagggttggagagacttgtcggtacttagctgaggcccatgtgcaggcactacaactcgatgaagcacaaagattgtgtcagatagcccttgacatccacagggagcatcgcgagacggcctcactagaagaaacagctgataggaggctgatgggtctaatttgtgacactaagggtgatcacgaagctgccctggagcatctagtgatggccagcatgtccatggtagccaatggtcaggagacagaggtggcctcagtggattgcagcattggtgatatctacctctccctgggccggtatgatgaggctgtgtttgcttaccagaaagctctcactgtattcaagaccagcaaaggggagaaccatgcaactgtggcttctgttttcgtgcgcctagcagatctgtacaataagacggggaagctgagggagtcaaaatcttactgtgaaaacgccctaaaaatctaccaaaagcctattccagggacttctctggaagaaattgccactggtttaactgatgtctcagccatatatgagacgatgaatgagcatgagcaagcgctcaagctacttcagaaggccttaaaaatgtacaacaattctgctggccaacagagcacaattgctggaattgaggctcagatgggcgtgctgcactatattttgggcaattatggcgagtcatatgattccttcaagagtgcgattgcaaagctccgcacttgtggcgagaaaaagtctgccttcttcgggattgccctgaaccagatggggctggcatgtgttcagaggtattcgataaacgaagcagcagaattgttcgaggaagctagaactgttctggaacaagaatacgggccataccatccggatactttaggagtctacagtaatcttgctggaacttatgacgcgatgggaaggctggatgaggccatcgagatcttggaatatgtggttggaatgcgcgaggagaagctaggtacggcaaacccagacgttgacgacgagaagcggaggcttggggagctattgaaggaggctggccgggtgcgaagcagaaaggcgaaatccctggagaatctgctcgagaccaacccgtatatcgccaccaagagaaatgccgttgctgcatgagtcactctgtcctcagatgacacggtattgtgatggaaggcgaggattgttactaaggtattcgtattcatttggtttgttcagatggggggtaacgggagtagtggtgtttacatatttggaaatatgaaaatgcttaaattgattgttgtaaagtttcaaatgctactgtttctccttttctactacctctctgaggtgcgagtttgcattcgtcagttgtacctgggttttttattacatacatgaaaaaaaaaatcaatgacacagcaaattcgatccctgagggagtcccaaggncttacgtagcgcgggtgcagtgcgacgtc

SEQ ID NO: 16510 - DNA, 609 bp, Zea mays
  Clone ID: MRT4577_115055C.1
ggacctcagcggcgggcgggattctaattctcatcgatgactgaaatctacttcctgctctcactgtgctagctgctcagaccggattagcaacggcccatcgccaccgctggctcccgaggtcgcgatcgtccttgacctgagcctcctgtctgctgtcagctcgcgtggctgcgaacccacctgttgtggcccacgcgtcgcaacgccatgcagactgtgccgcactcgcgattgacgacacaagacacgagatgatgtccgattgactcgcctcatgctcaatggtgagcgccaaagtgatatgcctccactgggttggactacgcaaataccagcaaggctgtccgatgctgctagcactgggggaacgcgactcctgattgagtctttgctgcgccatctgagtcaacgactgcctcatccacctggtcgcgtgccatagactcaacatcatcgcgcaaccactgtatctaggataaagaccataagacttcacttgcacctactgctcgtgggaacccttgtgtgctccatctcgcgattctatttactaacctgacggtctcttgccatttctcgcagaagtacgttgtttcatattcattc

SEQ ID NO: 16511 - DNA, 3664 bp, Zea mays
  Clone ID: MRT4577_115056C.1
ttttcaaaagactgctcccgtgccctccgcttctccgccgcaactcgcctcctggattcttcttccctcccctccgtcaccactcaccacctcccctatggcaagggcgcttctcccggcctcttcctccccttcctgccagaccatcttcctaccgcaacggacctgacggtttccatccacctggcttccctgttgcgcgagctgatcgacccacgcaacgcaagtgcaatgccgtgccgaggctagatcgagctgccgagcgctgatcacggtgaggccacccagatccacccgattgccacgcggacttcaccccttgccttttctcctcccgtccacccatcgggcgctttccctccatccctctctctcgtgcggcatctgggcgacccgccgacgcccctacgccaggtgcccaggccttcgtcgggtcctttaccggcgacgagcacacaccagggcactggagggctaccatctgcttcgctttctgaaaaaaaaaagtttcggcataattatcaccctaagatgcctggaattacaatggatggatttgttgcagaggaggtgccgaacagggtgaattcctctccacagaacgaaaatctgcccgccccaaattcgacggcagcttcaacaatggcgccaagcatggaaagtgaggcacttgagatgcatgtcgagagctccggtactggggagccctcaattgagcagctctacaacaatgtgtgcgagatgaagagctcaagtgagggtggctccctgtcacatgagagctttggctcagatggggaggagtctcggattgattcagagcttcgccatcttgttgctggggagatggaggccatgaaggtgattgaggaggaagaggagaatggtagtgttgccaacgttgtgccaccggttcccgctgagaatggaaccccagtaaaggagcagccttccaaatcgtccaacaagtcgaagaaggactcaaaatcacagcttgagtctgatgcctctgttggtcccaataggaaggcgtccactgaggaaggtgagagggaggtcagcaaacaggcaacccgagttggccgtcggcggaaatcaaatgccaatccacagaatggaacagaagatgctgggcttgataacccagaccttggtccatttcttctcaaacatgcaagagacttgcttgcctcagaaaactcacgtcgggcactgaaatatgctctccgtgccactaagacatttgagaaatgtgctggtggaaaaccaagcttgaacttagtcatgagtttgcatgttgttgcagcaatctactgcaacttgggaaaatatgaagaggctttacctgtgctgcatcgatctcttgagatccctgtaattgaggaaggtcaggaacatgctcttgcaaagttttctggttgcatgcagttaggggacacctatggcatgctaggtcaaactgcactctcactgcaatggtatgcttctgggcttgaaatacaaaagcaaacattgggagagcaagacccaagggttggagagacttgtcggtacttagctgaggcccatgtgcaggcattacaactcgatgaagcacaaagattgtgtcagatagcccttgacatccacagggagcatggcgggacagcctcactagaagaaacagctgataggaggctgatgggtctaatctatgacaccaagggtgatcatgaagctgccttggagcatctagtgatggccggcacggccatgatagccaatggtcaggagacagaggtggcctcagtggattgcagcattggtgatatctacctctccttgggccggtatgatgaggctgtgtttgcttaccagaaagctcttactgtattcaagaccagcaaaggggagaatcatgcaactgtggcttctgtttttgtgcgcatagcggatctgtacaataagtcagggaagctgagggagtcaaaatcttactgtgaaaacgctctcaaaatttaccaaaaacctattccagggacttctctggaagaaattgccactggtttaactgatgtttcagccatatatgagacgatgaatgagcatgagcaagcactcaagttacttcagaaggccttaaaaatgtacaacaattctgctggccaacagagcacaattgctggaattgaggctcagatgggtgtcttgcactatattttgggcaattatggcgagtcatatgattccttcaagagtgcgattgcaaagctccgcacctgtggtgagaaaaagtctgccttcttcggaattgccctgaaccagatgggattggcatgcgttcaaaggtattcgataaatgaagcagcagaactgtttgaggaagctagaacagttctggaacaagaatacgggccttaccatccagatactttaggagtgtacagtaatcttgctggaacttatgatgcaatgggcaggtaaactccctacttctcgaacccaattcattgtctcaactaggtgctgatgactgtctgtgtgtctgcatgcataatgatttgcattccaattagtgatttgctggaaaaaggtactatggcaagtggggattctttggtcttagtcgactcctcttccagctaggctcatgattagcatctgtaccagctccagctccttgctactccaattagtcgattagatattgatcggtacagtataaagttggatcaatttaattgaagcaggaccatcttgcatcatctttacttgcttatcactggctgctctgtaaagaagggttgcacatactttatccttttgctttatatttttctatttgttttctccctccatattctcgtggaaacttcattcggctttgtaaggcatgtggatttttagctttatcatagtctgagtaaatctggctggatcagaaatgtcaacactagcttagctggctagatcagattgccgaagcaaaggtactatcctcctgagttactttagaagaagtatatcacctatcagcacccctgtgtcttgctaatatgaaaaaaaatgtgtttcattttagccacaattatctgttgatatttgccttttgtttcccagacttgatgaggccatcgagatcttggaatatgttgttggaatgcgcgaggagaagctaggtacggcaaacccagatgtcgacgacgagaagcggaggcttggggagctattgaaggaggctggccgggtgcgaagcagaaaggcaaagtccctggagaatctgctcgagaccaacccatatatcgccaccaagagaaatgcagttgctgcatgaatcactgttctgaagatgaaaggcgaggattgttactaaggtattcaattggttcgttcagatgggggtaacgggaatattggtgcttacctattaagaaaatatgaaatgatcaaatcactgatctcaaattctttgctgtaaagttttcaaatactattaccgttacatgtacagtgctcttttataccgttcttgagaaaacgagtggtgggtactgattctctttctctagctcaggtgcgagcttgcattcatcagttgtaccttggtttttattacattaaaaaaagttaatgccaaaaaaaaaaaaaaaaaaaaaaaaaaatccgagagagggggccggtaccc

SEQ ID NO: 16512 - DNA, 2268 bp, Zea mays
  unsure (1)..(2268): unsure at all n locations
  Clone ID: MRT4577_115057C.1
agggtttgggattttgacgcgtcaattcgagtgccgactgccgaggtgttcgctgnggatgagttggtagcgaatatggtacgatcgggggtctttcttgggttgattgatgcaatgccggtcataattgacctgatttcgtttcttcgattaatctagcggatcggtgaacactgtcaggagatggcttccctgtgattttattttatcctgcaaaggattgcgataagcattgcggcagttgttttggcctttatgataaagatgcatttgttctattcatatttttatggtactactaactggcaatcagtccatcgtccacacgactgactaaacatagtggatggcgaaacagaaggactttgcctgtccttttcgtgcattcttttaatgctttgattggtataattactggctagccgactgttcgtggtacgcgtgggctggacgcgtgggtggacgcgtgggcggacgcgtgggtgatcgattgggtacctcgaggccggccgggacttctcttccaattcccatagatcgatcgccgacccctcgagcaacgcgatcgcccgccgacccgacggcggcatggacaccgagtccttgcagcaggggagctcctcgtcgtggcacacgacgggcgccgtgtcgtgtggagccgcgcagcagcagaagcgccagcggtgccagggttcttccagcgatcaagctggttccagctcaagtagttctctgcaaatatcagaaccagaaccccaacaaatccaagaagaagaggattactatatggaggatgattgtgatgatgattttgatggctacgacgaagatgattatgacttcgatgaagctgactttaaccagcaccttgctgataaatttgatgatttggatcttcctccaggcgtggaggccaccgtaccttggttgcagaaaactacacccaaggaagatgtcaaagagccacctaaatcaaatactgcagatgagaatgcaaataaatatacgcagttcaagcagtttgatactgttcagaatttctctgaccattactacgctaagaattctcatggagagccaaacagagcctggtcaaagagagttcaacatgactggaaacttctggagaaggatctaccagcgtatatttttgtccgggttgctgaagatagaatggaccttcttagggctgcgattattgggcccaagggaacaccttaccatgatgggcttttcttctttgatattcacattccctctgcttatccttgtgctcccccgctggtatattaccactctggaggacttcggattaatccaaacttgtataacaatgggaaagtgtgtcttagcctgttgggtacctgggatggtagaggttgtgagaagtggaatccagctcaatcgacaatgctgcaagttcttgtctccattcaagctctgattttgaatgacaagccatattacaacgagccaggatatgagtcctatgccaacactccgaatggagagcggttggctttggactataatgacaacacctttctgcactcatgcaagactatgttatactcacttcggaggcctccagagcactttgcagatcttgtcgctggccactttcgggtgcatgggcacacgattctcgcggcatgcaagcactacatggcgggtaatgatattgggtcagtggtgccagaggaggaggaggaggaggaggaggaagagtcatcagaacacaagagcggtgatgctggagcatcgggtagtgcaccagagctaggagtgatcaaggcaatccctacgaagagacgcagctcattcaatccaagcttgaaggtgctgtacgaagatctgctgatggaattcaatgtgaagggtgccgacacaaggaaattcatcgatgagaagttgaagaagaacaaacctgcagccgcctgaggaacatgcttgcaggcaaagcttttgtaggtataactggtcttggtggtgatatctaggacctggaacttgcttgctcacatgtagtagagagtatggtttaggggtggagtgctgagagagttctctctcggcactatttatcgccaatctaaatctaatgataggtttaccgcatcataaatatatatgtaacggctatatcgtctttcgctgattgttctggcatatcatgataggtttacccaaggacgaaagctaagtaccaattggtttggaactgtaaaaaaaaaaaaaaaaaatcggatatttgacgccataagttcg

SEQ ID NO: 16513 - DNA, 405 bp, Zea mays
  Clone ID: MRT4577_115058C.1
ctgtgcggcgctcgaggcggccgggtccggagcaaggcgccgggattccaagtctaggtttctttccttctgtctttctttggcacaagaatgtggggctaagtcacagatagtgaagtcaagactcagctcgggtaagaacggatgacaggtcgataagtttactagttttgcagctttacgagcataactttagaaaaaggaatccaattatcttagtagccacgtgttgaataactttagggatgaagccttaccaatcaccctattccgccgaaccagcattcctgataccttcttcctgtgcttatactctctgaaatggagactaggatctttttctttcttccggcacctttctttaagctagtcgactctccctcgatggaaagtggatgaccggag

SEQ ID NO: 16514 - DNA, 1036 bp, Zea mays
  unsure (1)..(1036): unsure at all n locations
  Clone ID: MRT4577_115059C.1
tgggtacctcgaccggaaaagattccatagatcgatcgccgacccctcgagcaacgcgatcgcccgccgacccgacggcggcatggacaccgagtacgtcgaccaccccgccggtcgccgccgcgatcagacggcgcatctctttttcgcacgcgggggcctttttcctttctctatcccccatctttgtcgatttcttttagttttcttccccccttgaggatgatgatgatcgcctcgggccgtcggctcctgcaggtccttgcagcaggggagctcctcgtcgtggcacacgacgggcgccgtgtcgtgtggagccgcgcagcagcagaagcgccagcggtgccagggttcttccagcgatcaagctggttccagctcaagtagttctctgcaaatatcagaaccagaaccccaacaaatccaagaagaagaggattactatatggaggatgattgtgatgatgattttgatggctacgacgaagatgattatgacttcgatgaagctgactttaaccagcaccttgctgataaatttgatgatttggatcttcctccaggcgtggaggccaccgtaccttggttgcagaaaaatacacccaaggaagatgtcaaagagccacctaaatcaaatactgcagatgagaatgcaaataaatatacgcagttcaagcagtttgatactgttcagaatttctctgaccattactacgctaagaattctcatggagagccaaacagagcctggtcaaagagagttcaacatgactgggaaacttctggagaaggatctaccagggccatgtctactgctgtaagaaggtacaatcatcctgaatggtctggacaggtttccctggcgtatatttttgtccgggttgctgaagatagaatggaccttcttanggctgcgattattgngcccaagggaacaccttaccatgataggcttttcttctttgatattcacatcccctctggctatctgtgctccccgctggatattacactctgnagacttcggatatcaact

SEQ ID NO: 16515 - DNA, 442 bp, Zea mays
  Clone ID: MRT4577_11505C.1
cgactcgagacctcgcccgcccaaatacaaaagcctcagatctcagtgaccagcgccgccgcttcgttcgtgtcgaatagagaagagaggaaatgtgggcgatgcgctcggctctcgctcccgtcagatatattcggttcaagccagtttggggaatggacgtgcctctcaagttcgctcctttgcccaggatggagatccagttgagcatcctcctgtcggtggcgatcatctcctgaagggcatattctctgaggtatcagaagaagtttgagacagatcctggtgttcttaacaaggaaaagattactattgatccagatgacgcacgggtgagtttctcgttatggcgaagtcctgaagattgtcagggaaaaggtggatcttctctctgatgctcaaaggagtaaactataccattgataccttcaccaccggcgtc

SEQ ID NO: 16516 - DNA, 624 bp, Zea mays
  Clone ID: MRT4577_115060C.1
gcacgaggagagagagagagagaactagtctcgagttttttttttttttttttttttgaactatatggcgtcaaatatataaaaacaagtagaccgtaatacagttccaaaccaattggtacttagctttcgtccttgggtaaacctatcatgatatgccaaagcacagacgccagaacaatcagcgaaagacgatatagccgttatgatgcggtaaacctatcattagatttagattggcgataaatagtgccgagagagaactctctcagcactccacccctaaaccatactctctactacatgtgagcaagcaagttccaggtcctagatatcaccaccaagaccagttatacctacaaaagctttgcctgcaagcatgttcctcaggcggctgcaggtttgttcttcttcaacttctcatcgatgaatttccttgtgtcggcacccttcacattgaattccatcagcagatcttcgtacagcaccttcaagctcggattgaatgagctgcgtctcttcgtagggattgccttgatcactcctagctctggtgcactacccgatgctccagcatcaccgctcttgtgttctgatgactcttcctcctcctcctcctcgtgc

SEQ ID NO: 16517 - DNA, 927 bp, Zea mays
  Clone ID: MRT4577_115061C.1
atggaagactcctttctcattaggacatcctactgctcagaggtggaaggattccctcatcttttacatagttgcgtgcttcgcatgaggatccgcaagaagcctgagtacgtttggaaggaataccgcgagaatggaattgagaaatgctctatggcagtctacctgggagaaagccgaaactacccaaatcaccctcccttccaagtcgtcgccactggacaccgcttcccagacacttgccaaaatgttgcccaaaaggccctccgccagctatgccaaaactacagcagggaagtctccgagacaccccttcgttactttccacccagcaacaaaaatactcctacctggaggaaaagacttcaggccttgtcaggaagagatcctactgaggatgaccccaccatagtctacatggccatatatctccacacccttgacaaccactatgacaacattttctcccactacacccacctaatttcctggatggcttcggataaaaccatgcctactgcctcagggattggagcaaggtctcccctaggtgctgaaggagaagtcgatggagaagggagtgaaacccacctccccgcacctccggagctgccattagacttagcccaagttctggccaaccaaacccgactcattgaggtcctcaccagaagccttgagaaccagcgcccgaatggtggaaggcctcaggacaggatgggagattttctaaggctcaagcctcccacattcgctggatccaacaacccactcgacgctgatgattggctgcgcacaataaaaaggaagttagaggccatcggatgccctgaaaaccagcgtgttcatcttgctgctcatcaactctctgggatggccctatcctggtgggatactttcagcgctaccgtccgagatgctacctag

SEQ ID NO: 16518 - DNA, 409 bp, Zea mays
  Clone ID: MRT4577_115062C.1
attgttaatgtaggacgggagaaaagcagccagggggggtttattctgtggacataacaggataacagaagcgcaaaatgggcattagtgtggtagagacacacttcaagcttctaacaagaaaatggaagcggctgagtccgagctcgaggacaatggcggattaatgcctcgctttacagggatgcatgtgtgtatccagctcatcggttctgttagtgcaaatcaaaaaagaaaaagacaaagcgctattgggtttcggctgatcaactgccatcctgccaagcatatgacaccaaacatgtgaaacaaatattaacagaccaaggtgacatcttgttgatatgacaaccttgagggaacagccaaatggctacagcgcattgactgacataactgtagtacggga

SEQ ID NO: 16519 - DNA, 580 bp, Zea mays
  Clone ID: MRT4577_115063C.1
acataaacacagatatgaaattataattaggagttgttagtgcaatggccgcctcattaaaaaccttcttaggtaaaaactcacacctcgtgagaaaaccctaagaaggaaaaaagagtgcagcccagctccaaagtttataggttcattacagtccattacagtgtacagatcattagttcaatacaactcataaaacataagactagtaggttgcaagactaagcattttcatcatccctagttgattgtgttgctggatcatcaagcataggttgtcgtgctcagcttcaagttcttgtgtgtcttcctccacactgtgttgtaggtgaccatcagcaagttcccaatccttgatgcatgataatatctctaccatattaggagctagacgacgtcgacgctcttcaatcaccctgccagcaagactaaaggtagactcagaggaaatagtagatgctggcactgtcaagacatctttagctagtagtgaaagataggataagttaacttatgctgatgccaccaagaaaggacattgaagtcctcatcaaactcagtgatagtaccactgtctaag

SEQ ID NO: 16520 - DNA, 591 bp, Zea mays
  unsure (1)..(591): unsure at all n locations
  Clone ID: MRT4577_115064C.1
gtacgcctgcaggttccggtccggaattcccgggtcgacccacgcgtccgaaactaaaaaaaaaaaaaaaaaaaaaaaaaaaacaaacaaaaacaaaaacttaagagcaggccaaaaagtgaaaatcctgtttgttgtttaaaaaatgaaagtgaaatttcctcagcccaaaatgaaagtgtaaactgaataacctccctgcctctccctgcttccctttcccctccctttctgaagtgttcctggaatcccagccctctcctggggactgagggtgcaaacagcaggacagatagttgtcatccttaaggacttgagggcacctaaaaagccagccatcatcagaccatccgtatgaaatatgataaatactaagttactagaagggagctatgagtttgattaccaggggtatcctgtcgtgtctaaaaggtttcggaaaggaggggcgttcatgctaatgtgtgtgctgtaaacaggggaggcgcggaggagtgatgcataatgagtcatttagggaaagtatttgatatatatgagntagaagagacaatttctcttagcaaggaacttgctcttgaaattttcaag

SEQ ID NO: 16521 - DNA, 547 bp, Zea mays
  Clone ID: MRT4577_115065C.1
gtgtttttttttttttttttttttttttttttttttttaaaataatatatagggggttcttttatatttgcatcactactatcatgagggactgcttcagtctccatggtttccgtgtccatcttttctgatgtatagtcactggggggcgtaccatcctctgtttcaattgttcctgtgtccttgttctcttctaaatctgtctcatggaaagatgatgtatcagcagttgcatctgtttctggagctgctgcctcagcaagagcagtattacttttcacaatttcggggtcctcagtttcttctgctaactgggaattgtctgcttcggtgtcagaacttggttctgttgatgtgaactcctcaaaaaaaagagtgttagatgagacaatttcttgaaatttatcagcttggtttccttgagtttggcagattcttgatcctgaagttgttggtgatcaacatctggttcagtggttgcatcttctgggacagactcagaggcagagattgttttttcctgagaggtactttgacattttttggc

SEQ ID NO: 16522 - DNA, 235 bp, Zea mays
  Clone ID: MRT4577_115066C.1
caggcacgcctgcgggcgccgggccggagttaattgcttggtcgacgagctttcatgtcggccgccgcccgcgatgtacagttgtggtttttttggggagcatagttgtgcattccccaacgttttagatgctatatgctgtcaaagttgggctgagccaaaattgtaactgataccgattccattaactcattgatacttgaaagaaggatcgagtggtgcacattataatccc

SEQ ID NO: 16523 - DNA, 375 bp, Zea mays
  Clone ID: MRT4577_115067C.1
ttttgaatatggggtataggacacacatgttgctggcgacgttgttggggatgattatacgatcactgttgcgggaagttgagaagatgatgatgatcatacagagaaaaatgttgatgcatatgttgatgaaaaggttgtagacctgaatactgttcaaacaccttagtttgaagaggtatacaacaatgttcatggagggagttatcagggagcatatacaactaacgggggaatactggaagatcattcaaaattgcatgttggtggtgcggctgatacatgcgagacacgtgttagtgcatgtgatactgtcactgacacagttgctgaaagctgcgagaagacattagcaacaaggagtggggaggatag

SEQ ID NO: 16524 - DNA, 143 bp, Zea mays
  Clone ID: MRT4577_115068C.1
acacaaacgtctgacaaccttcctacgatataagacactttgcataaacgtgtcactggccaagattaagcggtggtaacaattagtcgctcgatccgccgagctcatgtgggtctcagaaagctcatcaggccaattgcaag

SEQ ID NO: 16525 - DNA, 633 bp, Zea mays
  unsure (1)..(633): unsure at all n locations
  Clone ID: MRT4577_115069C.1
ggtaccggcgccccttctcgagntttttttttttttttttttttttttttttttttttttttttttttttttttttttttttggcagggcaaattttgatcttgcttttttgaaaaaaacaatcaacaagggaaagactgtcccttgtacagtataccgggggggggggggggggggggggggggggggttaacaaccgaatcaggtttcagggggaaactaacctggggggggggggaaagggcccaactgaaagccctgtaattaacgagccgttttccaagacgcagccaaaattacggtttactggctccccccttatgctgcctgcaccccaaatttttttctcccctcctccgggtggcgggcccactcccacccaatacgaatggaataccatttcccccaactgtacaacagggggctagacgaccaaaaaaaaacattttcaaacacatgtccgttttcccgccacctgggtggatcactttcacggggcgcctgtttccgtttgggggcacaccacgtcccacatgtcatggggggttgggtaggacgggggggaacaggattccccgtcagaagctaatagcctcgcacttcacagggagagcgcggtcaaacccccccccg

SEQ ID NO: 16526 - DNA, 556 bp, Zea mays
  Clone ID: MRT4577_11506C.1
tccaccgcggtggcggccgccctttttttttttttttgataactacgtgacctttgataggccgtttattactgaagttgaagcggacctcgaattggcttatatttcacacaggaaggtaacaaggggggcggtaaggggtccatataagcaaacaatccttttggaacccatgagttatcacccacacatattatacgctatgaccgcactttgcctctaatgatggccgcatgaacaaatgtaaaggaagagcactcttatctgtagtgggtctcacgaacaagtgaccactagtgattcgacccactgctgaaatagatataccatgtaaacattaattcaattggtcattcttgctgcttagatcttgggtgttaccagatagcgtgacgtatgactaaataactgacactcactccagtgagaagaacactgaactattttttggaaccaaccattcttgtatattgaccgatacctacctgaagaactattactggatcttttgcaaattgccctcttaccaaaagactaggtcgacggttgccttact

SEQ ID NO: 16527 - DNA, 248 bp, Zea mays
  Clone ID: MRT4577_115070C.1
aggtattctgtgagctgtcaaaccacttataattatatagaaatgtaaatatcggcacagcacagcttgcaaagtagcaagagaaagcggaaacgtacacacgaacagtagagatcttgaaggcgcagctagtacagacatctacttaagcacaatactacacgctaacagagacagaaagagagagaggctccgtacacaccaacactagagtagtttcaagtacccttacaatgtatgcccaagca

SEQ ID NO: 16528 - DNA, 269 bp, Zea mays
  Clone ID: MRT4577_115071C.1
agccgtcggcgcctccatgggtgccgaaaactgtatcggccctcgtcgttccctgactctcctttcactagaatgatacaaggcaggccatcccagtacggggaagaggatactgcttccaaccactatcttcatcaggagcttctcgaacctaatgaactattccccgaccccggtcgcatctgcatcctgaatcattgcgatctccttgactacgactacaacgagctactacacgcagctaattgcgggggcggaccttgctgctc

SEQ ID NO: 16529 - DNA, 403 bp, Zea mays
  Clone ID: MRT4577_115072C.1
aatgaagtgtgggcaacatgttgacagcagatggggacatcaagggatgagacttgggttactttagccaccctgtgaggagacacacgtcccagtatgcgatttcatgcctgctcctgcagtgccgtgacataacagtttcagctgatggaccgacgtgatacgtaagactgctctatgtctatgtactattgcaactttttgcactttcgtaggctgcactattgccatagccctgtgattgttgttgtgttgcaatgctgctttgcaaatgggcgtcttgttcaatatctactccctagatactaagttgcaagatgctttgacttcgcgagattagtagctttgactatgcacttagatatacaccacgtcaagagtaatcagtaatgtatctgggaaa

SEQ ID NO: 16530 - DNA, 628 bp, Zea mays
  unsure (1)..(628): unsure at all n locations
  Clone ID: MRT4577_115073C.1
tcgcgatctacgccctttttttttttttttatactcgaatggaacactgttagctacttcttaatcttacaagcaacaaggaaaccaccaataaaaatccgatagaccaacatctgagaaatcactaattcgattcgcatcacagtagatatgaaagtcacacgaagataatatagaacgagattgttgcaacgacgatatctatgtatttcgtgtgctccctagtgagcagcagccgaccaatcgcgtaggacacataatcgacgatggtgtactagacctactagggacaatagaggtctggcccaccaaatgagcgtcatttgtttggtcttgtcgatcagcatgcccatcacctcatgcgtgagggtcttgagacctgttgtcctcgagagcgcaccttcgccacaatgtgtctcatgtccatgacgttgttcactagaatgttgcagtcatggcgtaggtgctcgacgtcgccccgccaaccagatgatcatccttgtatttagaaaacacatcaaaatccaaatctagaagatattctaacgcgacatgttgatcacgatataactgaagcggttcacgcgtccgccagncccgtncgcccacgcgtccgcggacgcgtggg

SEQ ID NO: 16531 - DNA, 410 bp, Zea mays
  Clone ID: MRT4577_115074C.1
ggccgccctttttttttttttttttttttttttttttttttttttttttttttttttttttttttttttttttttttttttttttttttaaaaagcacacccatgctgaaaatgggggggtccccaggcaaaggcacaaattttacaaaagcaaagggggccggaattaaggggtacaggggggtaacccgggcggggacaacggggggtccagggaagaaaacaatgcggggggggccggcccagggggggcctgagacagtcaacaatgcatgcccgggcacgggagaaacaaaacgggggcaaggggggggggggggctggatcccctagctgccctgcccaccctagggggggggggtttgggctttaaaaagggggggggggggagctgctcgggggggggggag

SEQ ID NO: 16532 - DNA, 284 bp, Zea mays
  Clone ID: MRT4577_115075C.1
ccctcctaatcaaattaaaataaattttttgtggggtttttttaaattatgggggggttttcccccccaacccagggcccctttagaaatgggcacaaaaccgggccacacatgggcaaacgggggcccccccattccaaaaatacgggccataataaaacccgaaggggggacccctggggcaaccccggaatcccggcccggaacccgccagcgtcccaatttaccctataagaaagagttttaaaacagggaggaaccaagggcaaaacggtttcccgggg

SEQ ID NO: 16533 - DNA, 248 bp, Zea mays
  Clone ID: MRT4577_115076C.1
ggggtgaaatttattggggggtttgtattacctaaagcttattccccaatgagggtggttctccaactaaaaggacccctggaaaattgaaaagaaaaatggcctccggggaaaaataaggggggatcactaactaaagaaagggtcattaacactagggcaaagccataagttggagggatccgcagaacctccttttttaatccaaggaaggttccgggattccaacaattattccaaacacaggg

SEQ ID NO: 16534 - DNA, 605 bp, Zea mays
  Clone ID: MRT4577_115077C.1
ccggccgggacccacctattcctcaggagcagcaacattccttccccaactctgcagggtggtcggcagactccctccacgccagaagatgcccaatttagagacaagggtgaaagatgagatcataacgcatcctcaaggaattaaaggacctgtaaaaggagcctccaacgacatgcagtgcaaggactgctgcccgaggatatgatccactggtgatctatcatgatgagtacttgtgatatgccatatgctgtaggtgctatattatcgaaaatgagtttacgcttgacctagcgtttaaggtctgcgaaggtatctttgaagacctcggtgcttgatctcgatctcaagaacaatgagaacatatgtttctgcattcttgatgagcaggactgccctgtattgatgatctctgacgcaatgatatgtgtgtgctcagtgatcagtggtggcaacacaaaaaaatctctagttgctgagatggttctaatgaacatcatggatcgtgcctaagcactatggatgagtgcgcggttgaacccgtaattatgccatgggtatgaaaatgaaaggaagtctaacctccgttttccgatattact

SEQ ID NO: 16535 - DNA, 282 bp, Zea mays
  Clone ID: MRT4577_115078C.1
gaagagtactttcttctttcaccacaacttaatcctatccacacatctatctacaaatattcatttacgactacagggatcttatctaattaataatcacttcatccattcatttctacaatattgccctatccctactatactatacttcttcaccataaagtctggtttttatttcaataataatatgcacttatttatttgttttacatttactcctttatcttaattactgtattcttaattctacctcactatatatctattattttccttatttct

SEQ ID NO: 16536 - DNA, 2119 bp, Zea mays
  Clone ID: MRT4577_115079C.1
atggcagagaggacagatttaattagagtaattctcccagataagtttaaaaatcaactttccatcctggaagtgcaacagacaactagactgtttcatcaacaaagattatctcggttgctcctcaagcttgacatcaccaaggcctttgactcggtctcctggccctttttaattgatgtcatgcagcagtttgggtttggacagatctggagggacatggtttgtggtctccttgcttcatccaccacccaagtcatgctcaacgggtttcctggtcagcaaattcggcatagaagggggcttagacaaggggaccccctgtcaccgatgctgttcatattggtcatggatgtccttggacacctatttataaaggcagaagaggcaggtttattgcagcagcttgcagcaagaagacagcttcacagagtctccatttacgcagatgatgtagccctcttcttacaccctacggtggatgaaatctccatcactctggatatcttgcagctttttggcagtgcctctggtctcaaaactaatgtgcagatatccaatgtctaccccatacagtgttcagaagaaactctcttggaagtccaaagtctgctaccgtgtgaggtcgcagcttttccttgcaagtacttgggacttcctctttccttgcacaagctgtccaagcaacagttccagccgtatgttgataagtttgctgaccaacttcctaattggaaagctgatttgatgaccagagcaggcaggagaatactagtgcaacatgtgctcacaggtatgtctgtgtacctggctatggcaattgatataccccactgggcggttgatgctatagataaaataagaaagggctttctttggagaggaagaaaagaagctaaagggggacactgtttggtggcttggggcaaggtgtgtcgcccacttcagcttggtggactgggtatctctagtctaccggaacttggatgggccctccggatgcgatggctgtggctacaaaaaaccgactctagaagaccttggacagggcttcctattcaggttccaagtaaagccagagcgttcttcagtaaagtccttgtctcgatggtaggtaatggacatagtaccctcttctggtccgataactggttgcagggtaaaagcatctcgatcattgcccctagcctattttctataatcccaaagaggatagcaaaaagtagaacggttcatgaggccttgttaaacaacagatggatttatgatattagaggtggtcttactgttggagttctggcagattactttaagctctgggactgtctctctggttttgagctgcaccctctcattgaagatagacacatctttagtatagccccagatggaaaatattcagcgaaggcagcttacaagggtctcttcctgggatcatgtacatttggacactataagcgggtttggaaaacttgggctccatcaaaatgtcgtttcttcctctggctggtggcccataacaggtgctggactgctgacagattagcaaaaagggggctcaatcatcctagcagttgtccattgtgtgatcaagaacctgaaactattaaccacctgctggtctcatgtgtgtttgcaaggattttctggtataatctgctcagaaagttcgggttggataacttggccccccagccgggcctgacttccttcctggattggtgggagatgatttctgaaactgttcagggaatggtcaagaaaggtctgaattcactgatctctttgggggcctggatgatctggaaccaccgtaacaaatgcgtttttgatggacaaactccctgtctcccctctatccttcggcaggctgatgatgagagaagactgtgggcattagctggggccaagggcctctcttttttggcagcttccttaacaaatggctgaatcctgctgtttctattttagtagttttttgagtctggctttattggactctttcacttataggaggtactggcctccgtaaggagcttattgtttgtaacctggtctattttagacctttttcctcttcttaatatattttaaggcgcagttcccctgcgctttcgag

SEQ ID NO: 16537 - DNA, 614 bp, Zea mays
  unsure (1)..(614): unsure at all n locations
  Clone ID: MRT4577_11507C.1
caaattttcatcctaacaaanaggtctgaggtttttcttccaagacatgaggaaggttctaatctctactacttcttatgtctttattgtaggcgtccacacttttgacgcacggttctgccatcgccgatccgctcgattcctcctccatcccgtggaggccggcgagatccgcggttgcatgcccccgcctgcgattcccctccccgcgcccgtagcccccgccgccgtcccgcgcccgcgcaagattcttgccctccattgcagccgcatccatggcagccgcgtgcccgcgtcccgcgcaagatttaatctcgcgcccacgctgttgtgatcgtccgctctctccagctggagatctccagaatcgacgtgtctacgtcgtccatggaaggagaatccgatgccgcttcggatctgcgcgccccagcctccatggaaggggagcgtccaacgccgccccagatttgcgcaccccaacctccatggaaggggattcagacgcttgctaacctctccccatatcccccgtcccgccgctcctcctcctctgtcctcatcacgcgtcgtgtgcaacaacccccttcacgcgagcgtgtggcgacgggcgaggc

SEQ ID NO: 16538 - DNA, 296 bp, Zea mays
  Clone ID: MRT4577_115080C.1
acctcgagacggccgggaaagcttctagatctccctccctctctgtctgaccagctaggatcatcgaaaccaagaatggtgcatgccgccgtctcaccgtgctcgaggatctgcagcgccgtgaactgctgcccagcactgctggcgccgagatgacggaccggccgactggagccgatatgtgccaaggccaccacctctgaccggggcaccatgaccgcgaagaggatgccgggcacggcaagcgctgccgacgtcaacggctcctctcggcgggactgcgagttcgatccgct

SEQ ID NO: 16539 - DNA, 2156 bp, Zea mays
  Clone ID: MRT4577_115081C.1
ctcacttgcatttttggcacaccagaacagaagaagaaaaaaaaaacaggcactgagctgagatggcgaagcacttggctgccatgtgcaggtgcagcctcctagtgcttgtactgctctgcttgggctcccagctggcccaatcccaggtcctcttccaagtacctgcgcagggtcctcgtctcttaccggccgatcgctcaaaaaatactcatcaatcatgcgtgctagaaagcacaagcctggatttaattttgatgctgatacatatatgctgcgagtctgcgtgcagggtcgttaaatcgcctatgggctcaccggccgatgacaagctccggcggcggcggccggccggccggttattaatgcactgtgcgaaagcaacgcctcgaggccaagcacatccggcgtgcatgctcgactataaatacccggccggttgcaccggccagtttcatccagccatcgattctcctccagttcataggcacagcagcagaaagcgccaggagcttaagaacatggcgaacaggggcttgcatctggctctgttcctcgtccttctcgggctgtcgtccaatttggcagccgggcagatcctgttccagggcttcaactgggagtcgtggaagcagaacgggggatggtacaacttcctgatgggcaaggtggacgacatcgccgaggccggcatcacgcacgtctggctccctccggcgtcacactctctcgccgagcaaggctacctgccggggcgcctgtacgaccttgacgcgtccaagtacggcaacgaggcgcagctcaagtccctgatcgaggcgttccacagcaagggcgtgaaggtcatcgccgacatcgtcatcaaccaccgcacggcggagcaccaggacggccgcggcatctactgcatcttcgagggcggcacgccggactcccgcctcgactggggcccccacatgatctgcagcgacgacagggcgtactccgacggcacggggaaccccgacaccggcgccgacttcggcggcgcgccggacatcgaccacctgaacccgcgcgtccagcaggagctcaccggctggctcaactggctcaagacggacgtcggcttcgacgcgtggcgcctcgacttcgccaagggctactccgccgacgtcgccaaggtctacatcgacggcacccagccctgcttcgccgtcgccgagatatggacctcgctggcctacggcggcgacggcaagcccttctacgaccagaacgcgcaccggcaggagctggtgagctggctggaccgcgtcggcggcaaggccagcccggccaccacgttcgacttcaccaccaagggcatcctcaacgtggccgtcgacggcgagctgtggcggctgcgcggcgctgacggcaaggcacccggcttgatcgggtggtggccggccaaggccgtcaccttcgtcgacaaccacgacactggctccacgcagcacatgtggccgttccccgccgacaaggtcatgcagggctacgcctacatcctcacgcaccccgggaacccatccatcttctacgatcacttcttcgactggggcctcaagaacgagatcgcgcaccttgtgtccatcagggaccgccacgggatccaggcggacagtgagctgcgcatcatcgaggccgacgccgacctctacctcgctgagatcgacggcaaggtcatcgtgaagattggatcaagatacgactgcgggcacctcatcccagaaggcttccaggtcgtggcgcacggagatggctatgccgtctgggagaaaaactgagccaaatctgtgcctgatccgtccgtccggtccggcacgacgagttttagcggatttgacctgcattttccttagcttattattactccaaatacgggatatatatagcgacaacctgtattcgagattcatccgtaaacaggtgaggtgaggatgaggggtatagtatcaagtatacaactatctgtttttcaggaataataagaatcactggatatggtgggtgtatggttctttgtactgcattttatttaccaatagccaataggcaagagttgtggcataaagaaaacatgtttcacgaaagcaaataatgttcgagcaaacgaaaaaaaattgtttttggtc

SEQ ID NO: 16540 - DNA, 378 bp, Zea mays
  Clone ID: MRT4577_115082C.1
tcgaaaatattatttgctcaaacacctgaagtctggtacctgtggatatgaaatataaataaagaatttgttggactcttagccaacagttggaccattagaaccaatattaaaaagagtattttatttgctatttgggagcacagtcttttatattgtaatggttcaacattctgtatctataatttcattcttcttgtgcaactgtttgactagaagatccacaaggtacagatacacaatgataaggaaatactactgtaatgttaatatctaatggtaatatatgaacaaaattaactaaatgttggatcaccacaatgctataggaaatgtgaatgttagagaaagaataatgaaagagcgattcaacatata

SEQ ID NO: 16541 - DNA, 789 bp, Zea mays
  Clone ID: MRT4577_115083C.1
tccaccgcggtggcggccgcccttttttttttttttttgaaggatggcaccatgccttgttcattataaccatgtccttgtttacagaagataaacctagataagcaacatttgggacataatgcaatccattggcgattgtacagaaaacacacccaggacaacgatttgctatgtgacaagaaatgtatcttccacatggaattgctttatgccctgtgagaaatagcaccggccaccgggctccatacttccattatattcttgcaaaatactctagcaaaacattggacatcactgctttcaaaaaacagtaatacagcacctactgaaaagccaattcaagtacctacttcagttagaaatgattcaaaatatctgctattcagcaccacatggttaactcgctcttcagaactaaaatatattctacaccagctctttgcacttgaatgacacacggtagatccaccagctgcccagcattccaatgagatgcagcaccctcccatctactaattcaatggttccaattgaaaaaaacttgtaatcttcagtaataatatttcttgtacgcatgtactgcaaaaaaatcaaaaatgtttagttcaaataaattcttgaataaaggaagagacgcaccctggaaagaaaatagaaatctgaatattgatgggcatgtgtgtcattatttgtggaataaacaattaattcaattaaatccatatttgcaattattaagtcataattcaaggaaaactccaaagttggacctcctaaatttaaaaa

SEQ ID NO: 16542 - DNA, 346 bp, Zea mays
  unsure (1)..(346): unsure at all n locations
  Clone ID: MRT4577_115084C.1
gggggcaactgtcgggggggccgtttttcttttcattagtggtcggcntccggatcctttttcaccccgcaggggccccaaatgccttttggtgcggttttcttcttttcgtttggctttttncgtttctcttcctttttttcgggtttccctctgttggcttgcgccctttcttggctggttccccggctggtggtccgtttttgttcttgggccttccnggcgctgtttccttttttgtttcccccccgttgcttcccggtcccccgcgtgctggttccttgggtgggcttgcgctcttttttgtggtgtgtttttcggggggttttctttttttttctttttc

SEQ ID NO: 16543 - DNA, 394 bp, Zea mays
  Clone ID: MRT4577_115085C.1
gcttcttcataacaaaaacctcagtggaactgggcaaaaaatccccgtgcccagccacatcttacagggccacaccataacctgggccagcaaccactactactaccccaggtaggattgcactgttaccctaagctggcgctctgccactactttttgtgagaggcaccacgagttttttttgggtgcaagttgggccggctggctggtaccaatacttggtaacaacacactactagtgtgtttgcttcagtctcaactatgtgtgtatagaatgtatcaagttcatatagtacaagactctttacatatttcaacatgaagcaacaaagacaagaagtctgtttcttccttacacaatttttgggcctaaccagccttggtacttcttttg

SEQ ID NO: 16544 - DNA, 1171 bp, Zea mays
  Clone ID: MRT4577_115087C.1
gggcaggatttccctcttccatatgccgatctcccggacacggtggcctcccgctgccggagcgccatcgccgccgcagcaagcggcgcagggtacggtttccgccgtggcgccgaagcgtcgacccgtcgtgggttcccgttctcggcccgcgaaggaggcggaggccacggctcgacttccgtctgcggactactactcagagctaaagaccctggagcatgtagagaaaaccaaaaaatatcagggtaagcttgcagcacagttgaaggccaaatatttttccaacaagacttttgaaaaaggatacgtgttcgaagaaattgttatagggtccaagaccatccggctaagcaggtggccgtttacaaggttgtttgcagatccagcaaaattttgccaagaaaagagctctactgtgaaggacatgtctccatctctgactggtgaagccatgtgaaatggttcagtaactcatttagctcatgaccacccgacggataagaactcagtagctcgtgtcactaacttctatctgttatccttcaaatcagtgactgtatgttttcactaggcccaagttaaccttgtacagttttgaaccaaaggtaggtttcgtttggtggacctgtttaattacaggtatactgagatccattgcctatatatatctatggaagtacactgacattgaaattattcctccacagggatgtttcagcttttcacctgatacatgggtgtcactcatatccatgaccttggcatagtttcctattccttttcttctgaaatgatgtaatttgtggggcgccagcaccttgtctcctaaatattctgtttgcagtaccaacgtcctttagcgctctggtgccaattattgcaatgcatcttgtgcacaacacgaatggcaatctggaggtgccataatgacgagcagcggagcagatggatgaacacacctgaactgcatgagctacctgttatcttcatgcatgcaacggtttgtcggagtgctatgccctcttgtactttccagttgtttcgtttcttggtggtataaggaaaggtccatgggcagcactgtgagacatggcatggtggatggtgggtgcatcggtgcttgttccaccggccctgtgatgtgagcatctcacgctggggtgttcag

SEQ ID NO: 16545 - DNA, 996 bp, Zea mays
  Clone ID: MRT4577_115088C.1
actccatagggcgattgggttcctcgaggccggccggcaactgaagaatcacagagaacggactgggtgcgtgctctgcgctgacaagagcagcggcaggcaggtcgtggatcgccttgggcggtgaataattgaagaagaagaagaggcggagacttgagcgaggcagagcaggtgtgcttcgctgccaggaggcttcctgtgcgtgcgcgtcctgcgcgggatcgacctcgtcagctgcgacgccaagggcagcgacccctacgtcgtgctcagcctggatggacagaaactgaagacgagcgtgatgaagaagacggtgaacccgttgtggaacgaggacctcaccttggccgtcatggacgcgtcggcgcccatcaagctagaggtcttcgacaaggacacgttcagcaaggacgacatgatgggggacgcggagttcgacgtggaggcgctggcgcagatcgtgcagatggacctggaggacatccgcagcggcaccgtcgtccgcaccgtccgccccggcggcacgggaagctgcctcgccgacgagagccacatcatctgggacaagggccacgtcgtgcaggacctcctcctcaggctccggaacgtcgactccggcgtcgtccacctgcagctcagatgggtcgccaccccacctgaaggtctgtaaccaatgcaatagaatcgttatgtacgtgctctcgctccatatccccatgggaagaacgtacggattcgctcggcgtgacgatgatactatgcgatgcatgcatgctcaagagtcaagatgtcactgtcttctgtgtattttagtacagccacgtacattgtcgccatccaacatcactatgcatggacttttttttttgatataaatatatatatgtggaactaactaatttattaatcacgagttcatcaaaaaaaatttaaaaggcgccgtctagagatcaagcttagtacgggatgcgacgtatgtctcatagtccc

SEQ ID NO: 16546 - DNA, 428 bp, Zea mays
  Clone ID: MRT4577_115089C.1
tacggctgcgagaagacaacagaaggggatccacatgaaaacacaagcacatcctggaaattgggctcattgagaaacagagactatctcgacaaaatgaaacacgtttgcgtagcattcttagctctacaagttgtgtaagtccttacaattattgctgcagatccagcatggaagggctacgattgtcaaaaggcataaaggtcactaaagtattgcatggaatacctcactggtgatgttgatagcccttcatcttcatgttgcaatggtgtgaaggaattgtaagcatccgctccatcaaaagatgaaaaaattggtgaatgtcagtgctttgaaaatgcactaactacaatttctaattttaagcatgactgatccttctgcacttgctaaggaatgtggtgttgatgtcgtcattcccatct

SEQ ID NO: 16547 - DNA, 838 bp, Zea mays
  unsure (1)..(838): unsure at all n locations
  Clone ID: MRT4577_11508C.1
agctctcccacgagatatcgaggacgaaccggataccggatggtccccgtcgggcgccggcgcgggtttgtcaccttcgccgctgcggcgatcgctctgatgcagatcagttatctagtgttcccgatcagtgcgcagcaatccaatggctcaagggttgtaccagcagaaggttactgttccatgtacggcatttgtgcacaacgaagtgacgggaaggtcttaaactgtgcaaatgcaaccaaagctgttaagccagacacattgttttcttcaaggatccaaagtttgtgcccaacaatcactggcgatgtctgttgtactgtagatcagtttgacacattacaccaacaagtccaacaggccgttccgtttcttgttggatgcccagcatgcttgaggaatttcttgaatctcttctgtgagatgtcttgttctccaaaccaaagcctcttcattaatgtgacttcagtaaagcagattaatagcactatgactgttgatggcatagattactatgtaactactaactacggtgaagagctatataactcatgcaaggatgttaagtttggcactctgaacacccgtgcaatggattttatcggtgctggtgctaaaacttacaaagattggttggcatttattgngcgacaagcaaaccttaatgagccagggtcaccttatttgataacatttggatcggattttagtgattcatctggtgtgaagcctctanattctacaatttattcttgcggcacccctttcttgngntgttccatgtggtgattgcccttcttcttctgnntgcgcgggatccttgctgcctcagctg

SEQ ID NO: 16548 - DNA, 402 bp, Zea mays
  Clone ID: MRT4577_115090C.1
gggcccccaagggcaagggttttgatttaaaaagcctccaaaatttcagcaacctgatctattttggggacccccccccccgaaaaactaggactctatggggaaaaccacgtcataacacccctgggcaaacaagcattaaactttttaacccgccactcgattcaacaccccgaaaaacaaaagcttccacccatataggggggcgaccccccccaactgaaaaaaatatgggtcacaacttgcaataaaaaaaagcttccacccatatggggggggggtcccacgaaacaatgcttcttcctaggacccttttcttctagccttccaaaaatttgttcggccccgcaaagcaactcccgcaaccccggtatggggggaaagggaaacaagctctgaacc

SEQ ID NO: 16549 - DNA, 327 bp, Zea mays
  Clone ID: MRT4577_115091C.1
atcacatattattagtgggtgtttttttttccataacgcggggatataggggacttcccaatgaacttgttacccactgaacagcttggcaagataatgtttttacttgcctatataacaggaatcaaaaccccccacccaacaatgttaaaagggttgtctccagatccaaatatcaaccttccaagcattcgttagttgattcctgtgtgaaaccacttatttctgtcacccatccgtagttgttaaataagaaccttgtaagctttgacgccaatataaacaaacactgtaaaccgaaacatcatcagctaccatgattttttt

SEQ ID NO: 16550 - DNA, 223 bp, Zea mays
  Clone ID: MRT4577_115092C.1
gagaatgcatattaccacagttcttacacaaacccgtcatttgttagagattgggggattaagaagctaaaggctattaaaaaaaaaaagggaaaaattaaagacgggcacggtcactttcagagacagggaaaaaaagaacgaaaccgtgaaggcaaggcgcgaacttatgtggggtgccacggataaaaactttatgggggtccaagcaccaccccatcaa

SEQ ID NO: 16551 - DNA, 328 bp, Zea mays
  Clone ID: MRT4577_115093C.1
ggcatccgagtcccactagctccggccccgtgtcttcattccccagttaactccgttgtacgtctctctccctttcactagctccgatctccttggatcgatctcctgctatctcctccgatccgatccacttgtcgacacgatcgatcgtcgtcgtacgcctgcttggcctacatacgactgctactaatggagacggcgctgcagcagagtgctgctgctactgctggcggcggcatgaggccggccggcgcggcgacgacggggaagaaggcgaggcaggagctggagctggagcaggagcgggagttgcggtttccgcaggcgg

SEQ ID NO: 16552 - DNA, 398 bp, Zea mays
  Clone ID: MRT4577_115094C.1
ctgttcagtagatcgatcgagtgacaatgtagtaactagctagctgttcccttcttgactaaactggtgcttaataattgagtgctgagcaaaaaagttaaaagtacactacgccggcccgttcggatgatacctcgaagcttgagaaaatcgtgggctgcaggagcgcgatgtcgaaggtcgggatgacaacgttggtgagcgccttgtccagcctcatgtctccgaggtgctggcgaagcaggccatggaggtacttgccgtcgtacttgggccccctcaccatcctcagcgtgccggcgatcttggacaggatccagttcctgcagaactcaactcacgcgcccgccagcatctttaatttctcttcattccgtcgcagtggtggaggagtaaac

SEQ ID NO: 16553 - DNA, 401 bp, Zea mays
  Clone ID: MRT4577_115095C.1
gggaattagacagattttatgatttggaaaattattccagataacgacaattaatgggttacaggaatgctttccggggctgggatggcttacaaattgcgattttggaagacgctggttttgcttcgtctcaccaacatgaaggaacaaatgtaattcacatcctacccgggcatatttgattaaaaacaacaaacttttaaaaggctcagggggggtacaaaagaacccagcttataaaataggggcatttaaaaacatgcttgttttacatggaatcaccgccaaaagagggatgatttccgacagaaaatggaatgggttttatcaccgcataacaaagtcttccgctttcctacaggggtgattccataaagttttgggctgttgacttgggaact

SEQ ID NO: 16554 - DNA, 380 bp, Zea mays
  Clone ID: MRT4577_115096C.1
atttgagagctttgatttttctcttccattggatagctcaactactgaagaaaaggcatttgggagtgttcatgattccatacaatttggtacatttaattcagatcccgctaataaacatgagatgagtgcagtaagtggcatgtatcagctattggcaactatgtcagggaaagctacaaactgcttgtttaatgatgatgaaaggcaacccggtgaaagtattgatggtagtgtaacagatatttttggttcaagtggattgggacataagggttctttcattactcctgattttgcagcgtcatgttcttcaaatgctgcgaacaaaaaggataatggtgaaaatccattgaccccttctgttgaaaagtattgtc

SEQ ID NO: 16555 - DNA, 625 bp, Zea mays
  unsure (1)..(625): unsure at all n locations
  Clone ID: MRT4577_115097C.1
gacgcctgcaggaccggtccggaattcccgggtcgacccacgcgtccgcaggccgcggctctttctgcgagcggcgcgcggtcaggcggttgttcgcaagtcttgcggcgcgagtgtctcagaagtgagggaggaggcggcgctggtggcggcgccgtcgtctgtacagaggcccgcagccagcggcttggccgcatctcgacagcgcctggggcgcggcgggcgtcggcccaggagacgcgtggcggcgctcggcctcgcggcatcggcggctgcctggccgttggcggcgagcgcacttgcgcctgcgcagcgggctccgtgcccctcctcccctgggcggcccccccacccccccggcggcgtgtgaatggcggcctcggcggcagcgactgcagcggcctcggccgcgacggccgcctcggcggcctctggtagcccagggtcgggcgagggctcggcgggcggtgagaagcgtccggctgcttcctcagccgcggcggcctctgcagccgcgtcgtcccctgcggggggcggtggcgaggcgcangagcttctggagcactgcggcgtgtgtcgcgagcgcctgcgggccgagcgggatcctcgggtgctgccctgtgta

SEQ ID NO: 16556 - DNA, 371 bp, Zea mays
  Clone ID: MRT4577_115098C.1
gcaaccagaagtgttaagtcccaacagctttattagtcttaggctacgggcactcgtgcgcggcggctgtttatgacacgagcatcgaaagcaagagcactaactacagcaattggatgcggctgtctacgctgcgaaaacgccatcgattatccgcataaacagcttatcatggccgacaccctatagaggtcgcctctgctttggagatgtcaactgtatgttacacaataccacagtttgatgcacgtacggaccaaagactatgttgcatagatatttgtgtcattcatgtaaaatgtatgtggtagatcgatacacaagaaaataatttagtttgttaatttgaaactttgtcaaaataaataaat

SEQ ID NO: 16557 - DNA, 434 bp, Zea mays
  Clone ID: MRT4577_115099C.1
ccccgcgcgggcccctgcccagaataaatccgtgtcgccacgcgcatttatcgcggggggcgctgcataacctggggcgcgagcccttgcggagcggccgtcggtgcacaactgggtggcaggagcagatatccacatgagacctcaagaggacgaacaggctgatggatccatgcgaacgggacttgcacagggataagccgctcctaaaggacgggggaaacccggtagatcgcgcgatcacacgcgtgacccgagagggaatcggcttcagatacaaccgagccgtaacttggcggatgacggcgaccataggaagtccggagactccggaggaggcctcgggaagagccaacttttctgcttaacggcaccacaaccctggaagagcttaagccggaggttgagggcagcgaccggaagagcaccataca

SEQ ID NO: 16558 - DNA, 171 bp, Zea mays
  Clone ID: MRT4577_11509C.1
gtttgtttctatatcctcaaggacagcgggaagagtgaactgcgaagcaagaaactgtattgttatgtggcttgctgcgcaagagagaagggaaacgacgagagggcgagagcggcataagagctgataccgttggtgtaaccaagggctggtggaaaagctgaaggagac

SEQ ID NO: 16559 - DNA, 141 bp, Zea mays
  Clone ID: MRT4577_1150C.1
cacctcggtcttatttgcgcggctggaagtttctgtttgactgcctaggggtggggtgggaaatcactgtgtaatatcgtgtctgagctgacttaagacggcatcttacattaacatccctgatcatgattattgctcagc

SEQ ID NO: 16560 - DNA, 250 bp, Zea mays
  Clone ID: MRT4577_115100C.1
ccgtcatcgatctcgtttcacatccatccatcctcgtttcactccgtcccgcaacatctcaaccccatggcaaagatcaagatcgggatcaatgggtatcagcaggatcttaaggctgcttgccatcatagccctgcagtctgacgatgtctagctcgtcaccgtgaacgagcccttcatcagcaccgactacatgacctacatgttcaagtacgacactgtgcacggacaatagacagaccatgtagtc

SEQ ID NO: 16561 - DNA, 198 bp, Zea mays
  Clone ID: MRT4577_115101C.1
gggccgcaagaacgggcatcaaaaaaacaagctggaaaggttggcaaaaacaggattcatcctacgttatctcattggctacaggatgcgtggggcccggttcaaatggaaccaccacatggggctggggcaaatcagtttacagaggaataaaaccaagacaatcttcagggtggctgctaaaaaaggacgctgtta

SEQ ID NO: 16562 - DNA, 781 bp, Zea mays
  unsure (1)..(781): unsure at all n locations
  Clone ID: MRT4577_115102C.1
aacaaccagnnnnnnnnnnnnnnnnnnnnnnnnnnnnnnnnnnnnnnnnnnnnnnnnnnnnnnnnnnnnnnnnnnnnnnnnnnnnnnnnnnnnnnnnnnnnnnnnnnnnnnnnnnnnnnnnnnnnnnnnnnnnnnnnnnnnnnnnnnnnnnnnnnnnnnnnnnnnnnnnnnnnnnnnnnnnnnnnnnnnnnnnnnnnnnnnnnnnnnnnnnnnnnnnnnnnnnnnnnnnnnnnnnnnnnngtctgggctacggcaggaagctgacgacaggccagcccatgggagtggacattgacctgccgccgcccaagacctgcagcagccgggacgggcagtggcaggcgaagtacgtggcttgtggcgggcggcacaccctggctattgtggtgtgggcagagaccaccttgtggcgggcggcagaccgtggctattgtggtgtgggcagagaccaccgactgatcacggagtgatcaacttcctgaatcctaatctgggtgcaaatctgagtttgacaatcctgctagataattatagtgttagtgaaataagcataagttatgcgacattaggcatcataaatttttatgtatgtgcttaatttggcaaggaacaaaaatagtcgggaagaggactttgtgcagatgggagagcttcagtatttcagcaatatttttcgatggacaaaaaaaaaatgtatccaaaaaaaaaaaaaaataggtaaaatatcttggaataggatagaattgcccaatttttggaaattaatgcttgtactcattag

SEQ ID NO: 16563 - DNA, 189 bp, Zea mays
  Clone ID: MRT4577_115103C.1
gggattcaggctttcttaattcacaccacccaggtttagagggctattactattgggaaggttaaagaactgctctgttgcatgagttcataaaacctaagaattcaatttggagttctttagttggtcccacttaaaatgtacagcttgcttagctaggaggaaggatcaggttgctctaggtagttg

SEQ ID NO: 16564 - DNA, 331 bp, Zea mays
  Clone ID: MRT4577_115104C.1
ggcgaacggacggacggcgatcgccaagacgtcctggcctgaggtggtccgcttgcacgtgtacgacgcccacaacgcgatcctcaatgaccaaccggacgccgatgtcgtgctgctgcccgtcccgtccctggagaccgcagattatcgccctaatcgtgtccgtgtcttccacgacgtccaccgccatacgccccacatcccatgataatatataagctagccgctatttcctttccttgccccagaacttgaaatatgtatatatacgaggaactaacgcgggctgtgcttcaaaaatcaaatactgaagcgccctaatctcgcgggg

SEQ ID NO: 16565 - DNA, 374 bp, Zea mays
  Clone ID: MRT4577_115105C.1
cacaagctttatttaatttttttttttttatttttttttacaccttcttttgtgcatgataggtctcttgtctgtgtcgtttttggaccgttgtgattgttggcctgcttctctggaacttttaactggccacacgccgggggggggggcggcttgcctcctcggcccacccctcgcaggggggacccatcactgggaggggcaagatggcgagaggttcgtgtctccatctggccagaggctagatgccggggtactgtgctctcggttggcgggaacctgtcctggccttgcgaaccccgggtgcgcgtcgccctacgccggggttccgccctgcgcccgtcctgcggggccgcgtccccctccttggggac

SEQ ID NO: 16566 - DNA, 772 bp, Zea mays
  unsure (1)..(772): unsure at all n locations
  Clone ID: MRT4577_115106C.1
gtctcttccacttcccccgcctgcgtctcctcgcctcgccctcatccgctcgcccgccattgtcgctcctcgtcgctcgccgttctcggtcctcgcctgctcgtctcgccctcctccgcttgtttccgtcatggctcctcgcactgctgctgttgcgtttggctaggggctgctgcgtctggtttgctctccgcttgtgcgtctatttaatcctcctctgtgaggtcctcctttccgacgtctgcctgcccgatcaactgatctcctcgctcctggttcgtggaaggcctgctgcagtttggttcacctcacgccccgcgccttgtctttcatcttgccaagatgtcgaacaaaaggatcagccttctctcgcagatccatgagaaagtgctcttctggaatgctaaggttctcgtgtctcgcatctggcacttccgaggtgggactgatgagggtaacattgtgcacactgacttagtggtgcttgaccaagagggcacccacatgtatggccagattcctcctgagccatcggagcggctgaaagatgtcttggtggaaggcaatgtttatctgatgaagggattcatgtgtaaacaagcaaagcagacttacagggctgttgatagcccatacatgatgcaattcactcgctttagtactgctattccccagccgggtgatgaagaaaacttcccgtaccgcacttacgacctcctgtccttcacggatatcccaatgccaggnccaaacactcgtcgcttttctcgat

SEQ ID NO: 16567 - DNA, 588 bp, Zea mays
  Clone ID: MRT4577_115107C.1
gcagtggaagcagcagcggggacatggacttgtccagccctggccctagtgggttttgtcaacttaatttagtgcccgacgatgagacatgcaagagcagtggagagcagccttttatgggcgtgcctgtgcaggtgcccaatcttgtgatgtccaggtgaaaaccgattctgcaccggctgaagattaacatattagcttctttctggagttacgccgaccttggcgggatgtggtttttgtgcatccccaggttatttttgccagcacaacctagatccaggtttctgcagttttttgaaggctcatcagctgtgatcagttagatgtgaagatgtctcaccaagaacaagtatacagtttgtatgtattactgacctagataagttttcatctgttccctataatttctagggttgatagctttcttaacattttctaggaggaaaggctcagtttggtttctggttttagagcttccagattttttgttgttgttgatttgttgatccagtcttgtagcagtgtcatgacttacataaagttatcctctactgaacttcaattaaaatgtcaggtaggctattt

SEQ ID NO: 16568 - DNA, 695 bp, Zea mays
  Clone ID: MRT4577_115108C.1
catgggtctgcatgaatccgctagctctactggcgcagaggagctgaaccatcatgatgtcgtccagaacggatcgccttctggtaaggaaccggcagctgaagacagttctggtcagcaggagttgcaataagacagtggctcgccttcacaccatgactgcaggggttttgtgccagagcacaaatgatagtttcttctttttttttcgggtttttggggttggttgggggggggggggtttggacgaggtgtgataatgactcatgaggggcgtgttagactgacaggcgaatgtgtttaccgggggtcaggtagataagattttgctttaccttgtggtattcaggcggaggggtagggcagctggtgaagcagcagagaaggaaggcggacgcgtgggctggaggcgcctcagatgacatggaagactgaaaaaacaagtctattgaagactgaaaaagaagtcaattgaagactagcgtagcggccctgggcggctttgttttcacaggatggtattctggtgttgcgatgaactagtcttcatcgggatggatgttgtaggaccttcaggttttttttttattttttttatggaggagctgaaagtttctgacttgggagagtgagggagtttgacttgttttgtttttgtggtggcgttaagttaaagtaagaagaagatgttagat

SEQ ID NO: 16569 - DNA, 347 bp, Zea mays
  Clone ID: MRT4577_115109C.1
aaaaaggggccctcccaaaaaaaaagggccgaaaaaggttttttgggccagaaacctaaggtcccggggctcccccaaatttttgggaaagctttttatgaaaagggtaaattattggcccggggggaaggctccaaaacccttttccccctttgggggggtttggcccccccttcccaaataaaagaaaaagggggtggccacgacgttccttgcccgatttaagggaaagcccagcggggacccctgggggtaccactttggaaaattttgccccccggtctaattttcttttaaggaacttttaaacggggggcccggggaaaaaactcgggcggtccgaaaaa

SEQ ID NO: 16570 - DNA, 508 bp, Zea mays
  unsure (1)..(508): unsure at all n locations
  Clone ID: MRT4577_11510C.1
atggcaaaatgcaaacctgaacctatatcgataaaatggggcagtgtctgtacagaaccgcacaagcttatcgacaaagnatcactagctagctctacatacagatgcacgacccataaacagcgcggggtgacacatcgcctatccagataatgcttctcattgagtcacagaagcaccgaaaaatcgtaccaaccgcttgaacaatgataattaatatgatgacgaacatgtcgactatgagccgtaagtataacagaacggatcgaatttgctcttcatcacgcggatggtagcaccttattgactatctcatcactgagcaagatgatctgggccttgagcgccttaacactctccttattctgcgccttgaggatggcgagcgcctctacgagctcagactacacactgttgcgctactcgaacaccttgggcttcacctccgtggcggtatgcttagtcatccagctaagcgccggctcgatcttggggcgcgccgcctaca

SEQ ID NO: 16571 - DNA, 251 bp, Zea mays
  Clone ID: MRT4577_115110C.1
gccgggaaccccacctctacctggtgccgtctgttgccttcatccatccatcgccgcaaaactatcccctaactatgtctggatcgctctatggggtcatcaagcccgcttttggtcgtagccccctctcctattaagggcctgcgacccgctgccaatggagtgttagtttcaatcagcaggtgcgaccatctagaagatgtagtggacgattattctgaccacctctctttgaccctgaatgccattgc

SEQ ID NO: 16572 - DNA, 1451 bp, Zea mays
  unsure (1)..(1451): unsure at all n locations
  Clone ID: MRT4577_115111C.1
atcccgtggttcggccaagtacaacacttgcctagttcacgttgttgcgtcccaatggactagagttgcactcaactcctttcaagtgatccaatgatcaacttgaataccacggtgttctttttcctttactctttcccgtttgcgaggaatctccacaacttggagcctctcgcccttacattgagatgatcacaaagaagcatagatataagagtgggaagagcaacacacacaagcctcaaagcacgagcacgagcacaaacacgcacacaagtcacaacttgagctctaagatcacacacggagttctcaactcaagaggagctcaaattgctatcacaacgaatcaaatgcgctagagagatgccttggtgctaagagatgatcaaagaatgcttggtttgcttcttcatgcgcctaggggtccctttgatagccccaaggtagctaggagccgttgatagcaatccaggaaggcaattcttgccttctgtcgactggtgcaccggacagtccggtgcaccaacggacactgtccggtgcagatttctttcctgttttggtgcagccgaccgttgacgatttggagccgttggcgcaccggacactgtccgcgaacactccagaccgttggcccggccacgcgtcacgcgcggaattgcgcgcscgaccgttggctcaccggacagtccggtgcacaccgacagtccggtgaattttagccgtacgccgtcgtcgagttcccgagaactgccagttgaccagcgccaccttgggnaaccggacactgtccgcgacccaccggacantccggtgcacccagactnancagagtcttggctgcnggagccaagtctaatccatttgttttttctcttattctagcacttagataaatatgtnagtacacaaaaaccaatgtattaagtctgagaaacatacctttattcttgatttgtactttgtccaccatttacacttacgcacttgtgttggacactaaatcaccaaaatacttagaaatggcccaagggcacatttccctttcaatctccccctttttggtgatttatgccaacacaacataaagcaactaatagaagtgcaacatcaattcaaatgtgaacacaaatttgttttgaatcaaatttggcatatatggatcattctttgccaccacttggtttgtttttgcaaatcaaactcaatttcctatctctaagtcaaccacacttgttgaaacataaagagagatatttcaagagaaattgatcaaagagttcaaaaaaactcccccttttcccataattaagccttctccccacaagagaccaacttttgacaataagaggcaaacaagagtattttgacaaacaaaaactctaactctactattttcaaaattcacaagtggtagctgacccattggtagctgatccatttattgt

SEQ ID NO: 16573 - DNA, 365 bp, Zea mays
  Clone ID: MRT4577_115112C.1
cccacgcgtccgcatggatactgtctgccttagagcttccatggtcgatgaacatggagagtctaattcgtaaaattgctagtgcccttcctcagtatcgagacactctcaatcacgaagcatgaaaacatacttgatgtcaacttatactattgcaatgcaaaactctcccagtctacaactacaagctacgcgatgcaattgctaattacagtctctgacacttgctgctcatgatctctgaaacccttagcatcagaacacgataccactgatacttctctaaggaaagacagttgatcaacattaaacactcacattctatatcatttacccattaaaaggaacatttgcattgcaaccat

SEQ ID NO: 16574 - DNA, 211 bp, Zea mays
  Clone ID: MRT4577_115113C.1
agcgttcgtaagcttaaacctcatgtgagactctaacaagtgatcacctatgactgtgggaccaaaaaagcttatatctgcagcttatccatgctacaattattacttctattaagaaaaagcgggctcttttaaggatcaatttacgtcctcacaaaacgagaattgcatgtcaaaagggtacccaatttgattaaaaagtcgacctttt

SEQ ID NO: 16575 - DNA, 389 bp, Zea mays
  Clone ID: MRT4577_115114C.1
aacacaaaacctttttttataaaaccaaaatggggggggggaaaaggacatggggacccccggggggagaaaaataaccaccacccggccgggggtccaaaggaaccaagggattattattggcggcggcgaacataaaaaatagacgggggggccggtaaaattaaataaccccccccaaaaaaaaaaaaaggtggaactggaagggggcgggcagaaacctcgagggacggggggggggggacaacattggcttggggcccgggggaaaaatccccttcttatttttaaaggagggcggggaggcccgggcccggaaaagccaccacgggggggaaacctaccgggcgcgcgcttggacccgagtttttttttccaggctttccccc

SEQ ID NO: 16576 - DNA, 204 bp, Zea mays
  unsure (1)..(204): unsure at all n locations
  Clone ID: MRT4577_115115C.1
cccgttctgttttttggttgctccngtgctgggtttccttgtctgtccgnctttcngnnnnntctctcttggtccttccttctctgtcctctcccctggtgggcttgcccctttcgggtnnggtngtgttccccttgcttttcttgtttttttgnncngggcgtnccntttttcccttgtggtngcnctgtttttccgggtggt

SEQ ID NO: 16577 - DNA, 3193 bp, Zea mays
  Clone ID: MRT4577_115116C.1
cattgggtacctcgaggccggccgggactggccgcagcgaacaagccaagccgccgcagccgcaggcagacgcgcagcagagcggccatccactgcgccgtcctgttccgcccccaacggctccagaaacgcacgggcgtgcgcgcgcccgcggagcagagctgatcgactgacttgtctgactgagaccgcggccggccgtgatccgcccgctccatggcgcgctccaagaacggctgcctcaagatcctcgtctgcgccggctccagctccgatccctccgccggctccgacgccgacgccgccgaccaccccgacgagaacaaggccatatcagataaaagcatatggagctttcgtaggagatctacaaggcatcgagttttgaagaactctgatatctcagaacctgaaactgttagttccagcaaagcgaaggctgacattgcaccaaacaacaatgtttatacttcaacatattcttttgcctcggagaagcctctgcaacataacaagccaaatgaaaatgttctgcatcaagagaaaccagaggaaatgcctttgcatcaagatagctccgaaaagctgatggagaagccaattgaaaagcatattgacaaacttatggaagaacctgctgaccagataattgaaaaatcaattgaactacctactcaaaagataactgaaacaccaactgatgagccagctgaaaaaataaatgaaacaccaactggagaaccagctgaaaaaataatagagacggcatctgaaaatacagaagggacaataaaaaatgcaaccgaagagacacatgaaatggcagttgaggaactaattgaagagccagaagaaactatttctgtctcatcaactgtgctgaaggaggaggaaaacacctcacttgttgaaggaagcagtggagacccggaggaagatcatctggagtctgcagctactaatcttcagcctaggagtgacacttgcattgcaagggaagagctgctgaatcagaaggatctggtgaaactgcaagctgttatccgtggacatctagttagaaagcaggcttcagaatctttacaatgcttgcttgcgattattaaaattcaagggttgatcagggctcatcaagcacaacattcaccaggaaagattcaggagactattgttcattcttcaggtgagaaattgcttcgcaatggatttgctctcaagctcatggacaacacaccgacgtcaaaatccatttgcataaaatgtgatccttcagaatctgatgttacatgggaatggatggagaggtggacaaccttaattccaccaatcactgtggtgcacgtgccagagcataaagaaaatagtgagttgatgggtgaaactgtgaccgaacaagtgactgaacatgctcagtgtgatgaagacattgttgctttggactcagacctatctttccccaagttggtggctgatgacgtgaaacaaacagtagagacatctgaatttagtgccttggaggctcctgcaagtgtcccagatgaaagcccaaagatggaaatgaaacatgatactgaatcggagttgatcgaaactactaatgttgatgctgatcaagtaactgaccaaaaggctgaaaatgatgtggacaagccttttatgtccttggatcaacaatatacccaagctgatgcatcgagggatccctgtccactttctggaaaatttgaaccgtccaatgaggacagtggcgatgcgtacaattctgagcacacactggagatggaaggtaaaaggtttgtggcgagaaagtcatgcaatccagcatttgctgctgcacaattgaaatttgaagagctgagtacaaattcgacagtcagcaggtccagcagcttgtcacatctggatggggcgagcaagtcaagggttcacgctcctagttcgcaagaagattgctcctcaaagcaagatggcacaggcatgccagatagatcggttggtcatgatactaaaatgattattgctgcatcagaatgtgggactgagatatcaatttcatccacactggactcaccagatagatcagaaggtgacggtggggagatcgtgttggagattggagctctggaaaatagaaactatgtcactagcaaagctgataatgacttcaatactgtccatcccgaggtaaaaaatgctcctgaagtagaagcccagccgcagaagcaaatagaacagaacggccatgttcctgccctcgaaatagaagcccagccacaagacgagcttgttcaggaaccgcatgctgaaccggaaatgccaggtttgcatgaacgattggaaaaacctgtcgcatcttacgccacacctgaaggaactccaatgagccgaacgactatcactgaatctcaagaaacaccgtcaagtgaggtctctgttaataccaaaaagagcaggagcaaaaagcccaagccccatgcaagcaagaggtcgctggctagtcctggcagcgactcagtcggccggagcagcaccgacaacttctcaaaggaatcaaggcatcccaagagagagagctcaagcaaggctgctaaatccgaccacgtcgaacaagaacctcgcacgagcaacagcaacagcaacctgttgccaagctacatgcaatttacagaatctgcaagagccaaggcgtcgtcgtccccgaagatgagcccagatgtgcaggacagcaacccaaggaaaaggcactcgttgcccatgaccgacggcaagcatgactcgtcgcctcgcatgcagcgatcgtcgtcacatgctcagcaaaacgtcaagagcaacgggcctgctccacacagcgcgtctgacaggaagtggcatatctgatgggtaggccgagcagcgtattcgaatgtctagatggctttcttgtgatgaactcctgccttctccgcacactccatctaactcgtcaagttttttatttttccttgattcgtcgttggaatactgagtatagttggaagaagggcagcagctgcctcttgatatgtgtaaatttgttggttgtgtacttgtgttatgtcactgatgtggtttctgtgtgtaatatatgtcgctttgacttgtcatgcaacattgaagagtatatggattggtctgttgtatttggcgaaaaagaagttaaaaaaaaaaaaaaaaa

SEQ ID NO: 16578 - DNA, 331 bp, Zea mays
  Clone ID: MRT4577_115117C.1
ccgacccactcgtacgaacaacaatcattggcacatgtaaccatataaaccatagcgacgcaacaacgggaacatgagttgctgatattactgagcgacctagccgagcataaccctgtcatatacttgaaacagtaagctgcttgcatatgacccacttgctctggcaaacgtacctgattactcgcgacaacaacaactgcaacatattatggccaagatgagtcaactagccatggtgaaccatgtcgtataactaccacttgtcgcatttattcagctatacgagggcaatgcaactacgcacgtacttcgacagtagctgcaacaa

SEQ ID NO: 16579 - DNA, 2176 bp, Zea mays
  Clone ID: MRT4577_115118C.1
cccggtcgacccagcgttcgccccgcgtccgggttgatcagggctcatcaagcacaacattcaccaggaaagatcaggagactattgttcattcttcaggtgagaaattgcttcgcaatggatttgctctcaagctcatggacaacacaccaacttcaaaatccattcgcataaaatgtgatccttcagaatctgatgttacatggggatggatggagaggtggacagccttaattccaccgatcactgtggtgcacctgccagagcataaagaaaatagtgagttgatgggtgaaactgtgaccgaacaagtgactgaacatgctcagtgtgatgaagacattgttcctttggactcagacctatctttcccaaagttggtggctgatgatgtgaaagaaacagtagagacatctgattttagtgccttggaggctcctgcaagtgtcccagatgaaagccctaagatggaaatgaaacatgatcctgaatcggagttgatcgaaactactaatgcagatgctgatcatgtaactgaccaaaaggctgaaaatgatgtggacgagccttttatgtccttggatcaacaatatgcccaagctgatgatgcatcaaggaatccctgtccactccctggaaaatttgaaccgtccaatgaggacagtggtgacgcatacaattctgagcagacactggagatggaaggtaaaaggtttgtggcaagaaagccatgcaatccagcctttgctgctgcccaattgaaatttgaagagctgagtacaaattcgacagtcagcaggtccagcagcccaccgcatctggatggggtgagcaagtcaaggatgcacactgctagttcgcaagaagattacacgccaaagcaagatggcacaggcatacaagaaagctcagttggtcatgatactaaaatgagaattgctgcatcagaatgtgggactgaaatatcaatttcatctacactggactcaccagacagatcagaaggtgatggtggggagatcgtgttggagattggagctctggaaaacagaaactatgtcactggcaaagctgataaagactccagtattgtcgtccatcctggggtaaaaaatgctcctgaagcagaagcccagccgcagaaggaagtagaagagaatgggcatgttcctgcccttgaaacggaagcccagccacaaaaggagccacatactgaaccggaagtggcagatttgcatggacaattggaaaaatcggtcacatcttatgccacacctgaagggactccaatgagccgaacgaccaccattccggagtctcatgggacaccgtcaagtgaggtctctgttaacaccaaaaggagcaggagcaacaagcccaagtcccacgcgagcaagagggcgctggctagtccaggcagcgactcagttggacggagcagcaccgagaacttttcgaaggaatcaaggcatgccaagagagagagctcctcaagcaaagctgctaaatccgaccagggcgatcaagaacctcgtgtaagcaacagcaacagcaacccgttgcctagctacatgcagttcacagagtccgcaagagccaaggcgtcgtccccgaagatgagcccagacgtgcagggccgcaacgccgcgaggaagaggcactcgttgcccatgaccaacggcaagcacgactcgtcgcctcgcatgcagcggtcgtcgtcatcgcaagctccgcaaggcgtgaaaagcagtggcccttctcctcacagcgcgtctggtggcgcagacaagaggtggcatatctgactgatgatgagtaggccgagcacagcagcatatttcgccgtctaatccgttgattcgtcgttgggaaactgagtatggtttggaagacgggcagcttttgccgcttgatacgtgtacatttgtcgcttctcattggttgtgttatgtgactgatagtggtttgtgtgtgccccctttgacttgtaatgcaacagtggcatcaggagtgtgtggattggtctgttgtatttggcgacattgaagtttctgttggtgtggatgctactacgcctctcattaatttttgaaagaggtttgcttcgtatcggccggtgttctccggacgatggtgaggcctggcccaaaaaatacaaacggaacggctttagttc

SEQ ID NO: 16580 - DNA, 692 bp, Zea mays
  Clone ID: MRT4577_115119C.1
attgggtacctcgaggccggccggggtaggaggtacagcggctcagagagtcgactacgacctcgcgccacacatggcatcccagctctccgccgccgtgcccctctcccgtcctccggggatacgccgcgcccatgtccgcggtggcggcgctgccgtccgtgagggcgggcaggaacatgtcgacgtcgcacggcatccgctgcgactacatcggctccgccaccaacctgatcatggtgaccaccacgacgctgatgctgctcgcggcacggctcgggctggcgccgacggcgaaccgcaaggactacggcagccttgactctggaggcgcgcgactccgtgctgcagactggtgaccccgccgggatcatccctcgccgacacgctggcctgtggatgatcgtcggtcacatcactcggcgtcgtcatcgagctcgagaatcatgaacactcggtggcctcgagcagatcatcagggtagatccctactgtctccgagtgatgatatcacactgatcagtctcgatcgcgacgacgaccggcaggtgcctgcatgcgcagactctgtaacgcgtgcggcagcgtacgcggacatggtctgcatgttgatgccattggagatatagctcctgttgctcctctactgatgaccatgtttcatgccatcgctgctacacctacaactgttg

SEQ ID NO: 16581 - DNA, 401 bp, Zea mays
  Clone ID: MRT4577_11511C.1
ggccgctttttttttttttttttttctttttttttttttttttttttttttttttttttttttttttttttttttttttttttttttttttttttttaagggaacaaaggttctttaatttatcaacccattgccaaatggaatccggagtacagcataacagcacaaaacctcttaaggcattgaaaatcctaacaaaaactttttgaaactgttagttcgcttacagaaccacaaaaaactttgataaaaccaaacgaaaggtaaacaccctaaaattccgacccaggagccggccgatccgggccctcaaaaccccatcttggtgcggagccagtgcccgcgcttggcgtcaaacctgatggaggtgtccccgcccatgcggatccaataggggatgg

SEQ ID NO: 16582 - DNA, 502 bp, Zea mays
  Clone ID: MRT4577_115120C.1
catgctacgtccttcctctcgtgactaacagctcaactcctctgtcgactcactgctactccgctgccgtgtgttctcctatctcccatcatcgaccgaagcctccgcacaggcctcgtcctcaccatccccgcaagaacgcgaatcacagacagaccgcgtctgcatgcaaggaccgatgcatgtgacagagactaaccacatacgaaagcccctttttactccgctttcgcatcttgctgaacagactcgtcactttagctggtgtatgtgtatgatgctacgagcgtgatgagtacgagcactaagccggatatggaggtgacaggaacagtgtggcatcctcatgaaccagatcaaggatatctacccgagagatagtgctatcgccatcaccgcccgttgcttgcagatcctagtctctcctcatgatgtagattatgctgaatcggcttatgacatagctgaactgatcatgaattttgcgcacactggaaagaac

SEQ ID NO: 16583 - DNA, 289 bp, Zea mays
  Clone ID: MRT4577_115121C.1
cggaccacacccttccgcccacccttccaacctttctggatttcttcttttggtccgattaaagaaccagccggccagccaaggccaccggagcccggggccggccccccggccagcccaaacctcctcccttccctttttcttccgtttccaacagcaaggcatgggggaaaaggcgaggaccttggcccccaaactaaaattcccccaggggaagcacgacggccttccgttgccaacaagcccgttgaaccggccgtcaccccttggttggcgccaccgcaacccc

SEQ ID NO: 16584 - DNA, 184 bp, Zea mays
  Clone ID: MRT4577_115122C.1
gttaacataagttattgagaagccataggggggcaaccgatatttcggggccaaaaacccgactaaagacggtctggccgtttaccaactaggtaccggcaatcggaaaaccaatcaagggggatgcctaacaacctttacacctcgctaaaacactgcccattaggaataataagttttcaaa

SEQ ID NO: 16585 - DNA, 516 bp, Zea mays
  Clone ID: MRT4577_115123C.1
gggccgaccacgcgtccggcaaaagcatgcagaggattgcctgcagaactggcagcgaagcttgtcgttaagcaagctctgaaaacaagcgggctaaaggatgacaccacctgtgtcgtagttgacattatcccgtccgatcatctgacatcgccacaattgtctccaaagaaaaatcagaacaagttgaagtcactttttcgtagaaggtcgcatagttcagttagaaagcttggaggcaagtctgcctccattggttccgtggaggagttatttgaagaagggtctgcaatgctagaagaaagcttattttcagcttcttcacaaatttaagcagaagttctgccaaacagccagcttctacagcagcttattagttcagctgcttctcagaatacactaaaagcagccaacaagcagaagctgcctttcaccagcttctcagataagctgctttttcaacaagcagcagctgtgccaaacagggccttttatgtaacatataatgtgtgggat

SEQ ID NO: 16586 - DNA, 415 bp, Zea mays
  Clone ID: MRT4577_115124C.1
cctctgcccccatctgtagtgtggtctgcggccaagagcccggggaaacgatcgagacgatatgtgtgggggagcaatccttgccggactcatcccagcgcgggtgcaccggccgctgaccgccgccacgctctgggcggcggccctgagtgggaccagtaccgtcggcaagtggaaggccgatgcagccgccgctaccgacgacgacgacgacgaagagttcgaggccgagttccagcttttcgacgacgacgacgagtgcgaggccgagttccagcttctcgacgaccaccaaccatctcccgcagcttcgcctgaggccagcggctgcaagcggaagcctgcccttgctcctcctgctgatatggccagtactaagactcagagcacgctagcgcgggtcaaggaactgatc

SEQ ID NO: 16587 - DNA, 604 bp, Zea mays
  unsure (1)..(604): unsure at all n locations
  Clone ID: MRT4577_115125C.1
aaatatggccagtactaagactcagagcacgctagcgcgggtcaaggaactgatcgcgcagggacctcacgacgagcggctggcggcgaggatcgtgcctnagctgatgatgcacgggagcagggacgaggctgcggcgttgatcgccgagttcagccgtcagatggaggagatcgctgcgttgcggagggaccttgagacacgcgagaggcagcttgttcagctggtttctctagtacttcgttgaccactcactccgatgatgcatgatctgatgactgtcaagtgtgaacaatgtgtttgtgacactagaacagtcatcatctactgctatagttataggtcctgtttggtacaacttattttcagcttcttcacaaatttaagcagaagttctgccaaacagttagcttctgcagcagcttatcagttcagctgcttctcagaatacactaaaagcagccaataagcagaagctgcttttcaccagcttctcagataagctgctttttcaacaagcatcagctatgccaaacagggccatagccttgtttgcagcttatttctatagaattttgctgggaggctggctgtctcgatcgat

SEQ ID NO: 16588 - DNA, 4837 bp, Zea mays
  Clone ID: MRT4577_115126C.1
gccggccgggttcccaattgggttcgccggccgggagcgcatacacccagagccgcggctctataaagccgcacgcgcgcggagggggggcggggagagcaaaattcactgctccctgcccgtcgaaccagccgagcaagccgcaaacccagcgagccgcggcgcctcgtcgcgcgcgccttgcttgtccgcttcttcgtccgaccgtccgccggtccggtccgagccgagccccccgaaggatggcggagcccgcggcggcggggaggaagacgcgggtggggccgtacgaggtcggcaagaccatcggggagggcagcttcgccaaggtgaagcacgcccacgactcccgcacgggcgccgtccgcgccatcaaggtgctcgaccgcaaccacgttctccgccacaagatggtcgagcagatcaaacgggagatttcgactttgaagctaatcaaacatcccaacgtggttcagctgcatgaggttatggcgagtaggacgaagatatacatggttcttgaatttgttgatggaggcgagttattcgataagatcgtcaattctggaaggctaggagaggatgaagctaggatatactttcatcaacttataaatgcggttgattattgtcatagccgaggagtgtaccatagagatctgaagccagagaatctacttctggactcacatggaacccttaaagtttcagactttggcctaagtgcatttgcaccacaaacaaaagaggatgggcttctgcatactacctgtggaactccaaactatgtagcacctgaggtgcttgctgataaaggttatgatggtatggctgcagatgtatggtcctgtggcataatcttatttgttcttatggctggatacttaccctttgatgatcggcacatgtggggggttccgcggccccacgcgcccggcagcggtgactgttgcggtgttgccgcatccacgccctagtcgaccacgccgcccccagcagcccgctgctgccgcggctcgcgcccccaggagcccccgccgtcgcggctcgcgcctcgtatccgtaacagctacaccgcgccgcctacccccgcttcctgctggctgcatcgtcctcaggtcttccgaaggcgagctccaatccccaaccactattcacaagatgactacaaaacttgagcaatcttctgcggagcatcgcccagcaaaattcgcagcaccatcgtctttgacccccaagatctcaatgtttggggcaaaagctggattcatcatacctaagaacaagctggccggctcactcgtaatccggagcaccagtgacaagaatgaaacaccaactgcatccaacgaagatagcagcaggcatgttcacagaaagacaaagtgggggcctgaccttgctttggaccctgtcgtgtgcaaaggaagggctttggcctaccagactcgagtggagcaaatttccaagcagctgaagtctggagctttggacacgtccgaaattgatggttcagtgtctgctggaaatgaattgaattctattggtcctgacatcttgaaagagaacgagctgggaaatgttgaactattggaacttgaaagacgagagcttatcggtgaaatactccgtttgaatccgggatataagacacctgagaactacaaaccagtacttagggagacaaaaatccctgttccggcagaagcacacccaggaaataatattattggagttcttctaggatctgagagcaatacccagaagagactacatgaagaaactggtgctgtcattcgagtgtatgggactaagaaaatcaatggagagaagagtgagattcgtcatcaagacataaatgaaacacaagatgcttatgaagacctatacatcaatgtatcggctgactcttatgataaagtagatgctgcagttgtgttgattgagctgcttcttgctcctgtttccgtaaagtcgacagctacttcaacagctgctactgtttcttcagcagatacatccaaggatgcagtttcagctaatgtgcaactggagcagaataccacgtcacagccagatctacttcattaccaatcacacaacgcaccttggctgcccacaccccagaccaatgctccatcaattccttccacggggcctgttttgagtacattacctaacaatccatcgcagccacaaccgcctgctggttctttcagtatgcctccatatactggtcaacctcctcacatgaatagcatgccagcaaatccatttcctgttcctgggcctcagcaaccagtaccaagcaatcaacaacatccacctcaatttcgagctaactcctcgattgggccttttttcggtcaaccacctggtattgtaagccaacaaatgccaccatcttcctcaatgccaccgccagttagaccccttcaaataccccatgcctctggtggctggccccctttctctcctgttacatcacaatctcataggcctctgcaagctccaccgacttttatggcagtgagacctcctatttccgtctctcctcttggtgcaactccaccgcaaggtcccattgcattgacaccaccaaatatgcccaccatgtaccgcggccagcatccaccagtaccaaatttcactggttcagcgccattggtttccaggcctcctggtggtggggctcagtcttttcctacagctgcgcctcaaggcccttcctcagtagcatttcccggtggaccatcgctgcggccaccttaccctccggcgcctgatcaagcgagggggccacctccagctttctctccagttggatcaactcctggcatggtgcctccacctattgcatcttccggcctgcctgccccgcgtcctgcgaacacgagctgcatccagacacaagtagtagcccctttgagacctccgctcccagccgcgggcgattttactttccggcctgccataccaccggcgcatgctccagagttcgcagcaccaggcagtcaaatgggagcaatacatggcagaactcaccaccctggaccattctcctcccatcctggtgaccagaagaaccccagccaaggtttccaagggccgtttgatggcagcaggcccatgtacacgacgaatcaggctcggatgcacgctccacctcctccacacttccacggagccttccccaggaacgcatctcctcttgagttcccagcggggttccggggagcctggccgtccgtgcaggcacctccgatgccggcaccgtcacatccatcgtctttcccgccgtttcagttgaggccaccgccaccgccgcagcaggatatgtctggcgcaggcggcaccaggtggcccggtggcaatcaaatctacaacccttttgcaccaacggctgcggcggcggctcagagagcggaggctgaccctgagtacgaggatctcatggcatcagttggcatgaagtagcgaagactgctggctggcccctgatctgtctgtggcacaaacacagaggcttcttcctattgcttgccaagatgtgcgggttactaatctcctccaatgtatctctagatggtactgaattccgttccatcatagacaggtgccatgcttgaacgaaaaacaaaaataaaaaataaactagtggaccttgtttgagacatgctgttgggtgccgaggttgtgctctgatgacatccctctcctcgctccgtgcctggaatcctttccccctttctctccccttcgctgaccgctggaatcaatttagtcgggggaatttaaaaatcctggagctgccacaggaagatctcttaatttataatttgttcgcattcgaaaaaaaaaaaaaactagccgcgggctcttgagatgcttgactacgacgaagagttcgaggccgagttccagcttttcgacgacgatgacgagtgcgaggccgagttccagcttctcgacgaccaccaaccatctcccgcagcttcgcctgaggccagcggctgcaagcggaagcctgcccttgctcctcctgctggtgcccccgcttccacggatccggcgaccccgtgctccaggaagtacaggggcgtccggtaccgccggtcaggcaggtgggccgcggagatcagggacccgcggcaggggcgccgcgcctggctcggcacgtaccgcaccgccgaggaggccgccctggcgtacgaccgcgaggcccgccggatccgcgggaagagcgcgcggctcaacttcccgctgctcatcccgcacgagggtcccggccgtcacgcgcgcacgccggtggccatcgacctcaacttgccgcccgtctccgacgggtctcggcgtcccggctcccggctggcgtcggcgacgacggcacggcgaatgcccgacggagatgcagatatggccagtactaagactcagagcacgctagcgcgggtcaaggaactgatcgcgcagggacctcacgacgagcggctggcggcgaggatcgtgcctgagctgatgatgcacgggagcagggacgaggctgcggcgttgatcgccgagttcagccgtcagatggaggagatcgctgcgttgcggagggaccttgagacacgcgagaggcagcttgttcagctggtttctctagtacttcgttgaccactcactccgatgatgcatgatctgatgactgtcaagtgtgaacaatgtgtttgtgacactagaacagtcatcatctactgctatagttatatagccttgtttgcagcttatttctatagaattttgctgggaggctggctgtctcgattgataatctatctgtctgtttggctag

SEQ ID NO: 16589 - DNA, 157 bp, Zea mays
  Clone ID: MRT4577_115127C.1
tttttttttttatttcaaacaattctcttgccttgatttgattagaaacacgccggggtaagcataaccgggaatggtcgatggcacgcaacgcataggcatcaagggaacggtctagacgacccacctgaagggggagattgtgattcagcttagg

SEQ ID NO: 16590 - DNA, 3677 bp, Zea mays
  Clone ID: MRT4577_115128C.1
aaagacaactgaagagacggatattaactgggttaaatacacaatagagtctttcatgcctgaaaatatggcgcctttccatgccgaacaaaggaccataccggatgatataggccctgtttggcacagcttattttcagcttattttcagcttcttcgcaaatttaagcagaagtcctgccaaacagccagcttctacagcagcttattagttcagctgcttctcagaatacactaaaagcagccaacaagcagaagctgcttttcatcagcttctcagataagctgctttttcaacaagcagtagctgtgccaaacaggaccatagtaatggctactgccctgtctgatgtccaggacattgccttcaacaatcaaccatatatgttaacgaaagcactcagatactacaggtcctaatgccatcgctatgtttttaacctaatgccgccatcgctatttttttaacctggctggaaacagtcaaaaaggcatgagccttatgcaagtgaatcaggtaaccaaactctgaagaacacatatggggggtgaaaccaccatgatgtcttgaaaggcgtcccggctccggctggcgtcggcgacgacggcacggcgaatgccgacggagatgcagatatggccagtactaagactcagagcacgctagcgcgggtcaaggaactgatcgcgcagggacctcacgacgagcggctggcggcgaggatcgtgcctgagctgatgatgcacgggagcagggacgaggctgcggcgttgatcgccgagttcagccgtcagatggaggagatcgctgcgttgcggagggaccttgagacacgcgagaggcagcttgttcagctggtttctctagtacttcgttgaccactcactccgatgatgcatgatctgatgactgtcaagtgtgaacaatgttgtgacactagaacagtcatcatctactatagttataggtccttggtagcctcggcgcggagtcttcttctcactccaagtcactgccgtctcttctgcttcttctaatcctcttgtcccgcgaaccccagtcgctaccgagagcacaccaatcctcatcacctccgagattttcatcgcctgccgcgcaatctcgggatcctagccgtccgcacatcgccgcggccttcctccgcgccacgaatggtgttctctggccgctgtcttttcccgaggacctaacccaaggcggtaggtaccagctaaaagtctaaaggcgaccaccggaccgggcggcaatgacgaccgccgcgagggagaggcgcctgccgccgacgctgcccctggccacgcttatcggtcgcgagctccgtgcggggggctccgagcgcccggccctgcgctacggccacgccggcttcgccaagcgcggcgaggactacttcctcgtcaagcccgactgcgtccgcgtccccggggaccccgcatcggcgttctcagttttcgccgtgttcgacggccacaacggcgtgtcggcggcggtctatagcaaagagcatctgctcgagcacgtcatgagcgcgctgccgccggacatcgggcgcgacgactggctgcaggcgctgccgcgcgctctcgtcgccggctttgtcaaggccgacattgatttccagcgcaagggggaggtgtcaggaaccacggcgacactggtggtcatcgatgggttcacggtcacagtggcgtcggtgggagactcgcgctgcatcctggacacgcagggcggcgagttgcagctgctaaccgtggaccaccgcctggaggagaatgcagaggagcgggagcgcgtcacggccagcggtggggaagtaggccggctcaatctcttcggtggtcaggaggttggtcctctccggtgctggcctggtggcttgtgcctttcaagatccattggggacatggatgttggggagtacattgtgcccattccacatctcaagcaagtcaagctatcaaacgctggaggaaggctgataatagcatctgatggcatatgggacgcgttatccaatgaagcagctgcaaaagcatgcagaggattgcctgcagaactggcagcgaagcttgtcgttaagcaagctctgaaaacaagcgggctaaaggatgacaccacctgtgttgtagttgacattatcccatccgatcatttgacatcaccacaattgtctccaaagaaaaatcataacaagttgaagtcactttttcgtagaaggtcgcatagttctgttggaaagctcgggggcaagtctgcctccattggttctgtggaggagttatttgaagaaggctctgcaatgttagaagaaaggttgggcaggaatttgtctttgaaagcagtttcagcaccttttcgctgtgcaatctgccaagtggaccaagagcccttcgaagatttgatgagagataatggaggtggttactgctcttccccatgcgctccatggggtggtccatatctctgtttggactgtcggaaaaagaaagatgcaatggaaggtaaaagatctagctgctccacagcatgcaggtgaaacagtcctgcctcatcctcaagcagaaaagaaccgatgagagaggataataagttgctggacccaagtataattgtttgctgaaactaactgtattgccagcccggtaaaagacatatttggctggtagtaagagctaactagtctgttacctgcgcacaatccgaatggaaaagtttgttgtcggtgaggacatagctcaaataacctgagcttgtagtttggatgtaccctgtagcgtgccttgtgcagggaaaaattgacctgcctattgctgtttttttttaataaaatagctatcgagggtgattaatggtggacatgtttttaattttttggtgggattgaaagaagtgcatgcctggtgcaggagcgagagtgagtcgtattactaggtttgttctttttttttggttattgaagtacgtactaaagatgtacttatgtgtaaaatgttccttgtgtaatggctgttattgctgaattggttgacatatacgctacttctttaatatcatatgtgaatcatatgttcaatttgaaagcttattttcagcttcttcacaaatttaagcagaagttctgccaaacagccagcttctacagcagcttattagttcagctgcttctcagaatacactaaaagcagccaacaagcagaagctgcctttcaccagcttctcagataagctgctttttcaacaagcagcagctgtgccaaacagggccttttatgtaacatataatgtgtgggatggtaagatactagcatgctaccttgagccttgtcattttcttagcatatctggacaggctgttttatttctgcggcctttgccttttagcctattcccattatcaacttacattaccttgtatacatgctctgtcaattctgtttgagatttcagagctatttttgtggaaaaagaaggcggctaatctatacctttcaaacgcagacaagtttgttcataaactagagcagcgatggtgttttacttgtattttctgtattaatgacgagagcgtttagctgaacttggtgtgctaccatgaccttggtatcaatcttaggagtgcaagttatgttcgaaaaaaaaaaaaaaaaaagcggcc

SEQ ID NO: 16591 - DNA, 136 bp, Zea mays
  Clone ID: MRT4577_11512C.1
gtgatacgaccgtcaacgctcccagagggatctgtaactggtgagacgtggcgctggcagagcatgccggcttgtacatacgtttgcaaaaacgaggtgtctgtacatactggtcgtcgtgtcgtgtcgtgtcagt

SEQ ID NO: 16592 - DNA, 481 bp, Zea mays
  Clone ID: MRT4577_115130C.1
tccggggacacgcggtatcaaccacaaatcaacaatggagaccaagattttattcctccttatgctccttgctctttctgcaagggttgctaactcgacaattatccctcaattctcacaagctcctatagcttccctttttcccccataccttgcatcaattataacttcagtatgtgaaaacccacctcttcaaccatataggcttcaacaagcactctcagaatgcaacatacctatatcgtccttgtggcgtcaacaaaaaccacccctatctttggtgcagccattggtacaaaccatcaaggcacaacacctgcagcaactcttgctacctatgatcaaccaagcaggtgtggctaacctttcttcctactctccgcaacaacactttcttgcattctaccaactgtctacactgaaccctgctgcttatttgcagcaacaactattaccatttagccagctagctactgcctac

SEQ ID NO: 16593 - DNA, 300 bp, Zea mays
  Clone ID: MRT4577_115131C.1
gtaaaacgattttaagcttctggtaacagcgagagcttaagcacaagacttacatttgtgcatgtttttaatacaaatccttaaacagttatgaaccttgttttacaatttttctataccggtacctagagctactggcaagcgtcctcaaatatgtggaaatacggggctaggtgtaaacactgttgaattgataaatttggggttagacttaaaatatttgttttgctaccatttttatacattttttattttttcccgccaccatacaactttaatttgaaaatgatgttgtcccct

SEQ ID NO: 16594 - DNA, 756 bp, Zea mays
  Clone ID: MRT4577_115132C.1
cctcgaggccggccgggatccaacgttccagacgtttctttgaacacattcactcaggtcctttctaccacattcattctttaccttacattccatctttgtgatcaggcatcaccatcacacatttgaaatccaaaaactgtacataacacttatccaacacacgtcaccatgttcaccaaggccgtcttcacgagcgctcttctttccgccgtctcggctcaccagaacctccaccaactttgggtcaacgatgtcacgcccggataccaggccggcatccggatgccaccctccaacagccccgcagttgatttgacgagcgacgacatggcctgcaacgatggcggctccaaggtcccatccggcgtcaagacaatcgaggccaacgagggtgacaagatcaaggtccagcgggataactctggacacccgggaccgatcacgcacatgctttatggtcccgtcgatgatgcttcgcaagccactggtatcggtgctggatggttcaagattgacgagatggactttgtcgatggaaagtgggcttctgagatcatgcaagcagccaacatgacgcatgaattccctcttcccactggccttgtcagcggcgagtacctactccgttcagagatgctggcactccactcttctcagacaagggtggcgcgcaattctatattggctgcatgcaactgcagatcaagggcactggcagcgatggctcatgcacacctaccatctcgcttcccg

SEQ ID NO: 16595 - DNA, 414 bp, Zea mays
  Clone ID: MRT4577_115133C.1
ctcccagatcctgcggctgttcagcgagtctgcagagagcattaccggactcaagggggagatggaggaggcgaagaagctgcttggcaggaagaataagcacctcggccagttgtggtaccgctccctcacactgcgccatgtgctatcccttttggatcaggtcgaggatgttgccaaggttcctgctcgaattgaaaacttaatggcagagaagcagctgtatgctgcagtgcaattgcaagtccaatcagttctgatactagaacgagaaggccttcaagcggtaggtgctcttcaagatgttcgttctgatctaacaaagctgcgaggagtactattttacaaaattttggaagagttacatgcccatttgtacaacaatggcgaatatagctctgcagttttaagtat

SEQ ID NO: 16596 - DNA, 322 bp, Zea mays
  Clone ID: MRT4577_115134C.1
aagaagtgggcaatttttattggttggggggaaaaaaattaataccttaccaacttcatccataaaatttttctttcacaccctattaaccaggcggatcttccacaaaataaggcaaaaatggaaacaaaaatgcaaaacatgttcatacttaataaaaaccttggcaaatccacatttattttttggatacacaagcagtaaccctccattggaaacagggggaaaaccctctattgggttttgaacaattgggggatcaagtcaacaaccccgtttttgtaaccccatttgttgttttaccaaaaaacaaactttacaa

SEQ ID NO: 16597 - DNA, 406 bp, Zea mays
  Clone ID: MRT4577_115135C.1
acgtgcacacgtacgctgataacattattggtacgacgaacactgatgctgccatatcataccacctgcgaggacccgatcagatccatatcactgctacacggtatagacgttctggatcacttataatgaatatctgcatcatcctcaccttatatggatgactatatcccagcacgggaccaattctgtactcacttaatgatcgttgagagctgggaccacacttagtgaaggaaactgtgttcaactaacagaagtggcacccgagtaacttggatgcaccaatgcacaatcatcttatatattacaaattttggtggcatgtgcttatttcaaactaggttacctatctgaaaaactttaggtgcttcttcaaacatggcctgtgttgttgtattaaact

SEQ ID NO: 16598 - DNA, 582 bp, Zea mays
  Clone ID: MRT4577_115136C.1
caaacctttcacagcctgaatttatgaacagttaatacacatcggttctaacttctgtgtttgtaaggatgctaaaagtactcagactctgttaatgtcttcttagataaaatagatttgatttataagtgccagtattttgggagcataatagacactaagcttcaaacgtttggtcaggttcatcatttttaatgcagcaacaccaatgagccccttctcagcacaatgacattgtttacatcttgttaatatcacttgctgcagacaaagtacgtcaaaaggcaacgtctaagtaatatgttgatacacaaagcactgatccttagagacttcatccaacgagatagaaggttacatgtgcgttgttactatctcacgccaactcagacctctactggataacgttgcacaccatgcgactagacagacactaaatttggttgcgagcaacatatgggttgttctcgtgaaggaagttgaacacctcgtccaacagctgcaacagaaaagctcaaggtcaaatttcaaaaaaaggacgatgaccaatatagaaagttatcttaacaatgacagactgtc

SEQ ID NO: 16599 - DNA, 764 bp, Zea mays
  Clone ID: MRT4577_115137C.1
gaattaggcaagcgattattcgcatcgttgcttaggtgctctaacaagccgcaattggttagagattggatcaagttccaggctttttaaaaagtgccttccagcttacttaattgactcgcatgggctttctcgctataaacgaactaaacgaagcgcctaaagagagagatccgcgggacaccagtcaataaagtaaaaagagagtattctcttatgtagtcttattccttcccacccccttgtgggtgctgctcaagcagctcaggaggcgccaaccccacaaccacaggtagaaggagttccaggtgcggcgtccagatcagggactagtggcccgtcctgttcggatgtaaaggaaagatgaaaaacttttctcaaacagtggggaaagggccccatacgtcaaagccagataaagaatctccaacaagattcgaaattggatcgttcaagtccaaaggatagagaagaaatcctcatggtcaccagaagatttttcatcgagacaaaacgctgctaacgctgtagtattggaatattgggactactatactactgcgagcggaaaaaaaagaaaaaccttctgtcgactagagtttgatgtcgatttatccacacttccatgacttctagaggaaagctaactgcttgctggctgggagctgtatgagcggtaacgtccacgtacggctccgtgagaaggtggacggaaatttgttgtacctctgcgcgggatgcgatcgaaaaaaaaaaaaaaaaaa

SEQ ID NO: 16600 - DNA, 166 bp, Zea mays
  Clone ID: MRT4577_115138C.1
tgcacgctgccggaagcggggcataattaatgagctggtcaaccagtgtacttgtgcgctgtctcccacactgtttgcgacgactgcgtgggtgggtggctgaaataaagtcaccgtctgtagtcagagattaaaggctgaataccttacacaatactatcttgta

SEQ ID NO: 16601 - DNA, 412 bp, Zea mays
  Clone ID: MRT4577_115139C.1
ttctttttgactgctgtgcgggagccacaaagcatgggcgttttctaacaagggccaccactgcaagccaacaaagagggcggtcgatgtaatggactagagcttgactccgctcggctgctagcagagcacgatcatataggcgagacttgcggcaaacgactgcgccgcgactacaaccttaggatgcacatgcaccccgacggggaccgctttaagaccctagacgagagctaccggcctggtaactggcagaacaaggaagacggctcgaagcaacgtgcgcttctatctgctcttcagcagtctatagcaggagctatacacaccgaacctgtcgattaatcaaggcggtggcgggagcgccgcaccacttgcggcgcagacactgccccaagctatacgcctgcca

SEQ ID NO: 16602 - DNA, 521 bp, Zea mays
  Clone ID: MRT4577_11513C.1
atcttcatcatccgcgttaccccctctctcttgctttgctctcccacctcaacccgcatctcggatatctccgtcgccgtgcgctttgcgaaggagcgacacttgcaatcgagaggctccactcggacgagcaggacctacccgcagcagggtcgcaccagacatgatcctgtgttactggttctacggagcggtgccctccctcgtgctgaggcatatagctgcgaaaatgctcttcctcggcctcgacaacgccgctttgaccacgctgctccacatgctcaaggacgagctggatgatgttgcaccatcctacgccgaatgcgacgttccaggagctcaccatcactgagatcaagctcaatgacattccatctcgatggacaccagatcgctcgtacctcctgtgaagattactacgcagaggttagatgctcgcacttacctgactcatgcggatgataatgagcgatttgctgaatcagaaaaggagcttgacgctctcctgccagatgattcct

SEQ ID NO: 16603 - DNA, 331 bp, Zea mays
  Clone ID: MRT4577_115140C.1
tttggtttttttttatggttggttaataattatgggggtggtccaacaaaccttcctagtcacgccctgccatgtaaatactcacctccagtggtgctgatacatccaaatgggtaaccagactcttgctcttgactcctatctagagctccaagtctgagagacattctattctcatactaaatagggcacgagactgccagctcaggatcggggtgaacaaaggaagcctttattctggggccttaggggtccagactggcataagaacagctcagtgcgcattcagttacttcacacatagatgttgtcacacgggtgctccccccta

SEQ ID NO: 16604 - DNA, 366 bp, Zea mays
  Clone ID: MRT4577_115141C.1
atgaaggcgaggtcgcagattgcgccgaagcctctcaaggcggtggcgatggcccccagaccgagcggccctaagcggaagccgaggccgaagccggcggggaagggcgacccccgcgcacccaagaagccacccaccaccttcttctacttcatgtatcattttcatctaggattgagattattggttaatgtcattgctgaacttaacatatggcactggtgtaacactaatgtgaaagctctttcagttgtttgcctttgtgttatacaccaatctataatgaagctctatgttgtgctgaagggaggattttcggaagatagggaaggcatgcggcgaaaaatggaatacgatggcatttga

SEQ ID NO: 16605 - DNA, 912 bp, Zea mays
  Clone ID: MRT4577_115142C.1
ctctcaacttgctttttgttgtttgatatcctcattcttacatacctttttgatcaattgtgtattcattgtcacttatttaacaagtaaaaatggcttctactcgtttcccacaaatcggtaaaccagctcctgaatttggcggtcaagctgttgtcgacggtcaatttaagaatatcaatttgtctgattacaaaaacaaatatgttgttcttttcttctatccactcgatttcacttttgtttgtccaacagaaatcattgctttcagcgaagctgctgagcagttccgtgctatcaacaccgaattgattgcttgttcaaatgattctcacttttctcatttggcttgggtgaatcttccacgcaaacaaggtggtttgggaaaaatggaaattcctttgttggccgataaatccggaaaaattgcccgtgattacggagtctacattgaagaagaaggtattagcttccgtggattgttcattattgacggaaacggtgttttgcgtcaaatcactatcaatgatttgccagttggtcgttctgtagaagagactttgcgtttggttcaagccttccaatttactgatgaacacggtgaagtgtgcccagctaactggaaaccaggcaaaaaaacaatcaaaccatctgttgaaaacagcaaagactttttccaagacagcgcttaaattaatttttaaaataaaataattttttaaattttcgcaatatttgttttttgcaaatttgtaaaacgcaatagcttatcaaatctttgtttatgatttgttaaaagtatttcatttatttttgttaatagaacaagcattatatgatttgcgcaactttaattcaatctaaaattaaattgtttaaattgtataattaaataaacgttatttaaatttt

SEQ ID NO: 16606 - DNA, 246 bp, Zea mays
  Clone ID: MRT4577_115143C.1
gacgtcttcatcctttaaccatagcaaattaccttgcttcctctcctttaattgttgcttatgcattggctttcacacttaatattgattcttaaaaaaaacctattgtcatctttaaagattgaaaaaatgtttacttcctatatgttttgccatccacattaaacatatcctaagttgtcaagtcaagttttctcccttacatgttcaatatcacttttaattcaatcaccaaaatgaaattct

SEQ ID NO: 16607 - DNA, 154 bp, Zea mays
  Clone ID: MRT4577_115144C.1
cccacgcgtccgcggacgcgtgggtccgccctcaggacggtggcagtctgcggggggctatatagatacaacaccggctctccattacgacgctacgagggggccgtgtcgtaataagatatcgtccgatagtactatgatgtgggacggttga

SEQ ID NO: 16608 - DNA, 257 bp, Zea mays
  Clone ID: MRT4577_115145C.1
gtcgagttcccaggatgaacgacttaactccctatctgtttggggttatgaggggaaacacttcctcgagggatgatgatgttgagagcattctggaatcagttgatactgaagctgattaagaatgaatacagatcaggctaacagaactcacaggctaggacataacagaatatgcagctgctggaatgtgaaggtttttctttgtgcccacaggcaggggtgcaagggacatgatagatccaccagctggaact

SEQ ID NO: 16609 - DNA, 654 bp, Zea mays
  unsure (1)..(654): unsure at all n locations
  Clone ID: MRT4577_115146C.1
gcnncggccgggatcaacctacgtgatgttgtaggagcgcatacacacactgccacagctcctgcctgtccacccgctggtacctccgcgctgcacgatgccgatcttgtgtgaaaaccctgagcgcatagactatcaccctctgggcgaaatctgctgacaccattgacaacactaaggccgacatccaggataataaggctatcaccccttcatagaagccgctacattattctcctcgggaattagcttgcagcgcacgggacgcacgatatgctgactacaacatctcgaaggatactaccctccaacttgcgatcaaactaccgggagatgtgcaaatgtttctgaagaacctgatcgctgagaatattgccctcgaggtgaacacatctgaaaccattgacaatactatggacaagaacccatacaaggaggtcatacctacaaatacacagtcgctcatctttggtggaaactaaatcgaggacgggagcacgattggcgactacacaaccacaaggaaagcaccctcaacttgatgctgctcctcatgacagggatgcagatcttcgtgaagaccctgaccgtgaagactatcaccctggaggtggagtcttcagacccatcgacaacgacaatgccaagatccag

SEQ ID NO: 16610 - DNA, 822 bp, Zea mays
  unsure (1)..(822): unsure at all n locations
  Clone ID: MRT4577_115147C.1
ccggccgggaatcttggccctcttttctgtcttcttcatctttcaacctctcaacaccattttcctcattttcagaaaccatcataacgacggttttatcgacagtttgttgcgttaccaactcaaccagccacaccacaccagaagaacccctccaacaacctaaaaatggcttctaccaactacaaggaggcttttgccctgttcgacaagcgcggaaacggccgtgtcactgttgacagcctcggtgatcttctgcgcgcctgtggccagaaccctactctttccgagattcaggacctcgagaagaacgttggtggcgaattcgacttcgagacattccagcgcgtcctcaaccgccccggcggtttccgcgaccctggcgagcctgaggaatactgccgcggtttccaagtgtttgataaggatatgacgggtttcatcggcgtcggccagcttaagtacatcttgacaaacctgggcgagaagatgaccgacgaggaggtcgacgagctcctcaaggccgtcgacaccagctcaggccaggtcaactacactgaccttgtgcgaaccatcctcgccaactaaagattgtaaagatatgggcgggttaggttatgcatctacgttgacggaccggcgtttgcttgtttgattatggatatggatggaatcggctacggatacgctgaaatgatgaattattgcttcccttgtacggagcactagcatgtctggatttttggtagataattgggaggcgagtaggagttatgaaataaagctctatatgtccncaaaaaaaaaaaaaaaaccgcggnc

SEQ ID NO: 16611 - DNA, 411 bp, Zea mays
  Clone ID: MRT4577_115148C.1
ccttctttttttcttttgaacaaattatatcccagactgttgcatgggtagaacaaagatgacatcaatgtctttgccacacacaaaagcatggatccatctaactacagtcggaccagtagagggcaaaatgataatgcctctggctgtcttgtaatacaaatacgtctgccagatatactcggaatactccattgactggaacagctagaggagaccaggagggcgtaatatttaatggaaacgcttatgcttaacaggtgttggctagaaccttgttcaggatcacaccattgtactggacctgaaaccactcgatggggtgctgcttagcgaccctgtccttgatccctacacgggacttgtacctgcggacacgggcgacacggtaccgcatacgctcaaggacga

SEQ ID NO: 16612 - DNA, 213 bp, Zea mays
  Clone ID: MRT4577_115149C.1
ttgttaccccggctctccgcccctccttctcgcggcgctcgagggaccatggccgatcctcgcgtgagatagatcaagatcaagaccggcgtggtgaagcggttggtcaaagaaaaagtgatgtatgaaaaagaggcaaaacaacaagaagaaaagattgaaaaaatgagagctgaagacggtgaaaattatgacattaaaaagcaggcagag

SEQ ID NO: 16613 - DNA, 273 bp, Zea mays
  Clone ID: MRT4577_11514C.1
atagaacacacactgtttaacagaaactagtgaattgttgcatctagatacttgtatcttggacagattatttccttgaacatgtttgtcagatctaagggtctatttccctcctctctttgagtttggattcagcctacccttacattctccccttatgactagtgttgcctcagatattcatatatgcgcatcctctacatatgcattcactatctgcatatctatcctggagcatatcatgtctgactacatgaggaaaaccattcttta

SEQ ID NO: 16614 - DNA, 995 bp, Zea mays
  Clone ID: MRT4577_115150C.1
ccacgcgtccgggttgtcccagaacttgacaagagatcattctgggctgatcaaagtaattttgggggtgggtttgacgtgaagcattttattgactctttgagagatgaggtgcacatcattgaacagtttccggagaagcttggtccaagagattcagacattattgtacttgaaatgtcacctgtgagctggtcagatgaaaaatattacttgcatcagatcttaccactgttcagcaaatacagtgtcatccattttaacaaaacagatgctcgcttagccaataatggtatcagtacagagattcaactgcttagatgccgtgttaattttcatgccctgaaattcacacctcaaattgagggattagggaatgaactggtacataaactgcgagccaagggatcatttgtagccttgcatttacgttatgagatggatatgctggcgttttctggttgcaaccatggcctttcacctgaagaagctgaggagctcaaaaaaatgagatatgcttatccatggtggagagataaagaaattgattcccaagccaagaggttgcaaggactatgcccacttactcccgaggaggcatcacttgttttgaaagctcttggatttcaaaaggatgctcttatatacatcgcagctggggaaatttatgggggagataggagactagagccactacgggctgcttttccaaaccttgtacgaaaggtgatgctgctaaactctgaagttctgcgtcaattccaaaatcactcttcccagatggctgcacttgatttcattgtatccacagctagtgatgttttcattcccactttcgatggtaacatggcaaaacttgttgaaggtcaccgaaggttcctgggtttccggagaagtgtggtgctagaccgacggaaattagtgaacttctagacctgtacaccaacaagacaatgtcttgggacaattttgcatcctctgttcaggaagcacat

SEQ ID NO: 16615 - DNA, 2073 bp, Zea mays
  Clone ID: MRT4577_115151C.1
atgtctacttcgccacgaggaacaaaatcacctcccgcgcctccgcgatccttctcgaagactcgaaccgcctggaatcagaatcgccgttgtcgggaatcgctccgatgcccgcggcgatcgggaggcggccgcccgaacgccgggtctagacctcgcgtgcgatggcgaggtcgaggcctagggtttggctcgtggcgggctgcgccgccgtcctcctgtgggcctccgtcgcgcagctcgtcgccgtcggccgctttctcctccttttcggcctcgcgggcgacgccgatccctcgccgccaccttccgcgcttccgcccccgagaatatacacgagcaatggttatctgaagatatcttgtaatgggggtctgaatcagatgcgctcagagatttgtgacatggtggcagttgctcgtcttctaaatctcactatggttgtccccgaacttgacaagagatcattctgggctgatcaaagtaattttggagatatatttgacgtgaggcatttcatcaactctttgagagatgaggtgcacatcattgaacagcttccagagaagcttggtccaagagattcaaacattattatacttgaaatgccacctgtgagctggtcagatgaaaaatattacttgcatcagatcctaccgctgttcaacaaatacagcatcatccattttaacaaaacagatgctcgcatagccaataatggtatcagtacagagcttcaattgcttagatgccgtgttaattttcatgccctgaaattcacacctcaaattgagggattagggaataaactggtacataaactgcgagccaagggatcatttgtagccttgcatttacgctatgagatggatatgctggcgttttctggttgcaaccatggcctttcacctgaagaagcccaggagctcaaaaaaatgaggtctggcagcgtctgcttcaagcatcttatctggtccaggtcgttcagaattgatcacagaccccataatcctctctaaaagatatgcttatccatggtggagagataaagaaattgattctcaagccaagaggtcgcaaggactatgcccacttactcctgaggaggcatcacttgttttgaaagctctaggatttcaaaaggatgctcttatgtacatcgcagctggtgaaacttatgggggagataggagactagaaccactacggtctgcttttccaaaccttgtacgaaaggagatgctgctagactctgaagttctgcatcaattccaaaatcactcttcccagatggctgcacttgacttcattgtatccacagctagcgatgttttcattcccactttcgatggtaacatggcaaagcttgttgaaggtcaccgaaggttcctgggttttcggagaagtgtggtgctagaccgccggaaattagttgaacttctagatctgtacaccaacaagacaatctcttgggacaattttgcatcttctgttcgggaagctcataaggaccgtgtagctcaaccatcctgcaggcgaaaacttgaaaacagaccaaaagaagaggattacttctatgctaacccccatgaatgcctagccaattcaaccttgtgcagctaaactgagtttctggtttctgtaaggtgaccagatgtgagcgtgaaatcattaccaggcaggaattggcacacggttgttttgatgtcgtgttgtcgagggaccgaagccagatttacacagcccatcacgatcttttgacttcgcattccttattatcctgttgtataggtcagtttttagcttctgtattgattcgttcgctttccaacatgccaaaaggggcctgtttggagcatgtaaattttggtttgttgtctaccatttttcttcatcggtgtctaactcgtgctgctaggccgaagggttagctgtttcatcttttggttttgtttctctaattttacaaattcttagtggaattatcacctttttaaaactgtgctgtttcaatacaggagtgctgaacctgtctctctttttatggaaaatgctgtccagtttgcttgttac

SEQ ID NO: 16616 - DNA, 152 bp, Zea mays
  Clone ID: MRT4577_115152C.1
aagaccagggctgcaatataagaaagttatgctctctgtttttatttttaggatgtatatatgtatataggataaaaacatatcatgggggtccaactcatgtgtggaggcaggataggcatggggttcaaccaacaggcgtggagtcacac

SEQ ID NO: 16617 - DNA, 1071 bp, Zea mays
  unsure (1)..(1071): unsure at all n locations
  Clone ID: MRT4577_115153C.1
aaagaaaaggagtgaataatataagagcaaatatccgatggtagctgtgattagaagggaacaaatggcaatggattttttgttgtttctaaaccgatgagttctgactaaacttaaccgggctggaacttctctatacactcagatatatgatagatcgctggacctacaatcctcctggccagaacttctcaatctctcctttattcacagccaattaaccacaaatccccaagcctacacgctccaaagccccaaccaccttcaatccagtccctttcagcagcaacgaccgacaccgacaaaccataactcagaaaattctgtggagattaccgcgctctctctcgaggcctgtagccatcagccaacgctattcactaagcgtgacaatgaccacgtacaccggtgaatctggcagctgctagccattgccgcagggggagctgggcaagagcagaaccagctatccttccttgcgtctgagattggtttctaccgatgcagcggagggggtggcggtgatccatattgaactgggtgtactgatggccatggatggtgttgctgtgggggaggaggcgatgcatatcggacagggtttgtgggtggcaatgggccggggtaatatggtggtggcggtggcggtggccatggatgcgttggggtgcagggcagcggtggcggcaggacggggcatggcgggcactgtggtggcgggtgatagactggcgccggaggaggcggggttggtggaggtggggaatgcggtagtggtgatggtggtggtggtggtgacggcagaagttgaggtggcggtggtgaaggcagcggcggtggcggcagaggaggagacagaagtggcggaggtggagatggcggcggcggcgatgatggaggcggcgaaggcgggggcggtgaaggaagccgcggcggcggcatgggcgggacgaacggtttgcactggaacgcggcgcagttgacaggtgggcgggcgtagaaggcggcgcactgctgcggcgtccgctgcgacgagcggttgggaaggcaattgctccggtcgccgncccg

SEQ ID NO: 16618 - DNA, 1177 bp, Zea mays
  Clone ID: MRT4577_115154C.1
cctcgaggccggccgggacacaataaccagcaaccagtcctcgtccgtgatcttatcatccgccaataatgctgcgccgcaacccaacccgcatcgagctcacctcctccgaccgcgacgagctcgaagaccacctccgcgccgccgcggagctcgccagccaccaccaccaaggatccttccggttacaccactccgtctccagtccttggcccgcagacctccaatcccctgctccaattcctccacccgaagcccggcgccgtgccatccaagtcccaacgcatcggcatcggcctctccaccccgccggctccggccccgaacccgcgaccaccccatccaccccatggaggttgagatcaagctccgcctccccgacgccgccgcgcaccgccgcctgtccgcgttcctcgcgccccgcctccgccgcacccacgcccagcggaacctcttcttcgacgacgccgcgcgcacgctcggagccgccaccgccgcgctccgcgtccgcctctacgacgggcccgacgaccgcgccccctcgcgcgccgtcctcgcgctcaagcgccgcccgcggatcgaggccggcgtcagccgcgtcgaggagatcgaggagcccctcgagcccgcgctcgccgtcgcctgcgccgacgaccccgcccgcctcggcggcctcgactcgccgatcatccgcctcgtcgccgccgagtacggcgtcggcggggacgccgcccccttcctctgcctcggcggcttcgggaacacgcgcgctgtctacgagtacgagcttgaggacggcggcggcggcctcgtgctggagctcgacgagacgcggttcgactttgggaccaggtacgagctcgagtgcgagacggcggagcctgaccgggtcaaggaggtgctggagcgactgctcacggtggccggcgtgccctacgagtactgtcggaacagcaagttcgcctgcttcatgacagggaagctgcttccttgactaggcatagccttgtccgttcttggtatttcccttcttcgtgccattaagctgcatttgaacaacttgaatggaatgtcagtgacgctttgaataatgacaaaaataagtgtggcttctcataaaaaaaaaaaaaaaaaaaaaaaaaaaaaaaaaaccaaaaaaaaaaaaaaaaaagcggcc

SEQ ID NO: 16619 - DNA, 411 bp, Zea mays
  unsure (1)..(411): unsure at all n locations
  Clone ID: MRT4577_115155C.1
cgaacggggcacagccagagacaacgcgaagcacaggggaaaagccgacccgagcggnggcacacgaggcgaaggcaggcggccccatcgaagagaccaagcgcaagggggggggggggaagaccggaggccggcaaccggcggcaagagggagcgcgccgcnggcaaacaggagcgcgagcaggcacccccacaaggagacagacgcncccgaggcaggcgnggcaagggccggacagcagncggcnaagagcagaagcagaaaacagngcgaccaagacagggaagggcggagggcgccaggaaggacaacaaggccggcgcacggccgcaggccggaaccgaggacacggacccggcaagggcgggncagcggagggaaccagaggacaagcgcaccacaagggaagc

SEQ ID NO: 16620 - DNA, 443 bp, Zea mays
  unsure (1)..(443): unsure at all n locations
  Clone ID: MRT4577_115156C.1
naaatcctgttccgcctccacccatttcgtttcaattccattcatcctcctccggtcctctccccaattaagaccagccgcgaccgccgccgccgacgactccccctccggcacccgaaatggcgtgatccccgccctcgattcccctcgccccccgccgttcaaatacctccccgtccaccgcgacccctcacccccccatccctgaatcgcggagatccccgcatcttggtgcccacgagacacagacacagatacacgcccagccactaccacggcagtccgctccgttatgttcgccacctccagcaccaacaggcgcgatgaggacgtaccacgagcgcgcccgccacggagaccagcaccaccaaccttggccgatagagattcctatgtcaacgggcagcaccactctacccacaggaccggacatctataggcag

SEQ ID NO: 16621 - DNA, 433 bp, Zea mays
  Clone ID: MRT4577_115157C.1
atcgaagttgttgttcgacttgttgactcattcatgaacccggtggagtcttccaagtcaaaattgaaatttcggctgacatctgcaagtaccacaacccctgtaactacgactacgagttttgtggcaaaagaatttgtcaacaacagcgatggatcatatactggtcattatgcggcagggggccttggttcatatggcatatgcgttctttttgaggacaaacagctgcctccatgtccattcgaggtcactgttcatgcagatgagtacttttcagatgttaagaatgacactgtttcggtgtgggaggatgaatccgtttccttcgacgtattgtcaaatgaccgcattgcacgcagtcccgcggcgatagtgaactcctcttctccactccacgggctcagccctgcagcccgtaccccacctaccg

SEQ ID NO: 16622 - DNA, 144 bp, Zea mays
  Clone ID: MRT4577_115158C.1
cattgatatcttttacgaacataaacatgattttcccatccggggggagcaaggttcaaaatttacggtattttcttcaacatcgaggaacgatagtgtttaatcaaacagcgtttttcaaaaaagtacttacacttattttag

SEQ ID NO: 16623 - DNA, 510 bp, Zea mays
  Clone ID: MRT4577_115159C.1
atgaggttggcgaaggcgcagcctttactggcatgcttgctgggctccaccggtagaagaagtcaccccttgagattgggggtgacatatccttgtaccatgggacacagtggccaaccggtggggtcttcccctccggtgcttggctgctggtcgatagtgagcacattgaacgccaccatgagaggatggaggccgacgacagtgacctcaagtgaggtggagcctttcggggtgctgatgggaggaaccttgcttgatggcagaagcacgcctattaaggcgttgcttgagatcaatggcgagccgcttgaggcgtcacttcgccatcttgtcctagacgtcggcaagctcaccctggccgagcttgtcaaaggcgagcgggatgtcatctcaatcgaagggccagactctagagcctgcccctacctagcgcaccaaatgttggaggggcaaatcctccggccaggtggtgaattgcacccacattggtccttagaagaggactag

SEQ ID NO: 16624 - DNA, 853 bp, Zea mays
  Clone ID: MRT4577_11515C.1
gccagagcatgctcggcctgggacccgagcctcgtgaacctgctgtcgtgcgcctctttcatccaaggccttctcgaggtcacgctgacctccaaagacgacgccgtgctggagtcggccatgtcgatcatggggaagctggttctggggaacgaggtgatcagacagctcgtgctcaacgcggacccgcagctggaggttttcctgaggctcctgaggagcagcgagctgttcctcaaggcggccgtggtgctctacatgatgaagcctaaggccaagcagatgctgtccctggactgggtgccgctcgtgctgcacgtactggagtgcggcgacgagaaacgtcgagaacgcgaagcagatgatcgctctcggtgggctggacctcctgatcggcaggcttggcgctggcgacgctcgcgagagcaggcactgcatcgctctcctgaccacgtgcgttcaggccgatggcagctgcaggcactacttggctgatagtctcaagaaggagcctctcgttcagcttcttgctggaaatcagaggaaagccagtgccgcgtcccttaacctgatgagtgaactcgtctgccttaacagaacaagcaaaatcgtggagttcatcaaggagctgaagaacagcgggtgcttgaacacgatgcacgttctgctggtctacctccagcaggctcctctcgtccagcacccgctagcagctaccatgctactccagctcgatctcctggtaacctctccgcctttttccctccttcgctcaggcgtctgttttggtattgtattgttcaaatgaagaagcttttcttgcagggtgatccttcgcagtacagcgtgtaca

SEQ ID NO: 16625 - DNA, 1746 bp, Zea mays
  Clone ID: MRT4577_115160C.1
cccacgcgtccgcccacgcgtccggtcatctctattctatcttcttcctctctactcaaagccggcgatcagggcaaacccagcctgatcgacgaggacggctagggggcataacccagccggcgacaacggaccacgactacgatctccgtagtcggggacctgctcacttgggcattacagcccttgacattgactgatacaaatctctgggccctcgtttgtcttatgttaccacttaccagaattgcaatcgatagtgacatctcttggtatattcatgaagacttacacgagttgtgatagctacattggcctcgaggccggccgggccgctgtcgcgccccacagctcaggaatccccacagctcacacaggcacgcagctcctcttggcggcgcctctgacttctcctttttcgtcgcccttctcctttttcgtcgccttcgatcggcggctgcctccttcctccacttccgtcccttcaccgagccgccgccgccactatgaagggacccggcctcttctccgacatcggcaagaaggccaaggatctactcagtaaggactacacttacgaccagaagctgaccatctccaccgccagcgcctctggactgggcctgacttccacagctgtgaagaaaggagggctttattctcttgatgtcagttcagtttacaagtacaagaataccactgttgatgttaaagtggacactgaatcaaatatctctactacattgaccgtgttggacgccttgccatgcacaaagcttgtcacttctgtgaagctgcctgactacaattctggaaaggtggagctgcaatacttccatgagaatgcaacttttgccactgttgttggcacgaagccttctccagtgattgatctttctgggacagtaggtgctcaaggagttgcatttggtgcagaagctgggtatgacactgctacgggaaaatttaccaagtacactgctgcaattggtgtaaccaagccagactaccatgctgcattcattctggcggacaaaggtgacaccattaaagtgtcaggtgtttatcacctggatgagaaacagaaggcctcagctgtggctgagctaacccggaggctttcaacaaatcagaacacactcacagttggtggactgtacacagttgattctcagacagccgtgaaggcaaggctcaacaacaatggaacgcttgccgcgcttcttcagcacgagcttaaacccaagtcactcttgacgatctctggtgaattcgacaccaaggccctggacagaccccccaagtttggcttggcgcttgcactgaagccctgatcagatcatcccacagcgattgctggtgaattttgaattctttggttgtttttcgcaaagctgtagccaataatccgttccacgaaccttttctgttattctggcaaacgtttggagcactgtggcttagatccggatgggtcgtctacaggaattttacctgcctgcttttattgttgaaagcatctggccgtcggtagatgtacattgtgcttgcttctttagcacctaggcctctgccactgtgttactgagtacacgctacggtaatcttttgcatgcaggactagcatgataattttgtgcggtgtttgatttaccgctctttacggtataaaaaaaaaaaaaaaaaaaaaaaaaaaaaaaaaaaaaaaaaaaaaattaggaaaaaaaaaaaaaaaaaaggccccta

SEQ ID NO: 16626 - DNA, 243 bp, Zea mays
  Clone ID: MRT4577_115161C.1
ttttttttttttttgaacatcttttcggcgtgcgtgtccatccactagtcaagcttcttttttaggacaaggctcactcatgtttcttactcccagaggttatattagctttttcgtataccaattaatctttgggggcacaccatcgcgcattttcaaaaaattaacaacgtgggcgtccttaacagagttggtcctaaaccaaaaaaaaaataaaggggggggtgcatctggcgcttccac

SEQ ID NO: 16627 - DNA, 297 bp, Zea mays
  Clone ID: MRT4577_115162C.1
gttgctgcgcagcctgaccctaagcctggttctcctcggctcctcctggggctgcagcattcctgccatcaaaccggcactgagcttcagccagaggattgtcaacggggagaatgcagtgttgggctcctggccctggcaggtgtccctgcaggacagcagcggcttccacttctgcggtggttctctcatcagccagtcctgggtggtcactgctgcccactgcaatgtcagccctggccgccattttgttgtcctgggcgagtatgaccgatcatcaaacgcagagcgcttgca

SEQ ID NO: 16628 - DNA, 140 bp, Zea mays
  Clone ID: MRT4577_115163C.1
ctcttcgcctgcatcgtatgaagagatggcatagctttttacccgaatcgccatacttagcgggggacaatttcaagcccaaaagatccccccaggaattcaaaaaaaacttgccccttcttcaaaactggaaacttttc

SEQ ID NO: 16629 - DNA, 271 bp, Zea mays
  Clone ID: MRT4577_115164C.1
ggagcacgaggcagacaagaaggaggacgacctcgaagccatgaacgcagaggaggactcactgaggaacgggggagaggaggaggacgaagatgaggacctggaagaggaggaagaagaggaagaggaggatgacgatcaaaagcccaagagacgcggccccaaaaagaagaagatgactaaggctcgcctggagcgttttaaattgagacgctgatagctaacgcccgggagcggaaccgcatgcacggactgaacgcggcgctagaca

SEQ ID NO: 16630 - DNA, 416 bp, Zea mays
  Clone ID: MRT4577_115165C.1
ctcatctcaatcatcgggataatgaagaccctctttagctcaactctactcccagggttggaaatgactgggtaggtgtatgataactcggatcctcctgccccaactgaaataccactacttttaacggtatttaacttattcccggggtcggaagcggggcacccccccttctttttactccaatgccctgcctcacctggccaattcgggcttaatacattcccaattagagattctttgctctggctgcacatctcttaaaaaataactcacgtgtcctaacatcatctcaaccataacataaatctcgtgtgggaacaaaaatggtaaaatctcgtttgaagtctgctttccaataccaataccgaacccgctaaacggggcctatcgatcctatacaccctttagaattt

SEQ ID NO: 16631 - DNA, 261 bp, Zea mays
  Clone ID: MRT4577_115166C.1
gcaattcaagctgcttggcgcggagcatttcattatgtaaaaatacccccaaatccaacgaccaaatagtgagctcagttcatgtatgcagatgagcgccaaaaccattgcggcagcagcagccgctgcatttcttttgtatactcacctttacttcccaaccgctgctcatctctactactcaaccactcccttggctggtaaccctatttgatctcacaatgcctaagccagtggacccactttcgggtgaagaccacc

SEQ ID NO: 16632 - DNA, 443 bp, Zea mays
  Clone ID: MRT4577_115167C.1
acacccttccgaaaaaaaaaaaaaaaaaaaaaaaaaaaaaaataaaaaaaaaaaaaagggccgcccgttgtaggggatcaaacttaactggcggggccttccaacttaatactttttttatagttcaaccaaaattaaattaattgccctccttttaaaaacttcttacctggaaaacccttgcctttcccaaattaaatccctttccacaaaatccccttttccccagttgccttattaccaaaaagccccgaaccaatcccctttccaaacatttccccaccctaattgccaattggaaccccccttttaccggcgcataaaccccgccttttttttttttaccccccagctttcccttttaatttgcaagtccctaatcccccgttctttttctttttttccttttcttttttcccaactttctccgtttttccctttaa

SEQ ID NO: 16633 - DNA, 186 bp, Zea mays
  Clone ID: MRT4577_115168C.1
tcttccacccactcgttcgctcgtgcaaggctttcctaactgcgcacggcatcatacaccggccgtgcggccacatcggctacggccccctcttcgcactctccctctccacatcctgagcgctccgttaggtcgccccacccctactccatacgatcccatgaattaaccactttcacattaccc

SEQ ID NO: 16634 - DNA, 217 bp, Zea mays
  Clone ID: MRT4577_115169C.1
gccggccgggttccgcgagataggacacgattgtgcttgtataccgagattgctcgagaggaggaaaggagctcgaagagaagatgtgcatccatttctccgagtaagataatctctgagatgacagtagagggccatttgaatgcccgctgacttccttaaacatgtacaaagagcccgagagagctagaaacatcttaataaccggacctaagga

SEQ ID NO: 16635 - DNA, 405 bp, Zea mays
  Clone ID: MRT4577_11516C.1
tcgcccacctccggtttttcttttcgccaggcatcatggcaggggggggtttattttcaacaccctcggtctgctccactatgatagctcaaagagcagcttgcaacaacttgctcaaatcgactctatacggctacgaacctaacacaaggcagagatcgatcgaactaacggacagggctaccttaacaaagaacagtgcatatcgtactggagagctaaacaagacaggtcgtgcccaaaaccccagggaagattttgaactaatctttccgagctgaccggagcgagatctcaaggttacctcgaggaattgctgacctatgaatactagtgaataaaactccaaagaaccccaccttcatattggagaagacccatcttttaccattaccacaggtgaag

SEQ ID NO: 16636 - DNA, 279 bp, Zea mays
  Clone ID: MRT4577_115170C.1
cacatagagtgcctggagtctaattattacacggcagatgatcattgaccgaaatatgctaacaatagccaggaccagtccgttccatcaacttcaaaataaccacctgttttatgagggcaaggaaattatgcgtggtgttgatgaattaagctgttttcctcattaaaaaagagctttctctatggagcctaagcaggtcccaatcatacttttttttttactacagtgccgaagggactgcacaaatacttgggcttggcatttgcggctctaggg

SEQ ID NO: 16637 - DNA, 337 bp, Zea mays
  Clone ID: MRT4577_115171C.1
aaaataaaattttttaataaaaaaaataaaaaaaaaattaaaaaaaaaaaaaaaaaaaaaaaatgtcgtcctcactaaaaggtccggggttctctaaccctttcttcctacttcatacttcttctatatactcactaaaattcaatttactgtcccacgtattacaacattctttacttttaaaaccctttctttacccaactatatctccttgcagcatattcccctttcttcaactagcttaatattcaaacaagccctcaccaattgccctttccaacatttttcaacctctaattcaaatgtcaccccccctttatcagctcattaaccccct

SEQ ID NO: 16638 - DNA, 238 bp, Zea mays
  unsure (1)..(238): unsure at all n locations
  Clone ID: MRT4577_115172C.1
caagcgtntgagcgagctttgatggncttttccacgcccttctgtgacgtccgaatgcggcgagcgatgcaaaagacgctgcacaagctgcacgacgacggggcggacgagcctcgcccggagacgggcctggagaagctccgtaaggacacacaccgcccccccgctcgttaacaagactgccgcggacggagggcgatacaagcggtcgcatgcgacgccacctacccctgacgac

SEQ ID NO: 16639 - DNA, 358 bp, Zea mays
  Clone ID: MRT4577_115173C.1
gtcgggataaatgtcaatcaatttattgattatttctaggaaacacatgccggtttgagggccccattttcgattacatctcatttgtaatctaaaagatggcacctccaacgatgggttgctggcggggcagggcacggttcatcaaagagaactggctgtttggtagcaattgttgctgctgttggaaggcagtgaccaatgggtttggctctgcttgtggattaagtaactgttgtcgctgttgttggttcgcatcatatttctacacagccagttggttgaatggaagcagctgttgcttgttggcttctgggtttgccacagtttgctgtgtcagagctggttcaatctgttg

SEQ ID NO: 16640 - DNA, 173 bp, Zea mays
  Clone ID: MRT4577_115174C.1
ttgccagacccagacccagataggaggtcgacgaacaccctgtgtccggagatacacccagattaactacactcgagtggcatgagggagaataatcttacacccctgcgtcgtgcgctctgatcgggtgagccagtggtaggacggccgccagccggcggacgggagagtga

SEQ ID NO: 16641 - DNA, 396 bp, Zea mays
  Clone ID: MRT4577_115175C.1
tttgagagctgctacacaaggctcggctacagacaagaatgactcccggtcacagcatagttcgtgccatgcttctaaggacgaatgtcgctacacagaagctactgcagacatggcatcatgttctacgacatgggaggcatgcacatcatttctgataactgacaactggagccacggaactgtgagggactgagaaccagagacccctacaggtgcaggacggaagacatactaccacagcatgacgaaagacctcgtgacacgggcttgtgcgacatccgagggagctccgactggcctagggctgcggctgccattgtccatacgctgccatagagatgcaagtagcgcaggagctacgacatggccagcaggccaagaaccgagtctatc

SEQ ID NO: 16642 - DNA, 401 bp, Zea mays
  unsure (1)..(401): unsure at all n locations
  Clone ID: MRT4577_115176C.1
gcgagcggccgctcgcgatctagaaccggacgcgtggggcagatgcagccaggcatgacgtctacgcacggggtttcattcgtttcacatgatgagacctggaatcctgtgaccgtgatggcgacgcgagacggctaggcgaggcgccctccaatccaagaacgggaaacccgtgtcgcctgttggtacgcgggcagaagatcgggttcgccatttccaagcttggtgcctcgccgcctgggtctctcgtctcgggctccgaagccgcccgcgctggtctattagggtaatttggttcagtctattcggatttatgaaatntcggggtctgaaaaatgagaaccgaaatttccaaaaatattttaggaaccgaaccccgataaactcacaattttggttcg

SEQ ID NO: 16643 - DNA, 322 bp, Zea mays
  Clone ID: MRT4577_115177C.1
tgtgcggccgagccacctgaagcggggctccgctccaaaggccagccggagggacttgagcggggaagctgacagcgaggagattggtgctgcgacgccggccaaggagtacgcaccaggcacagggcaccagctccggactggaggcgctctacgacgttaccgcgggcacgcggaatcggattggtcagtgactacatgggcgccgacgaccggagaacactggtcaccacacaggacagtacagggaacggacaagtgagctcacgtccaggtgagagcgaatgcaacggcagttagattagctgaaaatgacatactt

SEQ ID NO: 16644 - DNA, 398 bp, Zea mays
  Clone ID: MRT4577_115178C.1
ataaaaccatgtttctgcagaggaaatgtgggacaccatgctacataatggccactttgatcgggaaaatatcagtgctgataccaatgtgccttcttttgcacgaccgaaactatgtgcagttgtctaaggctaaacttgggtagagccacatggtaaatgtactgttgttgctgctctggcttggctctaacctaaagataagtttcaaaagggatgcacatataacacagatgtacacccaattgtacagaacttatgagaaaactgctgttaatcacatacatgatgccttaacaaaatataaactttggcaagaagacactgcaatgaggcaaaaccccatactggatgttgaaaggcttacacattgggatatgctcactcttataatgcgc

SEQ ID NO: 16645 - DNA, 324 bp, Zea mays
  Clone ID: MRT4577_115179C.1
cttccatacgcaatatggcacttctaagattcaccaattaacagtgactgaaggatgtgaaattaagaattctatagattattctattttttccttagatattctaacagatgacactctcctaaacacacaacataaatttgctctctgcatgtgaagactaagctcggtatgtgttgtatagtttcctgtcatgcagatcttgcaatgctgaatgtgacctgtactaatgctgtatagattttgggcataatagggtcagaagctagctgatttaagctagctctgatgaatctgaagcgccacctgggtatgttaagcaac

SEQ ID NO: 16646 - DNA, 241 bp, Zea mays
  Clone ID: MRT4577_11517C.1
gcctgacagagtcactccagatctgactagctagaaggctcgttctcttccgattacctgtacggcaggtcgccattctagaatacagctcgcaagagatcgcgctcatccctcagacatcggctagcagctagaccttcaggaccttgctgcattcccccatgggaggcgccatgaggcagctgctacgctttctgggagcgagcaatggcctccccagggagaagaagacgaagaggac

SEQ ID NO: 16647 - DNA, 717 bp, Zea mays
  unsure (1)..(717): unsure at all n locations
  Clone ID: MRT4577_115180C.1
aattcggcacgaggcgccggtcccttctccccaagttcttcccactactcgccgcttcctgctctgaccgccgcggcgcctggccggagatccagccgccgggagcgcggaggtcggccggttgctgccgtttcctgctggtggttgctgctggagatcggcggacggaagcagttggtgccacagggcttcgtgctgccgaatttcccagatattttgggggttcggttgaacccccatgcccgacgccactgggcttgaaatgggccttaaaggctctaagggagctccagtaccaggaatggaagggggtgtggcaaaggctcctgcttccttggaggaaaacaagtcctctgctgatgaggatcttggcagagggcctgccttgactgggaagaaaaggagggactgcaggggttctgcggatgaggacagaaacgtgacaaaaagggtgttgagatccgacgcaatgaagctgcgggctgaggctgaggcagcttgtgtggtagctgtggaggttagtaaaactgacagtttggagaggaaacgctgtgaggctattgtggaggctgagccttgntatagcaggctgctgatggaagttacttgncatggtgaggaagccaacggattggttaacttggactccagtgacgtctcgggagagtcagctaggtgttctgagaatatatggggatgcctagtgttcctgcacag

SEQ ID NO: 16648 - DNA, 708 bp, Zea mays
  Clone ID: MRT4577_115181C.1
atagtttcatacctttggaccaaatcaacatgagagcactttagctcctcatgttctttagtcaactcttccatgtttttgatttttgtgatgaggactgttgggggccttcggcttccgaaggtcctaaaaaatgtgatttaacaatgtttctggagtataatacatgagcaggtaccttcgaacttggacccttcggacttgagtcaaaatcacagtatgaagaagcataagggaaacaaaggatggaacagagccgaagctgtgcgcaagggagcttcggcatgatgacaggaaaaaggaaatcgacttaaagaggaaaaggctatctagaccccgatgaattactatagagttattagcaaatgcaaagggcctggatgtaattttacatgggctgcgacccgtgcctataaatagatgaacagtattcccgtactgttcacgctgactggacatctttgcctttgcgtcacgcttgtactttcactttccttcaagccgaaggtacttttgtaacttgttaacattcctatttttccttaataataaaataaaaatgatttgatggtaatgggatttcacgtgatcgcaacctttcttctccaaaacagcggcaatccccctggcacccgagaaggcacatatgtctccacggctattcaaaagctccaccttcgtggctgatccatccaatataagctttcg

SEQ ID NO: 16649 - DNA, 1679 bp, Zea mays
  Clone ID: MRT4577_115182C.1
cggattctatacttccgccccgtgctccctcgcctccgcctcctcccgttccccacctcgccgccgccgcgtctccctcacgggccagtccccgagcacccccctcacgcgccacagtcgaaaccaaagcagctcgcggtggccacacccggacctcgggctcgacatggggttcatgctcgtgcgcaagccgcgtccgggggacgagaagccggacctggcgaactggatgcggtgcttcctgtcgcagcgtctgtctcagcccgccgcggcggcggaggagaccgcgaacgcggagggtaaggccgccgggagacgagaggaagaggagggtggcggggatgacgctgaccacctcgtcgtcatggtgaacgggctgtacgggagttctgcggattggaagtttgcagcagagcagtttgtcaagagattgccgggaaaagtctacgtgcatcgtagtcagagcaattattcaaaattaacatatgatggagttgacttaatgggtgaaaggctagcagaggaggttcgacaagttgttcagaggagaataaacttgaggaaaatatcttttgttgctcattcacttggtggcttagtaacaagatatgcaataggaaaactttatgaacctgccatggatgaaacatcttcttgtgacattgataagccttccgatgaacaaaatgtacgtgatgttggtaaaatagctggtttggaaccaatcaattttattacatctgctacacctcacttgggctcaaggttgaataagcaacttcccttcctttttggtgtcccacttttggagaaaactgctgcaggaacagcacattttatagttggaagaactggtaaacatctattccttacagacaacgatgatgggaagcctcctcttctcctacgaatggttgaagattgtgacgacgggaaattcatgtctgctttgcgctgtttcaagcgtcgtgttgcctatgctaatgtaacatatgatcatatagttggttggagaacatcatcgcttcgacgtcaacatgaattaccaaaactcaagctaacagcaaacgatgaaaagtatcctcatgttattaatgtcgataaaggaaatctagaggatcatcggcaagagggatctgtagaagattcactggcagatagttatgaagaggtgatgatccgtggccttacacaagtggcctgggaacgggtggacgtatgctttcataagagttggctaagatacaacgcccataataacatccaggttaggatccatccaattaattcagatggagaagacgtcatataccatatgatagacaattttgtagtgtagccaagtagtccgtccggtgaatgccaactacgtaaaagattactgctatttccagtggattcgccttgagaggtcattaatcttttaccatgtgggttgctatgcacaacagttagataattggcatcagcggatcagcacttaactcacacgtgctgctaggtgattcgagcgtaggacctgtgcttgttggtttgttgctggcaatgtaaatataagtgttaggtaatgcaaatatttgcatgacagtgcatattcttgtaaatgggaatttaccatgttattggaaatccaaagttcaaactatttcacagcaacttgttggttgctgtgctgaaat

SEQ ID NO: 16650 - DNA, 866 bp, Zea mays
  Clone ID: MRT4577_115183C.1
cgcgctccctggcttctctcccacccgctgccgcctctatctctcccttccctcttctctctcccctcacctctctcctcccttccctcgcctcgctcctctccccgaccgagtagcagcggccgagccgccctcccccgacgtgcctgcaccgaccgcgcccaggtccatgctcaatctagcttcccttgccgcaatcgcaagccccggccccgcaaggcgataggaagccggtagttcagccgcggcttcggttctgccgttccggagatggagtccggcatgagcagcgcccggcggcgccgcttcggcctggaggcgtcgcgggggatgctgcccctgctggctctgcaggtgatcatcgagtacggccacgcgggggcctcccgcccgcccgtcacggtcgcgctgctcgccgtcaactcactcgtctacctccgccccggcgcgctcggcggggtcctgccttcgctcgcgcgcgtctccttcaaccctcagctcatcatcgaggaagatgtcaactgtgacaacacacagacagttgagcaacaacagccctctgacgacagacagacagttgagcatgctcctcttcaggaaactgatccaggcaaagagacacatgtttcagaggctaaaacgctcacagcagatgctgatggaaatttgagctcaagccagcaaactggggagtacaatgaattgctgagacaatactattaaattgttgcttaattttaaattgttcattgtaaactagaacttattgtgattgatcatctatggagcttttttgaatgatctagctagctatctgtaaatgatatagttgggaatggtattataattgtgatgcttttgtgaat

SEQ ID NO: 16651 - DNA, 537 bp, Zea mays
  unsure (1)..(537): unsure at all n locations
  Clone ID: MRT4577_115184C.1
accgtccgctaaatagaataattaatatgcagnaaaagatnctgaggctgaatggtgggtccagtgcacaagtatactcagcctttgccccttcacactttctgttaaaaagagcacagatttcatgttgccaaactatgcgcttgtcgcactggacccaccattcagcctcagcttgcggagctgcataagtaactgtcaactgttgctaaccggacgcgtgtaggcggcccggcgataccgccccggaacctggcggcgtccacgcgaatcgcccagggagtccggataagccgcaaggaactgatgatgccggcgacccagggaacatccctgagcgngcgctcggctcttcaaaggcgcatgcactggccctgccctgagcagtgagatccacgggccgctctctcgatgtgctccaaacccacaaagctgacagccctggcactgatcctacctccggtggaagaatgtncacatgatgctgtctacacaccgatgacggttgggaattctggttcctcagctttcttaact

SEQ ID NO: 16652 - DNA, 870 bp, Zea mays
  unsure (1)..(870): unsure at all n locations
  Clone ID: MRT4577_115185C.1
gggtacctcgaggccggccgggctcttctctctcccctcacctctctcctcccttccctcgcctcgctcctctccccgaccgagtagcagcggccgagccgccctcccccgacgtgcctgcaccgaccgcgcccaggtccatgctcaatctagcttcccttgccgcaatcgcaagccccggccccgcaaggcgataggaagccggtagttcagccgcggcttcggttctgccgttccggagatggagtccggcatgagcagcgcccggcggcgccgcttcggcctggaggcgtcgcgggggatgctgcccctgctggctctgcaggtgatcatcgagtacggccacgcgggggcctcccgcccgcccgtcacggtcgcgctgctcgccgtcaactcactcgtctacctccgccccggcgcgctcggcggggtcctgccttcgctcgcgcgcgtctccttcaaccctcagctcatcatcgaggtgcctgaccttttttcagtgttgagtctgtgttcctcgtcatccttggaattgcccttcttggtctctttgtattgtgggcatatggccaagttcagcagctcgcgaaggaagatgtcaactgtgacaacacacagacagttgagcaacaacagccctctgacgacagacagacagttgagcatgctcctcttcaggaaactgatccaggcaaagagacacatgtttcagaggctaaaacgctcacagcagatgctgatggaaatttgagctcaagccagcaaactggggagtacaatgaattgctgagacatactattaattgttgcttattttaaatgntcattgtaactagaaactatgtgatgatcatctatggagcttttttg

SEQ ID NO: 16653 - DNA, 265 bp, Zea mays
  Clone ID: MRT4577_115186C.1
gcgacaaaaggcccgcgatgagtgctcctgccaatctgtagagatagcgactcgtagtcatgggcgcaagtaacacaccacccggagctagtgaattccactgcgactacgcgtggtgtcgtcgacaaccacgttgggtcgtcaacaacaccctatcgatgggacgcaacacgtcaccagcggttagtacccagcacggccatctaattcccatcccgtagacctcacttcactaacgacacgaatcatagagaccacaccgttc

SEQ ID NO: 16654 - DNA, 473 bp, Zea mays
  unsure (1)..(473): unsure at all n locations
  Clone ID: MRT4577_115187C.1
gacagaaatgcattagatatatatggtgcaaatcaaatgacaacaaaaaaaaagtacaagttctcggagatgagagtgagagtgagaccaaccaacaagaatcctagcttttcctttacacaaacttttccctatgcagtgcagtagtagtgatctccgacatcgacatcatgtgtccagccgacaaaatcatcccaggattaaccgcgaactaaaaaatgtacaccaaaaattattgctaatcacttgtgggtcttcatctcatgagcaatgagacgacgtcctgtcctgaccatcatcatcattcatcactaaacccacccactaaaccccctcctcctcctcctcctcgatctcgattgggtgtgaataacagaagaaacaagcaactcaccccgtccggccgcggcactgcgcctgcggccggcggcgtcccctgccgcccttggcggngcacgcggccaccacagccg

SEQ ID NO: 16655 - DNA, 418 bp, Zea mays
  Clone ID: MRT4577_115188C.1
ctgtcattcaaaatgcatatttggatagatacatcgctaatgttttacgcacagacgaggggagcagctgtagccaagccaaaaacctggctcgaacacttcattgtacatatgactaggaagaaaggagtatgtgggtcacgaagcagggggggtataaaggcatccgcttagtagggggccccgccgccacactcatgcaggaaagttgggatcctccatagtaccacttaactaaacagcgctatagctcaacagcttgacccgctgtgagggggggggcaaatagctagctaataagcaggtgtgggggacaacagccgggccagactcatagtactcatcctgggggatccacatatggtgctacgaggtgagcgactcaaggagcgagccaacaagccaaacactgtatcct

SEQ ID NO: 16656 - DNA, 401 bp, Zea mays
  Clone ID: MRT4577_115189C.1
gcgtgcagcgggccgggactgagttatctgtgctgggccaggctatgcttatctagtcggcggccgccctcgaggcaccaagaaggcaggaagggatggagtactgctaccggctcagcaggagcagcaacgcgtagattgagaagaggccgccgctgaggaggggcggtgtcaagctccagatcgtgcagaccttgaggaccctggtcacggggcccagcaacgggtgcgactacacgctagcggcccgcagcaggttctcttgggagcgaggctaccactggaacgaactgactgtagagaattcggagtcagatggcgaccttgcgtcttaagaactccgctttgggactctagaggttagcttagcttgttggacttccctgcttgcttggtccact

SEQ ID NO: 16657 - DNA, 2146 bp, Zea mays
  Clone ID: MRT4577_11518C.1
ccacgcgtccggggacgcgtgggtccaggaaaagcactcccgctctcggaaagaaggcgccgctctagcagaaacagcacctgcgcagcggaaatcatactcctttcgactgttctcgtgccaaggcgatataagcaggaacgtgatcagccatcccaaagcagcgaagaaggaacccgtggtgtctgtcgagaaagagctggacagcagcgagctagctcctgctgtcgtgcctctgctggaacgagcggtttccgtggtatccagttcggacagcctgagtcagtgcgaggacgccgtgcacgaggtcgccagagcatgctcggcctgggacccgagcctcgtgaacctgctgtcgtgcgcctctttcatccaaggccttctcgaggtcacgctgacctccaaagacgacgccgtgctggagtcggccatgtcgatcatggggaagctggttctggggaacgaggtgatcagacagctcgtgctcaacgcggacccgcagctggaggttttcctgaggctcctgaggagcagcgagctgttcctcaaggcggccgtggtgctctacatgatgaagcctaaggccaagcagatgctgtccctggactgggtaccgctcgtgctgcacgtactggagtgcggcgacgaggtgcagtctctgttctccgtaagatgcgcccccaagatcgccgcgttctatttcctggaccagctgctcatggggttcgacgttgacagaaacgtcgagaacgcgaagcagatgatcgctctcggtgggctggacctgctgatcggcaggcttggcgctggcgacgctcgcgagagcaggcactgcatcgctctcctgaccacgtgcgttcaggccgatggcagctgcaggcactacttggctgatagtctgaagaaggagcctctcgttcagcttcttgctggaaatcagaggaagcccggggccgcgtcccttaacctgatgagtgaactcgtctgccttaacagaacaagcaaaatcgtggagttcgtcaaggagctgaagaacagcgggtgcttgaacacgatgcacgttctgctggtctacctccagcaggctcctctcgtccagcacccgctagcagctaccatgctactccagctcgatctcctgggtgatccttcgcagtacagcgtgtacagggaggaggcgatcgaggccatcgtagccgctctggagcacagctcgcagagcaggaaggtccaggaacagtgcgcccgagctctcctaatcttggcagggcggttctcgtcgtcaggagagcccgtagcagaagcgtggctgctaaagagagcgggcctagacgattccctctctgagtccttcaggagatcagaagtattcaaagacaagagtgttcgagcggaggaagagaagctagtggaagaacggcagaagagcctcgccttgatgctactgaagagcgggggcagaaggttcctcacggcgctgtcgagctgcatatccgatggaaccccgagcctcagccggtcgtgcctcgtcagcgtggcatggatgagcagctccctctcgccgctgcgcggatgcaacgacttccagcccctggcatgctccgtcctcgcgtctaagcttttggacagcttgagctacgacagagtcctggaggagagggtgctcgcttcgctgtcgcttctgaacgtcgtgagacacccagaatgcatggagaaggtcttcccgctgaagaaagaaaccatcgagtcactccaagatctcgcggaggtgacgtggactgcgaaggagctcctctttgcctgttgcagatgagatgcaagaccagatcgtcctcagcgatgaagaactagacaccagcatgtaattggaagtgattgttttgggagaagagtgatcgccactgctgtacacagattgtttcgtacttccgttgatatgtgaagccctacagatcctttccctcgtcatggactttggctttcgctgttgaattgaaacctgcacatggcttcctttcttcttcttgagggggcttgtttagattgccatgtatccatatcaatacacatccatgtgtattgtacgttaacccccaacacactatattgagttggataatgatcatccaaataagtccttagtttt

SEQ ID NO: 16658 - DNA, 150 bp, Zea mays
  Clone ID: MRT4577_115190C.1
gtcggatattacctcatagaatgtatgtggttttgtgctttgaactgttgattcttgattcccaatcaatcaaatgcaaacgatctaatccgagagcggcttctaaaggaccgggtggtcgaggctgtgttaaagaaatggattacctcg

SEQ ID NO: 16659 - DNA, 1362 bp, Zea mays
  Clone ID: MRT4577_115191C.1
cccagcgtccgcccacgcgtccgggcaatatcaatgaagatactccattagccagtgctgaaacccttggtatgaaatacgagaatcaggagaatagaaccgagaaaataggtctcgccctatgaatcgacaaagccagaaccatagtccaaggtctgattcatctagcgaacggcataggagttggaaaaggagacatcgtcacatctggaatggaactccagaatctgagtccggccgggggaacgccataggagcaaaagaaaggagtctcattcaagacacagaaaacgcaggagtagaagtccgggtagtgatactcccagtgatacccaacatgagacaaaacgcaaggagaaaaggcatcgccgaacttacacatctgatactgattctagtgatcatgaacacagcgaaagatataaatctagtagtaggcgatcatctgacaaagacagaagtagaaagcgtcgtatacaccacaagcacaaaagaaaagatcatgtagattaaacatgaatgggaactgctggaatacgactgtacaaacgatggggaaggtgcagtgcagggccattgggtttagcaaaccatggaagtttgatgagaacactgggaggtatggaaaatttgctcacaggaagtattctgctcatattggcttcattgccttcatcacttttgcccgaagttttctttgttggattggtggaataccactgtagcattgctataccacaaagcagtttcatggaaaggaatcacaatcatctggtcgcttgtagaagtcttaggaaaaagatcttgttgaagtagccgtgtttgcaaaaatgttgatcctgatagcaaatggtttgactacaaatctatggtgtgtgtaaaaccgcaagttgtatgataactatttttttagtttacttagttatatgataatgtagttttgttttgttttacagaaggtaattaggtttttgagaatggtcaaagcatagcgtaatggttaaggcttctgagtagaacctttaggtccccggttcgttcctattgggggcaaatttctggtttggttaaaaaatcctcattgtgtcccgtctgctccggcgctcacgctcatgggttatgtcttgcgcgtcagcttccagttgggtcgttgtagagtaggtggtgatagtgatagtttgggtcaggttcgaggaatttttttggtcgagactttcagtcttttcttaatataatatctataaaaccaggagtgtgtctttctctctttctctgagttttttttatagtgcagttgaacggtttgggcctggctgttcccaacaggctttacctttcctcattggcagcaagatgttgcca

SEQ ID NO: 16660 - DNA, 245 bp, Zea mays
  Clone ID: MRT4577_115192C.1
ctgaaatgccatgggcgcctccaaaccgggggcggacgatggccacacgccggggatcaataaagctctcgcttactaccacactatgccacttcgcgaagctaagagcgcgagtgtcatgcacgagatccggctgaccgaagccagccgtacccgcgccaagaagaacagcgccctcaccctcagactggatgactgggtactttgccgactgtacaacaagaacaaccagtgggagaagatgc

SEQ ID NO: 16661 - DNA, 1059 bp, Zea mays
  unsure (1)..(1059): unsure at all n locations
  Clone ID: MRT4577_115193C.1
tatatctacccaggnctagttcagtttgcagaaaatatgcaaggaaaggaattgttcgacttaaagaaatattcacacctggaacattacaggttcctaaaacagacaatcaactcaaggagcttgaatctgttcacaaggtcctagagttatatgtgtggttaagcttcagaatggatgattcctttccagaccgtgaagtagctgcctttcaaaagtcaatctgtagcatgttgatcccgagctggagaggtttggatggcagccacaagaccgaagaaaggttttgggtggagcacaaaagctgctccaagaatacgatgtatcgcaaatgaacaaatattttcaagaagtcaacccaggaccgaagtagaaggactatacaggaaatgagcctcaccacttccagtccagatttgaggaaccaataccatccagagcatttgcgttctgcctcactggttatggatcaccggcacaaagtggaactacacttcggacgaccgaagatatacgtggacgcatctcaaaccgtgatcatctagattgatttggcagcacgcatttccatcagccagatcgtgatcgactagtaggacttttttccccaaaaatgaaactacactccagtcttaagtcataatgaatacagagccatgagcccatgatagggccgcttctgagacggagattgtgtattaacgggtacacagacggtacttgcattctagtctgagttcgatgagttgcagcaatagcggctgtaatcctgtatataaagagggaaaataatgttgcttgtgctgttatttattgcaagatctgaataatgaaactacactccagtcttaagtcataatgaatacagagccatgagcccatgatagggccgcttctgagacggagattgtgtattaacaggtacacagacggtacttgcattctagtctgagttcgatgagttgcaccaatagcggctgtaatcctgtatataaagagagggaaaataatgttgcttgtgctgttatttattgcaagatctgaatgtttgtgtccaaa

SEQ ID NO: 16662 - DNA, 955 bp, Zea mays
  Clone ID: MRT4577_115194C.1
cctcgagggcctggcccggggcgccaaaaacaaaagcaaataagatgagggcccccaaccaccaccatctccacgtctccttccatccaccctgaacaggcttccctgcctctccgggtctcaaatccagcagcgtcatctgatctctccccccatatcctctcacaattcccgacaccgagaaaggagcatggatccaaggcacctagcatgtcctctctcttccgaccacaatgatttatcccagaagaagatcactcgtggagatgctctgctagcacctggacactcatcagtctcagagactgaggagtgaagtagctaccatctcgcctcgtttctcccagtctgccgttgctgctgctgccagatcccagagttcgtggtaggtggcaatggcctcgtcaccgcttgcaatctcggggacgcagcctacctgggtcccctatgaaccaaccaaagattgctctcagggcctgtgcagcatgtactgcccccagtggtgctacttcatcttccctccgcctccgccgttcgacgtgggcgggcccagcccggacgactcctccggccccgtcttctccccgctcgtcatcgctatcatcggcgtcctggcgatcgccttcctcctcgtcagctactacactttcatctccaggtactgtggcaccttccgttccttccggggccgggtcttcagttccagctcaggtggtggcggtggtgcccgccgccgccgccgcccatgcggcggatgtggagatggagggactggagatcagctgcgagtcgcagcacagcatggcgggcagcacggacggacatgagcggggatcagcgctgggccggtcctgcttcagcagcaacagcaagagcgggagggggaggggccccggatcatccgatgtgaggaggctcaaagctgtttcagattttacctaggattttactgggc

SEQ ID NO: 16663 - DNA, 524 bp, Zea mays
  Clone ID: MRT4577_115195C.1
aatacagaatgttatcatacaatttattcgaagcaattggagaacaatgataaacatgtaaagttgataagtgaaacaacagaagagaacgtgatccaacataatctgatgtacacagtacagtaaatataaatatggtagacgaaaattgtgacgagtccaataaaaggattattaatgtataatggtacacatttctttctccaacttccttctcttccctgcataaataccatcttcccttgtttcttggtataatgaaggtaaagcttgaatccttttaaatgcatcagccaagcgtttccgtggcatatggttctcaccagccgagaagttttcagaaacctgttttcggatagctccggtcaataggccttgacatcctgatgcgtacaacaagttgtaactttggacattgtagcaccagactctccggatgcaaattactgcataagttcaagttcaagtccatgaactctgggcagtttaagaacaaagcgtccaaactggagcatccccacaaa

SEQ ID NO: 16664 - DNA, 154 bp, Zea mays
  Clone ID: MRT4577_115196C.1
ctgatactgatccttgtgtcacttgttgctcacaaagccagatcaagcagatccatgacgatggtccacgggcgctccccaacatcggatgcatccaccacgtgctcacctcacagccgcagcctggggcaggtggacaccgtcgtcatctcct

SEQ ID NO: 16665 - DNA, 321 bp, Zea mays
  Clone ID: MRT4577_115197C.1
gtgacccacgcgtacgcactggagtaaacatgccactttttggatcctgcacgtcagcatttaggagcgggggctgggccaggcgtcggtgctgagcaccataacccccggcagagagccctaggatcaccacatcgcgacgctcaacacagtgctgccaccaaatcaggctgtagaacccataaccgttccaggcgacataagctgagtcctgcagtgcttgctcagcatcagccggaggcgagctcgccgtgctgatggcaggccaggtagcgcaacatctgactgcgatatgcggactgcatctgtaacagccaggtc

SEQ ID NO: 16666 - DNA, 568 bp, Zea mays
  Clone ID: MRT4577_115198C.1
cctcgaggcctgccgggagatggacttgccggcgaaccgcggccggtggcgcatgcggagcgcccgatcgcacgtagctctcgtcgtggccgtcctcgtgctccttcttccggcctatcttctcttctcatcggcctactccaccacgctccgcgctctcttcgctttccccttcgcccccggcggtggcgaggcgccccggtgcgggggctcagtggagctcgaggggcgggggggcctgtggtacgcaccgcacagcgggttcagcaaccaggtgggcgagttgcggaacgcggcagtggcagccgctctgctaaaccgcactctcgttgtgccccccgtgctcgaccaccacgccgtcgtcctcgggagctgccccaagttcagggtgaccgacccttcctcgctgcgcgccgctgtttgggaccacaccatgcaactcctgctggatcgaaggtatgtttcaatgggtgacataggtgatctatccccaatcgaaccaatgggtaggactatcgacttcagggggtttgtcttcctgtggtgcggggtatacatgcgggagact

SEQ ID NO: 16667 - DNA, 646 bp, Zea mays
  Clone ID: MRT4577_115199C.1
gcccgacggtatctctaataggtataagttttgaggaatcatttaaaatgagaccagatgttgagcaggaaaggtcgcatgtctgtgtcgtttaaggaccgtaatgattgttggcctgctaatctaggaacttttaactagccacatgcctcgccatgggtcagcttagcctcaatcggaccaatattagaaaggatgacccaacaatgggagtggaaagatggcgagagtttcgtgtatccatctggccagaggctagatgccagggtactgtgctatcggttggcgggaacctgttctggtcttgagaaacccgggtgcgcgttgacataagcaagggttaagttctacttaggtcatgtggtgaagcgtcccaatcctttgggactcaaatatgatacaattactagtcccaggaggctagtaaacacatttatacatcagatggttccagatctgcttaaacgagacaaacctataaaggtgccaatcaactttaagagttggttcacaactagggaaacatcatcagagtggggctgaagcagcccaatatacacagcgacgcaaatcagcggtccaacagccacatgcatggttgggaacatgcgtaactcttaccccatcagcgatatccttctctaaa

SEQ ID NO: 16668 - DNA, 250 bp, Zea mays
  Clone ID: MRT4577_11519C.1
aggccaaaacccgcgcacaccggcgactgcaggagaacctcccgccggccggcgcgatgccgccgtctctacaggcccaccgcctactcatctcccaccgccgcctacccactccagctcgccgccggttcaccgccgcctctttcgtccaatccggtcccgccacaaccttggccccgggccccgccacatactccatcctcttcatccgcgagtgggtgctctcaagcgagaggaccgcggcggacat

SEQ ID NO: 16669 - DNA, 484 bp, Zea mays
  Clone ID: MRT4577_1151C.1
tggagcttgcacgggccaacgcacacacaacacaagctcgtcgtcgatggcgcggtgggctgcggtgctggcgctggccgcggccacggccatcgccgtggcgtcagtggcgggcggcgacatgagcgcggacaagatcaacgccaccctcgcgctcgcgctccccaacgcctgcggcgccacccgcgccaacgtctcccactgcgctcagctcctgcatattcccccgggctccaaagacgccgccgtcttcagtcccggcagcgacaagggctccactgccgctccagccaaggacaactcgacggcgacgaccgactcccgcgcgctgcaggcgaccaccggacgcggcgtgtcctcctcggcggcgaccgccggtgctgcactcacggtgctgctcgccggctacctcctcctgctcgtgccagagctgtcgcctagctcgttctagacccttgtcaagttgtgccaccataggatttga

SEQ ID NO: 16670 - DNA, 136 bp, Zea mays
  Clone ID: MRT4577_115200C.1
agccttggccttttatgtgcttcctttttgctggcaggtccggcccacccggtcaggcgctttgttcgctttccttgcgtacgacgcaccggaaacccactggaaagggttgcaagaattttttggtcacaaccca

SEQ ID NO: 16671 - DNA, 232 bp, Zea mays
  Clone ID: MRT4577_115201C.1
ttcccggctctacccactcatcctctcgtcgtcaaaaaatccccattcgtttcccttctcgcctccactatccttcgcaaagttccctctcagctcttgtccgaatctcactctagccctaaccaaatcccatacccatcccagccctatccacaccaaccagctcgccagctaccatttttaacccgtacaatctgattatatcatatcttctacctcaattacacctttc

SEQ ID NO: 16672 - DNA, 200 bp, Zea mays
  Clone ID: MRT4577_115202C.1
taacaaagtcacacaaaccccactaaaacagtctaatagagaaacacattgttaaacttagatcacggacacgtatcgtcgttcccaaccaacacccatgaggcttacctaactttactgaacaggagtaaggacctcacatatttgaaacaaaaggccctggtggctttcgtgtttaacaaacccatggatttaccaaa

SEQ ID NO: 16673 - DNA, 332 bp, Zea mays
  Clone ID: MRT4577_115203C.1
accggccggaattcccgtgacccctccccgcataataattaccccccgtccccaccaccggggctcctctttagaggatggggcaagaaagggaaagggacaggaggtcaagcaggcatgggctcctctccacctccccgccgaggctgcactcgcgctcctggccctactcgcccgagcccagagccaacgaggcccagaccgaccccgccgacacctggagtggagaaccttcaacacccctgaggcccccgagaactggggaccctggcagaaggcccgggccacccggtaccggaacagccccaacactgccccagcccggacaaaaa

SEQ ID NO: 16674 - DNA, 248 bp, Zea mays
  unsure (1)..(248): unsure at all n locations
  Clone ID: MRT4577_115204C.1
tgatcaaactggannaagactgtnnggatacttaggtgtgtgatttcgagtgccagcttagttgctgcatgaaagaataccttgatttcacgtcattaatgttgtatcgaaagatcanncatcattgggcgacacgctacactgaccaaactgnntcaatgagtggcttagtatggagtttagctcggttcccagattataccatcgccgacttctactgtacctcgcgaatcgggatgtctattggg

SEQ ID NO: 16675 - DNA, 1016 bp, Zea mays
  unsure (1)..(1016): unsure at all n locations
  Clone ID: MRT4577_115205C.1
ggacggcgggggcgacggctgcatgtcccgcgtcgaggcggccatggccgtgcggagcaaggccaaggacgacgccggcgctagggagatgctcgcgatgctcggcgccatcccgccgctcgtcgcgatgctggacgagggcggcgacgtgggggaggatgtcacgaccgcagcgctgtacgcgctgcgcaacttggggatcggcaatgacacgaacaaggcggcgatcgtgcaggccggtgccgtgcacaagatgctccgcattgcggagggcggcgcgctaacgtgggcggccgtggtcgccaacttcctctgcctcagcgcactcgacgccaacaagcccgtcatcggcgcgtccggcgccgcgcccttcctcgtgcgcgcgttccaggccgcgtcctccactgagcaggcgcgccacgacgcgctgcgcgcgctcctgaacctctccatcgcgcccgccaacgcgctgcacctgctggcggccgggctcgcgccggcgctggtggcggccgtgggggacggccctgtgacggaccgcgcgctcgccgtgctctgcaacctcgtggcggcctgccccgagggccgccgcgccgtgagccgcgcccccgacgcggtgccgtccctcgtcgacgtgctcaactgggccgacgagcccgggtgccaggagaaggcggcctacgtgctgatggtcctggcgcaccggagctacggtgaccgcgccgccatggccgaggccggcgcctcgtccgcgctcctggagctcacgctcgtgggcacggcgctcgcgcagaagcgcgcgtccaggatcctggagatcctccgcgccgacaagggcaagcaggtcgcggaagacgcctcgggcgtcgtggcgacggtgtcggcgccgcaggagcgcgggtgccgcggggaggagtcggtggacggngagttcgccgacgccggcatgagcgcggagaagcgcgccgtgcggcagctggttcagcagagcctgcagagcaacatgcgccgtatcg

SEQ ID NO: 16676 - DNA, 214 bp, Zea mays
  unsure (1)..(214): unsure at all n locations
  Clone ID: MRT4577_115206C.1
gttttcgggcattctggtatgggcccaaccaaattngatttggggcagggcggctttgggttggggaaagaacattttanaanatgaanatttnggttcatncattggtgggaaattcacccctggtactgtgcatgctnccgtagtggancgnggctagagcatnaagtggcacagaanccataactacgcattggancccagaatncacttt

SEQ ID NO: 16677 - DNA, 831 bp, Zea mays
  unsure (1)..(831): unsure at all n locations
  Clone ID: MRT4577_115207C.1
gctgctccccgccggcagcgtcagcggcgacttctccctccgctcccctctctctttcgctcgccttatcgcccttctctcgcccgcgacggggaggtccgccgttccgatcactaccccttcgcgccgctgacctcagaggaggaggcatgaggctgctgccgagggaggcggacaaattggcgctgcacaatgccggcttcctcgcgcagaagcgccttgcccggggcctccgcctcaactacaccgaggccgtcgcgctcatcgccgcgcagattcttgagcttattcgcgatggagacaaaaccgtgacagacctcatggacctggggaaacaactattgggcaggagacaagttcttccagctgttccataccttttacatactgtgcaggttgaaggaacatttgtggatggaacaaaactagttactgtacacgaccctatttccttggatgacggaaatttggagctagcattgcatggttcttttctcccagtgccttcacctgaaaagttttccagcgatgatgttgaagaatatcctggtgaaatacattacagttcttgtcgcatagtcctaaaccttcatcgcattgctttatctctgaaagtagtcaacaaggcaggcggacccattcaggtgggaagccattaccattttatagagcccactgcttaattggtttttgatacgaaaaattcctatggcatgaaatagatcatacttgctgctttttatgttcggttgtagaatgcgtatgcaaaaagtgttatacttgtaagcantcggagtcataaggtaatcaaaggtggaaatggcattgctg

SEQ ID NO: 16678 - DNA, 291 bp, Zea mays
  unsure (1)..(291): unsure at all n locations
  Clone ID: MRT4577_115208C.1
gtccgttcgtcctggtggttttgtgaggtcgaaagcggcggacgaattagaagatgctggacaagctgtgggacgacgtggtggccgggcctcgcccggggactggcctcgggaagctccgcaaggccagcaccgcccgctcgctcgtcatgaacaaagacgcgggcggcggcagtacaagcgggcgcagtcgacgccgtctatgccgacgacgccggtgacgccgtcgtcgtcgacgacgccgcgcagcgncgggaacgtgtggcgcacgtgcttgcgcccggggagcaa

SEQ ID NO: 16679 - DNA, 293 bp, Zea mays
  Clone ID: MRT4577_115209C.1
aaaccccaaacttaaacccagttgcaatgggggggaataaagtctttacaacataagttggaaaccccccaccccccgattgataaaaaccgcccaaaacataacccggtgggggcccctcggggcaaatcacaggataggaaaggcccgcaggcccgacaaccccgggccaggagagcgtttagtacttataacccttgggggcggcctcacccttggaaaactcaacaccgacctcctgggaatccttttggggggccgccagatccttacgagccttggagaactccccc

SEQ ID NO: 16680 - DNA, 986 bp, Zea mays
  Clone ID: MRT4577_11520C.1
ttttgcacagtctgctggccatatagccttagcacactgatacagctagctgaagcgaatagcatgccgtcatccctttgttatgatgcttgatatccgctcaacgaacatacggcacattttcgtgctgaatcttatgtcttgcctcatccaatcagcggctatccttcccagggtgcccaacgacgagagcttatatgaccattcatcagatttttctaaccaagtgagggtgaagctgtaaccactagcttcatgagagactgaaaccgaaaatatctctgattcatcatttactgagaccttcatgcgaactaaagattgaagaagcaaacgaagcatatgagcactccgaatttcatttgtcccattccctctgatgcatgtacgtcttctagaacaaactagctcttgagattcctttgcggggctactgtgaggagcattttcactcaactgtaccctcttctccttgccgtgggaaagtggtgtttttcttttaggtgacattgaagttgaattttctaggatagcttcaggtgttaagcaatgaaacccagaagctgtagaattgtttttttcagctttctcatctaagagttgcttcagcctcagaatttcagtgtcccttgtaagaatatcttcaaggaattcctgacgggccttctcgagctcatcctgcttttccattagcttatcgttgagctccgcattgtctttcttgagttcgctgacccaatctttcatggcatcgtaaagctccttgagctccgcctctcgctttcgctctagcccctcgtctagcagcttcctcttcttgagaacagtgtacttctcgtggaacttggagtcgaaccgctccatcggcgccagggacggatccagaagcttgtagacgcaggtccgagcgcgcgcgggggggtttgaactcccaagttgcggagagtagagaactcagtcccagccggccgcctcgagcgccgcac

SEQ ID NO: 16681 - DNA, 868 bp, Zea mays
  Clone ID: MRT4577_115210C.1
cgggaaaagacgcccagttaaaactatgggaccctgaaaaagactggaaccctcgcctcaggggtcctagcaatcgcgtcaccgtcttctccatcgccggtgctcccttactctcgatggcatcctcggccgccgctcgccgccttctcctcctccgccaccgccatgggcaccttctccccaaacgccacttctcttcctcatccgctcccgacggcctcgatgacggcggtggccgcgtcaagatcttcgaccgcgacctgaagcgccggcaccgggaccgcgcggcgtgggcgatgcgtgagaccgatgggctcgtggatgcggtcgctgagaacctcctagaccgcctcgaggactgcaggaaagccttcccctccgcactctgccttgggggctccgccggcgccgtccgccgcttgctccgtggccgcggtgggattgagaggctgatcatgatggacatgtcagccgatatggtgaagaagtggcgagagtcagagaatgccactggtgatgggcctgagacccactttgttatcggcgatgaggagtttcttccaatcaaagagagctcacaggatttgataatgagctgtcttggacttcattggacaaatgatctacctggagcaatgatacagtgtaggctggcgttgcaacctgatggcctttttctggcagcaattcttggtggagaaacactgaaggagcttagaattgcatgcacaattgctcaaatggaacgcgaaggggggcatcagtcctcgaatgtcccctttagcgcaagtccgtgacgcaggaaaccttttgacaagggcaggctttacccttcccagggagtgatggtgatcagtataccgttaga

SEQ ID NO: 16682 - DNA, 239 bp, Zea mays
  Clone ID: MRT4577_115211C.1
atgtttatcattcacaaacacaccatgcgatgcacactaccaacaagctaacaacagtggcgtccaagatatgagccctccttgcgcttcttgccgcttcagtgagcgcaacaaatgcattcattattccacagggcgcacttgcttctagtgccattatttcacaattccttccaccagttacttaaatgcgctttgaacatgcatctctgctagcctacacgctacaactagcgctt

SEQ ID NO: 16683 - DNA, 777 bp, Zea mays
  Clone ID: MRT4577_115212C.1
agtgaacgacgagggagcacacacacccacactcccacgagctcctcgccgcgctagctgagccagccgagccttttgtcctgcgagggcgagcatgggcggcgggggacgagcatggcgcgtcggctcggctggagagcatcctcacggactcgtcggcgccgcgggcggagcgcatgtgggcggctggggcgatcgagctcgggatgctcttgcggctggccgtgccggcggtgatcatgtacatgatcaacttcctcatgtccatgtccacgcagatcttctccggccacctcggcagcctggagctcgccgccgcctcgctcggcaacaccggcgtccagatgttcgcctacggcctcatgctgggcatgggtagtgcagtggagaccctgtgcggacaagcctacggtggacacaagtacgacatgctcggaacctacctacaacgctccgccgttatcctctgctgcaccggcatacctctcgccgtgatctacgccttctcggagccactcctcctcctgctggggcagtcgcccgagatagcccgcgcggcgtccatcttcgtgtacggcctcatccctcagatcttcgcctacgctatcaacttcccgatccaaaagttcctgcaggcgcagagcatcgtcctccccagcgcttacatctccacggcggcgctcgtgctgcacctgctgctcagctgggtggtcgtctacaaggttggtctcgggctgctcggcgcgtcgctggtgctgagcctgagctggtggatca

SEQ ID NO: 16684 - DNA, 148 bp, Zea mays
  unsure (1)..(148): unsure at all n locations
  Clone ID: MRT4577_115213C.1
ttcatcaccctcacggcaagccctgatacatcatcctccttgtctctccccaacctagctccatctctctttcatctactcttcatcgatcgatccatcgtactgcgtgaggatggnngaggggaaagatngagatcaagaggatcga

SEQ ID NO: 16685 - DNA, 311 bp, Zea mays
  Clone ID: MRT4577_115214C.1
cagtgtctcctcgacggcggtgctggcagcgaccaccaccacctgatgcctccgccgtcctgcctggcgccgctgcgcggaggtcctgctgacacggcggcgagcgctccagcgggaggcggctcgtccacctcggtgccgacgacggcgggagcaggggcaggggcgggggcgacgtcagcctcgccccgtcgtgtcgatggcggagcgcgccaggctcgtgcgcgtgccgctcccggagcccggcacgctccgctgcccgcgctgcgactccgccaacaccaagttctgctactttaacaactactcgc

SEQ ID NO: 16686 - DNA, 565 bp, Zea mays
  Clone ID: MRT4577_115215C.1
ggccgctttttttttttttttttctttggttttttgtgttttttttttatttttttttttttttttttttttttttttttttttttttttttttaaaaaagggacttttttattttggggaagccccaaacattagacaaaaaactttttttttgaactttaacccaaaagaaatctaaaaggggggggccccaatgatgggttgttggaaaaacactggtaggtttgtaaaaaaaagttggttgaatggcaacaattgttgcagttgaaaaagggggccagcgttaggcccaacgggctggtaaaacggcaacaactggggttgggtcaaaaagggaggagggctcacaccaactaactggttgaatgggaaaagttgttgctgctggaaaaaagcaggagagttcaatgctgccagttggttgaaaggaaaaaattggtggggggaggcaacaggaaactggctgaaaggaagttgttgttgttgcaaaaaaaaagcagagttcaatgccgctagttggttgaatggaaaaaactgtttttgctgaaaaaaagcaaaaaggtt

SEQ ID NO: 16687 - DNA, 504 bp, Zea mays
  Clone ID: MRT4577_115216C.1
ccagaaaacatcttcttgttttacaacaacacacggggagcacgaagagacgacgccaacgcgacgacagacgcacaggacaagcgcggccacgcacgcacaggcatggccacggatgccaaccacacaaacgaccgccgccggaaagcctacagcagcggacgactaagaaaaacaacatgggacacactaagttgacgaatttgcctacttgtacttgatggcagctctagcgatggcactgcagtaagccttcgtctctgtgcccaaatgatctctcttcccgtctaaaagactgacgactaacgattagataggtagacggagactttggggcgagtaccgtctcctcctcctggttcctgctcccattcctatggtagcgtcggggcagagcagatcgggcggacaccgcgcctcacctctctctccccttttctcctgtcccggagagaaaaacgagcggtggtgtctgcaggatttgcagggaggaggctcgtgccg

SEQ ID NO: 16688 - DNA, 270 bp, Zea mays
  Clone ID: MRT4577_115217C.1
ggcattttctcaaacggtgaccgtcatttcagtcattgcggaccgaccggtgttcggtctcaatgcacgcaattattgacatcagggagaccctgctcttattgttgctcgtacccatgcactaagcctatcccctgcagaaacagagcgccatcttcctcaccttctaaaaagaactagaaccctgcctacagaaccttaaataccagcccagaccagaccatccccgtaactctccaacaggcccgtccttgacgacatgaagcacca

SEQ ID NO: 16689 - DNA, 440 bp, Zea mays
  unsure (1)..(440): unsure at all n locations
  Clone ID: MRT4577_115218C.1
aataaaagaaaattttaaaaatgggggggaacaaaaaactataaaactagggattgttaccccaaaggccttataaaaaggcaaaaggaaaaaaaataaaaccaatgggaaacatgacaaggggaagtaattactgacaattttgggggcaaacaaaaagacttattgatctccccatcctttcaaagttaaccattttccaactaatgggccccattttttctaatacaatttggggcctttttatgttttttgggccggttttcactatttgaatctgaaccatgtgcatgcttcctaaattttttggaaacactggtgttatgcctccaaaactttttaaaatggtctttatcaaccctttaaaagcttaaataatttggggaaagggaacccccctaaaggcncttttctttttctttaacccttttcttaacttt

SEQ ID NO: 16690 - DNA, 1360 bp, Zea mays
  Clone ID: MRT4577_115219C.1
tccctgcaaatcctgcagacaccaccgctcgtttttctctccgggacaggagaaaaggggagagagaggtgaggcgcggtgtccgcccgatctgctctgccccgacgcagctgttacgacgacgtggtcggcctggtgctgcactcgtcgctcatggtgccctacttctcgtggaagtacagccaccggcgccaccactccaacacggggtccctggagcgcgacgaggtgttcgtgcccaagaagaaggaggcgctgccgtggtacaccccgtacgtgtacaacaacccggtcggccggctggtgcacatcgtggtgcagctcaccctcgggtggccgctgtacctggcgaccaacgcgtcggggcggccgtacccgcgcttcgcctgccacttcgacccctacggccccatctacaacgaccgggagcgcgcccagatcttcgtctcggacgccggcgtcgtggccgtggcgttcgggctgtacaagctggcggcggcgttcggggtctggtgggtggtgcgcgtgtacgccgtgccgctgctgatcgtgaacgcgtggctggtgctcatcacctacctgcagcacacccacccgtcgctcccccactacgactcgagcgagtgggactggctgcgcggcgcgctggccaccatggaccgcgactacggcatcctcaaccgcgtgttccacaacatcacggacacgcacgtcgcgcaccacctcttctccaccatgccgcactaccacgccatggaggccaccaaggcgatcaggcccatcctcggcgactactaccacttcgacccgacccctgttgccaaggcgacctggcgcgaggccagggagtgcatctacgtcgagcccgaggaccgcaagggcgtcttctggtacaacaagaagttctagccgccgccgctcgcagagctgagaggacgctaccataggaatgggagcaggaaccaggaggaggagacggtactcgccccaaagtctccgtctacctatctaatcgttagtcgtcagtcttttagacgggaagagagatcatttgggcacagagacgaaggcttactgcagtgccatcgctagagctgccatcaagtacaagtaggcaaattcgtcaacttagtgtgtcccatgttgtttttcttagtcgtcgctgctgtaggctttccggcggcggtcgtttgtgtggttggcatccgtggccatgcctgtgcgtgcgtggccgcgcttgtcgtgtgcgtctgtcgtcgcgttggcgtcgtctcttcgtgctccccgtgtgttgttgacttgttgtaaaacaagaagatgttttctggtgtctttggcggaataacagatcgtccgaacg

SEQ ID NO: 16691 - DNA, 187 bp, Zea mays
  Clone ID: MRT4577_11521C.1
cacccacgcctccgaagagacttgtgtgattgctttggttacaacgctcacggaatccagggcagacctgggagttaatgatcacgtgggcgtcagtacatgcgcagcggtgggatgccataagtatgcaggcggtgtcatcagtttcacttctcacaccatgggacacgtgactggtcattgttat

SEQ ID NO: 16692 - DNA, 591 bp, Zea mays
  Clone ID: MRT4577_115220C.1
cctccctgcaaatcctgcagacaccaccggtcgtgtttctctccgggacaggagaaaagggagagagaggtgaggcgcggtgtccgcccgatctgccacttcgacccctacggccccatctacaacgaccgggagcgcgcccagatcttcgtctcggacgccggcgtcgtggccgtggggtgcgggctgtacaagctggcggcggcgttcggggtctggtgggtggtgcgcgtgtaccccgtgccgctgctgatcgtgaacgcgtggctggtgctcatcacctacctgcagcacacccacccgtcgctcccccactacgactcgagcgagtgggactggctgcgcggcgcgctggccaccatggaccgcgactacggcatcctcaaccgcgtgttccacaacatcacggacacgcacgtcgcgcaccacctcttctccaccatgccgcactaccacgccatggaggccaccaaggcgatcaggcccatcctcggggactactaccacttcgacccgacccctgttgccaaggcgacctggcgcgaggccagggagtgcatctacgtcgagcccgaggaccgcaagggcgtc

SEQ ID NO: 16693 - DNA, 1955 bp, Zea mays
  Clone ID: MRT4577_115221C.1
cctgcagacaccaccgctcgtttttctctccgggacaggagaaaaggggagagagagaggtgaggcgcggtgtccgcccgatctgctctgccccgacgcagctgttacgtcctcctcagtctcaggagcaagatgggtgccggcggcaggatgaccgagaaggagcgggagaagcaggagcagctcgcccgagctaccggtggcgccgcgatgcagcggtcgccggtggagaagcctccgttcactctgggtcagatcaagaaggccatcccgccacactgcttcgagcgctcggtgctcaagtccttctcgtacgtggtccacgacctggtgatcgccgcggcgctcctctacttcgcgctggccatcataccggcgctcccaagcccgctccgctacgccgcctgggcggtgtactggatcgcgcaggggtgcgtgtgcaccggcgtgtgggtcatcgcgcacgagtgcggccaccacgccttctcggactactcgctcctggacgacgtggtcggcctggtgctgcactcgtcgctcatggtgccctacttctcgtggaagtacagccaccggcgccaccaattccaaacacggggttcccttgaacgcaacaagtttttccttgccccaaaaaaaaaggaagcctgcccgtgttaccccctaacttttttaaaaaccccggtccggccgggttagggggccctattttgtgaagtaaagccacggggccggtattccaacaggggtccttgagcgaaacaaaggtgttgggggcggcgttacccccgcgttccccttggcaatttcaacccccaaagggcccctttttaaaaaaaaacgggaaaccccccccaatttttctttttcgaaagcccgctgtacctggcgaccaacgcgtcggggcggccgtacccgcgcttcgcctgcgcacttcgggacccctacggccccatctacaacgaccgggagcgcgcccagatcttcgtctcggacgccggcgtcgtggccgtggcgttcgggctgtacaagctggcggcggcgttcggggtctggtgggtggtgcgcgtgtacgccgtgccgctgctgatcgtgaacgcgtggctggtgctcatcacctacctgcagcacacccacccgtcgctcccccactacgactcgagcgagtgggactggctgcgcggcgcgctggccaccatggaccgcgactacggcatcctcaaccgcgtgttccacaacatcacggacacgcacgtcgcgcaccacctcttctccaccatgccgcactaccacgccatggaggccaccaaggcgatcaggcccatcctcggcgactactaccacttcgacccgacccctgttgccaaggcgacctggcgcgaggccagggagtgcatctacgtcgagcccgaggaccgcaagggcgtcttctggtataacaagaagttctagccgccgccgctcgcagagctgagaggacgctaccataggaatgggagcaggaaccaggaggaggagacggtactcgccccaaagtctccgtctacctatctaatcgttagtcgtcagtcttttagacgggaagagagatcatttgggcacagagacgaaggcttactgcagtgccatcgctagagctgccatcaagtacaagtaggcaaattcgtcaacttagtgtgtcccatgttgtttttcttagtcgtccgctgctgtaggctttccggcggcggtcgtttgtgtggttggcatccgtggccatgcctgtgcgtgcgtggccgcgcttgtcgtgtgcgtctgtcgtcgcgttggcgtcgtctcttcgtgctccccgtgtgttgttgtaaaacaagaagatgttttctggtgtctttggcggaataacagatcgtccgaacgacaacctttttttgggtaaaaaaaaaaaaaaaaaaaaaaaaaaaaaaaaaaaaaaaaaa

SEQ ID NO: 16694 - DNA, 542 bp, Zea mays
  Clone ID: MRT4577_115222C.1
ttctcgagttttttttttttttttttttttttttttttttttttttttttttttttttttttttttttttttttttaaaacccccaaccagcgcccagaaaaaacgggccctttaacaagggaaaagggttttgggccaaccaaaaagctccctttataacacccccttgggggtcccttacggggacttgtaaaaaacaaaaggcaaacgggggagcccccccccgggttttaaaccccacctttaaaaataaatttaaaaaacccaagggagaaaccggccccccaggttttttcccgggttttgggggaaaaccaaccccagcgtcatggggggggcgaagcagcagggaaccccaccctttcggacgggggaaaaaaccccctttcccccctgtcccaacttcctcaaaatctcagggaaggggggacgcccctcagggtttgcgccccacccccgggtcataacccccccaagggcagggagccacccggggggaaggggtggcccaccccctttgttccccaaaaaaaaggcactt

SEQ ID NO: 16695 - DNA, 434 bp, Zea mays
  Clone ID: MRT4577_115223C.1
ctccacttcgaacgccaagtggagagccgtcgccagtccggcacacctccgcgagaagtggatgcacggctgcgcgtcgctcgacgggaaggtcgttgtggtggcggaccgtggcggcttgtcctacgatccttcggcgccacctgcggaggcgtgggcaccggtgtcgccggtgcttgacatgggatggaagggccgagctgcagtggttgagggaatcctctactcttacgattacctgggacaggtcaaggggtatgatccggacactgattcttggagcacagtggaggggttggagagggagctacccaagttcttgtgcggcgccacgcttgccgatgttggaggattgctctacttggtttgggaaggaaagtggaaagggaaattgaaaggtaagatggaagtgaggagcatggtaatgattgaat

SEQ ID NO: 16696 - DNA, 1909 bp, Zea mays
  Clone ID: MRT4577_115224C.1
cattgggtacctcgaggccggccgggaggcggccaggctccctcctcctccctgcaaatcctgcagacaccaccgctcgtttttctctccgggacaggagaaaaggggagagagaggtgaggcgcggtgtccgcccgatctgctctgccccgacgcagctgttacgacctcctcagtctcagcgtacgacctcctcagtctcagtcaggagcaagatgggtgccggcggcaggatgaccgagaaggagcgggagaagcaggagcagctcgcccgagctaccggtggcgccgcgatgcagcggtcgccggtggagaagcctccgttcactctgggtcagatcaagaaggccatcccgccacactgcttcgagcgctcggtgctcaagtccttctcgtacgtggtccacgacctggtgatcgccgcggcgctcctctacttcgcgctggccatcataccggcgctcccaagcccgctccgctacgcggcctggccgctgtactggatcgcgcaggggtgcgtgtgcaccggcgtgtgggtcatcgcgcacgagtgcggccaccacgccttctcggactactcgctcctggacgacgtggtcggcctggtgctgcactcgtcgctcatggtgccctacttctcgtggaagtacagccaccggcgccaccactccaacacggggtccctggagcgcgacgaggtgttcgtgcccaagaagaaggaggcgctgccgtggtacaccccgtacgtgtacaacaacccggtcggccgggtggtgcacatcgtggtgcagctcaccctcgggtggccgctgtacctggcgaccaacgcgtcggggcggccgtacccgcgcttcgcctgccacttcgacccctacggccccatctacaacgaccgggagcgcgcccagatcttcgtctcggacgccggcgtcgtggccgtggcgttcgggctgtacaagctggcggcggcgttcggggtctggtgggtggtgcgcgtgtacgccgtgccgctgctgatcgtgaacgcgtggctggtgctcatcacctacctgcagcacacccacccgtcgctcccccactacgactcgagcgagtgggactggctgcgcggcgcgctggccaccatggaccgcgactacggcatcctcaaccgcgtgttccacaacatcacggacacgcacgtcgcgcaccacctcttctccaccatgccgcactaccacgccatggaggccaccaaggcgatcaggcccatcctcggggactactaccacttcgacccgacccctgttgccaaggcgacctggcgcgaggccagggagtgcatctacgtcgagcccgaggaccgcaagggcgtcttctggtacaacaagaagttctagccgccgccgctcgcagagctgagaggacgctaccataggaatgggagcaggaaccaggaggaggagacggtactcgccccaaagtctccgtcaacctatctaatcgttagtcgtcagtcttttagacgggaagagagatcatttgggcacagagacgaaggcttactgcagtgccatcgctagagctgccatcaagtacaagtaggcaaattcgtcaacttagtgtgtcccatgttgtttttcttagtcgtccgctgctgtaggctttccggcggcggtcgtttgtgtggttggcatccgtggccatgcctgtgcgtgcgtggccgcgcttgtcgtgtgtgcgtctgtcgtcgcgttggcgtcgtctcttcgtgctccccgtgtgttgttgacttgttgtaaaacaagaagatgttttctggtgtctttggcggaataacagatcgtccgaacgacaacctttttttgggtaaaaaaaaaaaaaaaaaaaaaaaaaaaaaaaaaaaaaaaaaaaaaaaaaaaaaaataaa

SEQ ID NO: 16697 - DNA, 185 bp, Zea mays
  Clone ID: MRT4577_115225C.1
cggacgcgtgggtggcgaggcaaaagcattgcgaccacagacagcgcgcgctcaaaggcctttttttttttgagataacaaggaggagaggaggggatggcgctcctgaaaagaacagggaaggcttgaagtactcgtggcagctcgacaagctcaaggctgatcgtgagagaggatttaccctt

SEQ ID NO: 16698 - DNA, 1825 bp, Zea mays
  Clone ID: MRT4577_115226C.1
agggtctgctcctcccccccgcacaaaccactcgttcgtcccgtcaacaagaggagcagaggcgccggagagggaagagggtgcgcgcgctcgcgtgtgtggtgtccgccggcccgatctgccctgctcccgccgcctcgaccaccacccctatcagcaacatgggtgccggcggcaggatgacggagaaggagcgggagaagcaggagcagctcggccgtgccaacggcggcgcagcctaccagcgctcgccgacggacaagccgccgttcacgctgggtcagatcaagaaggcaatcccgcctcactgcttccagcgctcgatcatcaagtccttctcctacgtggtccatgacctggtcatcgtcgcggccctgctgtacgcggcgctggtttggatccctaccctcccgaccgtgctgcagctgggcgcctggccgctgtactggattgtgcagggctgcgtcatgaccggcgtttgggtcattgcccacgagtgcggccaccacgccttctccgactactcactgctcgacgacaccgtcggcctggtgctccactcgtggctgctcgtcccctacttctcgtggaagtacagccaccgtcgccaccactccaacaccgggtcgctggagcgtgatgaggtgttcgtccccaagcagaaggaggcgctggcgtggtacactccttacatctacaacaaccccatcggccgtctggtgcacatcgtcgtgcagctcaacctcgggtggccgctgtacctggcgacaaacgcgtcggggcgcccgtacccgcgcttcgcctgccacttcgacccctacggccccatctacaacgaccgggagcgtgcccagatcttcgtctcggacgccggcgtcgtggccgtggcgttcgggctgtacaagctggcggcggcgttcggggtctggtgggtggtgcgcgtgtacgccgtgccgctgctgatcgtgaacgcgtggctggtgctcatcacctacctgcagcacacccacccgtcgctcccccactacgactcgagcgagtgggactggctgcgcggcgcgctggccaccatggaccgcgactacggcatcctcaaccgcgtgttccacaacatcacggacacgcacgtcgcgcaccacctcttctccaccatgccgcactaccacgccatggaggccaccaaggcgatcaggcccatcctcggcgactactaccacttcgacccgacccctgtcgccaaggcgacctggcgcgaggccggggaatgcatctacgtcgagcccgaggaccgcaagggcgtcttctggtacaacaagaagttctagccgccgccgctcgcagagctgagaggacgctaccataggaatgggagcaggaaccaggaggaggagacggtactcgccccaaagtctccgtctacctatctaatcgttagtcgtcagtcttttagacgggaagagagagcatttggacacagagacgaaggcttactgcagtgccatcgctagagctgccatcaagtacaagtaggcaaattcgtcaacttagtgtgtcccatgttgtttttcttagtcgtccgctgctgtaggctttccggcggcggtcgtttgtgtggttggcatccgtggccatgcctgtgcgtgcgtggccgcgcttgtcgtgtgcgtctgtcgtcgcgttggcgtcgtctcttcgtgctccccgtgtgttgttgtaaaacaagaagatgttttctggtgtctttggcggaataacagatcgtccccccgccaaaattaaaaaaccccaaaaaaaaaaaaagggcggcactagttaaaaaacgcga

SEQ ID NO: 16699 - DNA, 988 bp, Zea mays
  Clone ID: MRT4577_115227C.1
cattgggtacctcgaggccggccggggaggccggccgaggctccctccctcctccctgcaaatcctgcagacaccaccgctcgtttttctctccgggacaggagaaaaggggagagagagaggtgaggcgcggtgtccgcccgatctgctctgccccgacgcagctgttacgacctcctcagtctcagtcaggagcaagatgggtgccggcggcaggatgaccgagaaggagcgggagaagcaggagcagctcgcccgagctaccggtggcgccgcgatgcagcggtcgccggtggagaagcctccgttcactctgggtcagatcaagaaggccatcccgccacactgcttcgagcgctcggtgctcaagtccttctcgtacgtggtccacgacctggtgatcgccgcggcgctcctctacttcgcgctggccatcataccggcgctcccaagcccgctccgctacgccgcctggccgctgtactggatcgcgcaggggtgcgtgtgcaccggcgtgtgggtcatcgcgcacgagtgcggccaccacgccttctcggactactcgctcctggacgacgtggtcggcctggtgctgcactcgtcgctcatggtgccctacttctcgtggaagtacagccaccggcgccaccactccaacacggggtccctggagcgcgacgaggtgttcgtgcccaagaagaaggaggcgctgccgtggtacaccccgtacgtgtacaacaacccggtcggccggctggtgcacatcgtggtgcagctcaccctcgggtggccgctgtacctggcgaccaacgcgtcggggcggccgtacccgcgcttcgcctgccacttcgacccctacggccccatctacaacgaccgggagcgcgcccagatcttcgtctcggacgccggcgtcgtggccgtggcgttcgggctgtacaagctggcggcggcgttcggggtctggtggggtggtgcccctgtaccc

SEQ ID NO: 16700 - DNA, 691 bp, Zea mays
  Clone ID: MRT4577_115228C.1
gccggccgggttcgcgaattatggctcatatgtagacgtataaccgcgcggtcccacaccccccgagttcagattagctccactccggttccaatcgcattcgtcgaccaaagcgagagccaggtagttagagggccgggaaaatgccgatcaataggatcgccctggggagccaccaggaggggtaccacccgggcgccctcaaggtggggttcgctgagttcatctccaccctcatcttactcttcgccggccagggttccggtatggccttcagaaagctgaccggtggcggcccgaccaccccggggggcctgatcgcggcggcggaggcgcacgcattcgcgctgttcgtggaggagacttgtggccacgaacatctcggtgggacacgtgaacccggccgcgaccttcggcgccttcgtgggcggcaacatcaccctgttccgggggctcctgtactggggggcgcagctgctggggtccaccggggagtgcttcctgctccgtttctcgacgggtgggcaggccacgggcaccttctggctgacgatagtgtcggtgaggaaggcgctggtgctgaacatcgtgatgaccttcgggctgatgtacacggtgtacgccacgacggtggacccgaaaaaggtaagcctgggaaccatcgcccccatcgccatcggattcatcgtgg

SEQ ID NO: 16701 - DNA, 226 bp, Zea mays
  Clone ID: MRT4577_115229C.1
cggaccacacccttccgcccacccgtccggttttagatcgggggcggtcgttttagaggatccaacctaccttccgcgggcatgtaacttcttagcggggcaatagggtaacctaaattcaattaacgggccgtcgattttcaactcctggccgggtaaaccccggccttaccccaccttaatcgctttgtaccacatccccttttgtccagctggcttaatttct

SEQ ID NO: 16702 - DNA, 268 bp, Zea mays
  Clone ID: MRT4577_11522C.1
attgctcgaccacccactcgttcggttgacgaggacctattcgagctcgtatgtacgcggaacagactgtgcgcttcttttgggtggcaaaccacggactgccggaacaccttataggctatatgctccgagccgtgcgccatttcaacgaggggcccgttgaggcaaatgacgctctctactctaagtacctcggtcgtaatctacgcttagcctccaacttagacctcttaaacgctggtgcgcgcgactggcacgacacactttt

SEQ ID NO: 16703 - DNA, 613 bp, Zea mays
  Clone ID: MRT4577_115230C.1
ctcgaggccggccgggccggatcccaaagagcacgcagcgcatcactgaagcaccactctcctgcactcactgtgctagctgctcaaaccgtagtagtaacagtccatcaccaccaatggctcccaaggttgcgctcttccttgtgcctgagcctcctgcttgctgacaccgcgcatggatgccaacccaactgatctggcccactcgtcccaacgccgccagacgtgccgactccggcgtcgcacagacacgggcgctgcccgatcgacgccctcaacctcaaggagtgcgacaacgtgctagacctcgtaaaagacgacctaccccaacaacatcaatgctgcccgtagctggaggcttgaagcaccatcgacaccgcatgtgagcgctctgcaccgccatacaaggccaacgccctctgcatccacctcaacgggccccttatcctcaacttcatcctcaacaactgcagaaggatatgaccagaggacttcacttgccccaactaagattggaatctacttgtagtgctccatctcgcgattctatttacgagcatgactgcctcttgcaatattagcgaataagtctagttcgcttcaaattctttca

SEQ ID NO: 16704 - DNA, 744 bp, Zea mays
  Clone ID: MRT4577_115231C.1
agggccggccggggcccgggatttcctgctcgtcgtctcattccatctcttctccccgagctctcgccctatcccttgcctgctccttcccgatcatcgacgccccgctgggactccacatccgccggcatgcgggtcgacaagatctaggtcatccgacccattcctcggagatggacggtgatgagatgaccaccttgattctgcaagatgatcacggacaagcttatcctcccatttctggtactgtacatccggtactatcgactcgaggatactgcaccgtgaaacaactgctgtacctcggcacagaggaggctgtgcaggctactctcgggtacaaagtgtctattaagcgtgctaccattactccaaatgatgctccctatactgtgatgaatctgctacgcaatgcgttagaccccctgtgccactgttaagaacattatctatgtcactgtgttccgacagactatgatatgctcccactgttgccaaactgtgttccaggatggactaagaccatctgcattgccaggcgtgactctcggagatcaggtaccgagctgccgatgttcctctgaaagcgtctgggaatctgagactactgcttgaggcgagaacgaagaacggattgctccgtacgtagtctactgcacagctgtcggaagaattgccctgactatgaactgcacctgccagataatccgaacttgtgctgaggcttccatgaccactgcttat

SEQ ID NO: 16705 - DNA, 610 bp, Zea mays
  Clone ID: MRT4577_115232C.1
atacaagttcaaatccataagaaagaagttcaaatccatttgaaacaagttcaagttcatacaaaacgcaatgatagtaagttccacacaagcctccatattaattcattccgttggtgggtcattggagccgccgccacttttgtgcatcaataagtccataaacgtgctctgatccggaggcggactagcatgatgtgagccagaaccctgtgccgcaacggtgtgcgagcgagtggggaagatctgggtgatgcactgcgccgctcggagcttggagttcggcgaggccgcccggctcaatgatggccgcctggcgtccggcttggtgaggccgcctggctcggcgaggcactgcgcggcccggagcttagagctcggcgaggccgcccggctcggcgaggtcgcctggctcggcgaggccgcccggctcagcgatggccgcccggtgtccagcttggcgaggccgctcgccgcccgacttggcgaggccgatggctgcccgaagccctacgccgccggcccccaccatgaccggacagggagcgcgcgccgctgggtgattctgcaccgccggacagggagcgcgcgcagcggaggtcaaaacgag

SEQ ID NO: 16706 - DNA, 577 bp, Zea mays
  Clone ID: MRT4577_115233C.1
gccggccgggctcgggagtaccactagattacactacactcaagagctagatgagtgctttgcctccacactaagcgatgacgacatcaatgatgtccacatgctcttcaagctcgtccctcctgtggctcgtggccactgcctttgatggtatggcggtccaaggcgcgaactgcaccatcatcacctactgtaggttcagcgggaagactatggcacatcccgatgtgcgctgaaactacattgaatccgccacccaactgataatgtcgactgagctaggacgctgatgcttgctgccgtaagaggcgacgtataccatgctcgttaaacgcaaactgaatggagttgctgaaacatgcaactgtgcgagtccgctcttctgacaggatgacctggccagacttctgcttacaactgacacgatgtcactatagatatgtagtcacatatctctacggcatcgcagtacgtcgatggatacaaacaaccgcatgtcctctctcctgaacatcgcgatagtagccctaggtgctgcacgtgtctctgataatgactcagacatgttccatcagcg

SEQ ID NO: 16707 - DNA, 268 bp, Zea mays
  Clone ID: MRT4577_115234C.1
gagctcactagtcttttgccgcccttttttttttttttttttggatgaatgctttaaacatttggttcataagccaaaaaggagtactatagtcgcactacaatactgcgtttctcggcacccaacttagcacctgagatcaggcagtggacaagggcatcttgtgggccgttcaatgttcctgcgatgctaataatcttcagaggattagcattataactcggggacgatgaacattgatctgctttatgagttgaagaacttgatg

SEQ ID NO: 16708 - DNA, 1120 bp, Zea mays
  Clone ID: MRT4577_115235C.1
cccacgcgtccgcccacgcgtcccgccacgcgtccggcagacggcaatgcagacccccgcgcgcctctccgctccatcctcgccgctcgtctcctccgcgccaccgatacctgtacggccacaacgcgtcgctttcccctccctccgccgccgtgatctcctcctcctgccggcggcgctgaccctcccgacggcgcccgccccgttgcctgcctcggcgcgagggctgttccgcatgcccccgccgcggctggtgaaccgttactttctggtgcgcgcgggcgagtccgtgtacgaggggcagggcctcctccgcaccaacccggtcgccaagacctccgtcgacagcggcctctcccccgtggggctccgccagacggcgcgcgccgcgctcgagctccagcgcctcggcgcctgcgaggacgactgctggatatggccgtccatcactcagagagcttaccaggcggccgagatcattgccgcggccaacggcgtcaaccgcagtcgcatcgtgccggagtacagcttcttggatgcacgcggattgggtgcatttgagtggaagagcttagacaccttacccgaggtgtacgcgtcagataatatttctccagacttgaagcctcctcctatcagggatggtactccaaatgagagcgttgcagatgtatttgtgcgggtgacacagctcatgtcaatactagagacccagtactcaggggaaactgtcgtcattgtttcgccggattctgacaacttgtcaattcttcaagctggattgatcgggcttgaccttcggaggcatagcagcttgttttttcagcctggtgaggtccggccggttgatccatcgagcatacctgaatacaagcaacctccttctactgtttttaagtgtgcaaatccaccgagttgtaaagagtagttcacttccttaccttacagttcatattttctgtccgtgtatgagtataatcatgacaaacgtcttggaccttggtgataattgtatatagctgaaagtattgtttatgtgccacatctaaattattgagcccccttgtgttggacgaactccagatattcacggttcgttcccaaaaaaaaaaaaaaaaaa

SEQ ID NO: 16709 - DNA, 1816 bp, Zea mays
  Clone ID: MRT4577_115236C.1
ggaccctcgaggccggccgggggccttgcccagccgtgcccagcaccttcggacgccaattcacaacttcgttgttccttccgcagctccgagctccggaatcgagcaaagcacccgagcctgcgccgcgtcaagccgtcaaagctcccccgcttcataccattccctcccccgatccctcgcctcagccctcagctccgcccctcggtttccgaagcgccaccgccgacgtggcctccctcggctccaatggcgttgccctacctggaggccgtgctttgctttatgattttcatgtacatatttgagacatatcttgacatccgtcagcatagagccctcaagctgccaactttgccaaaacccctgctgggagtaattagtgacgaaaagtttgaacgctctagagcttatagcctcgacaaaagctatttccattttgttcatgaggctgtgactattttaatggatactacaatactatactatagagttcttccctggttttggaagaaatctggagagttagttaccagtgttgggctgagtgctgagaatgagataatacacacccttgctttcttagctggttccatggtttggtcgcagattacagacttgccgttctctctctattcaacttttgttatagaggctcgacatggttttaacaagcaaactatatggctcttcattagggatatgatcaaaggaattttactatccatgatattggggccaccaatcgtggctgctatcatctacatagtacagattggaggaccttacctggctatatatctctggggttttatgtttgtattagctctactgatgatgacaatataccccattgtgatagctcctctgttcaacaagttcactcctcttcctgaaggagtcctcagggaaaaaatagagaagctggcagcttccctcaagtttcctttgaaaaagcttttcgtggtagatgggtctaccagatcaagccacagtaatgcctacatgtatggttttttcaagaacaagcgcatagtactctatgacacattgattcagcagtgtagcaatgaggatgagatagtttctgttatagcacatgaacttggacactggaaactcaatcatactgtctattcctttgtagctgtccagctgcttatgtttcttcaatttggaggatatactctagtaaggagctccaaagatctatttggaagttttggcttcaaggaccagccagtaataattggattgatcattttccagcacaccataatacccatccaacaccttctgagcttttgcctgaaccttgtcagcagagcatttgaatttcaggctgatgcctttgccaagaaccttggatatgcccctcagctccgagcagcccttgttaaactacaggaggagaacttgtctgcgatgaacaccgatccttggtattcggcatatcactactcccacccaccactcgtcgagaggctgcaagctcttgaagattcagacagcaaaaaagaagattagtcgatccttgtatgaggtttacatatggatttttccctgccacatgcacaccgattcagtgcttggatggtgagggttttgacataggagtgttgtcaaagctttagagtgcatctttcggtcaggtgtaacagcctttcggtcattgagacatataagcgaattagctattaaaaaaaacagaactgttgcatcttacaaaaaaaaaaaaaaaaaaaaaaaaggggggacccgaatatcaaaaaatgtaaagactaatctgttaatattttagaaaaaattttatatt

SEQ ID NO: 16710 - DNA, 556 bp, Zea mays
  Clone ID: MRT4577_115237C.1
gaagttttggcttcaaggaccagccagtaataattggattgatcattttccagcacaccataatacccatccaacaccttctgagcttttgcctgaaccttgtcagcagagcatttgaatttcaggctgatgcctttgccaagaaccttggatatgcccctcagctccgagcagcccttgttaaactacaggaggagaacttgtctgcgatgaacaccgatccttggtattcggcatatcactactcccacccaccactcgtcgagaggctgcaagctcttgaagattcagacagcaaaaaagaagattagtccgaacggcgaaccgccacagccattgttcttgaagggacaaagtcttaatccttgtatgaggtttacatatggatttttccctgccacatgcacaccgattcagtgcttggatggtgagggttttgacataggagtgttgtcaaagctttagagtgcatctttcggtcaggtgtaacagcctttcggtcattgagacatataagcgaattagctattaaaaaaaaaaccagaactgttgcatc

SEQ ID NO: 16711 - DNA, 416 bp, Zea mays
  Clone ID: MRT4577_115238C.1
cacgcgacgtaagctcggaattcggctcgagcggctcgaggaagaaatctggagagttagttaccagtgttgggctgagtgctgagaatgagataatacacacccttgctttcttagctggttccatggtttggtcgcagattacagacttgccgttctctctctattcaacttttgttatagaggctcgacatggttttaacaagcaaactatatggctcttcattagggatatgatcaaaggaattttactatccatgatattggggccaccaatcgtggctgctatcatctacatagtacagattggaggaccttacctggctatatatctctggggttttatgtttgtattagctctactgatgatgacaatataccccattgtgatagctcctctgttcaacaagttcact

SEQ ID NO: 16712 - DNA, 537 bp, Zea mays
  Clone ID: MRT4577_115239C.1
aaaccccagcaccccaaaacggcaagcgggggccccattaactaaaacgggaccccgttggggcccctgccccaaacaggttacatgggggattttatggcaaaaatctccccggggccccccaaaagaaaaatcgggggggccaaaaaaacagtttcacaggacttgggcaaacaaaaaaccccttgccccccccccgtttaagggggccccccaggggcccggaatttggcccccgggaaaacaaaaaaacccccaacctttttttaaatccaaaaaaggggggtgtttttggaaaaacccttttatctggggggggcccccattttaattggccccggggacaaaccaacggccaaaaaaaaaaggaagggggccccagtccccccccccctatgagataggatcccccccccgccccgccgctttgaaatttttacagcctcaatatttttaaaaacaaatccgttttggttaaccttgaccaaaagggctttgtatgattttcccttgaaagcctaaacacccctagggggg

SEQ ID NO: 16713 - DNA, 189 bp, Zea mays
  Clone ID: MRT4577_11523C.1
ttgactcctactatatcaccttatctcacttctaacacaacactaaatcattgcaaactggtataatccatacaactgtgtacaactagcatacatactaatatatcctcctgattaccaaaatactacgccttacttaacgcccactacttatccaccattatcaactgacttaccgcccataaaatt

SEQ ID NO: 16714 - DNA, 376 bp, Zea mays
  Clone ID: MRT4577_115240C.1
atttgaggacgtcgctccattggtgtatatacgccccgtagctgtcttaatagatggaaataccagaccctctggagtttgggcaacttgtgagcgtcctggtttgagcctgggagagctgtctctcaactagatgttgtaccaaactatgctttggttctagtatgtattactgcttgaccaaagcttaatgatttctattattttcaggaactgtattcctgaatgattacctaagtaatatatttcaaatgtttaaaatatcccctgagtgatggatggtttcatctttcccaagtaactatcaccatggactgctaatataaaagtaatatttgcacagcagtcagcaatgcagcattatatttgcatgtgc

SEQ ID NO: 16715 - DNA, 511 bp, Zea mays
  unsure (1)..(511): unsure at all n locations
  Clone ID: MRT4577_115241C.1
agcagtggtaacaacgcagagtacttttttttttttttttttttttttttttttggactttgtaatttttaattcaataaaaaatattatgttgggtgttttctgagcgttgaaataaatccgcgtgaattacttaattctgaaatagaaaagctgacgtggctataggctgaggctgtagcctgctgcagcctgtgcactggagcagcagggacgagagtggaggcgagagctgacgtgacaggggtgagaagaaggctgtgcactagactcagtcttagccttaggccttagccttaggcatgttggtcacgtactcgcaccgcatgccaatgatggcgctgctgccactgagcttgaactgtactccaggacctggccgtggccggaacccaccggaagcaacaggctgtaccgaattggacaattggtggacaagggtaccacgagcatttgngtggaatgggggggcacccgcgtactctgcgttggtaccactgcttaagggcga

SEQ ID NO: 16716 - DNA, 326 bp, Zea mays
  Clone ID: MRT4577_115242C.1
gtacaacttctctcctttggtattaaaccttatatcttctgatccatccactctgatgaacttttttgattattctttagaaacatcctgccccagaaaactcctgccttcgtcccattcatgcattaatgaccctctttaatgacggtatcaaacttataccctgacgaggctaccctcctcatgatcctgcataacccaccgtccactgtccgccctggtcatgcccttgttccccttcacccaccaggccggcggccctgcttagtctgcgctgctcgcgtgcaccttcttgttcaccagcgccacatcgcggtccacctcca

SEQ ID NO: 16717 - DNA, 336 bp, Zea mays
  Clone ID: MRT4577_115243C.1
atcaataatcagattcttaacaaattctaaattattgatatatcactttttgaccacttttttacatttggcaccagtttaccttttttattcttaaaacttcttttttttgacctctggaaaactgtattttcaggacattctcccacgtctcttattccaaaggctctacattctttctgtcttttaaatattttatacttctctaaaatgtggagctcatacaaatcagcaagaaaaaacaaataatcccatcaaaaagtgggtgaagaacatgaatagacaattctcaaaagaagatacacaaaatataagtggtatacgttaactatgtct

SEQ ID NO: 16718 - DNA, 388 bp, Zea mays
  Clone ID: MRT4577_115244C.1
cgccgacaacagcgtagtgtagggtagtggcggacagggttggggagagtactactgatccgcaatgtcgacggatgaagctgttgtggctgaagtcccgaagaccgaagtgccatcgaaagtcccagcggcccaagtggccgacgcgcccaaggcgaagaaagcgcccaaggagaagaaagcgcctaacgagaagaaactttccgaggcgaaaaagccggcggcgcaccctccctacactgagatgattgtagaagcgatcgctgccctcaaggagaggaaggggtcgagctcagtggccatcagcaagtacgtctaggggaatcatggctgcaagctccccaccaacttcctcaagcagctcactgtgcagctgatgaagctcact

SEQ ID NO: 16719 - DNA, 444 bp, Zea mays
  Clone ID: MRT4577_115245C.1
gcagcagccgcaggcggggccctggagcgcaatccctctcagcgctagcaacacacgggtaggggattgaagaagcacttgaagaggctcaaagcgcccaagctcgatgctcgaaagcttggcggaacttttgcttccaagccatcttctggacctaacaagtccagggagtgcctttctctgatcctcatcatcaggaacaggctcatgtatgctctgaactaccgtgaggtcatttctatactgatgcaacgccctgtacttgctgatggcaatgtctggactgacaagacctaccctgctgggttcatggacgtcatttccatgcacaacacaatggataactacaggctgctttatgacaccaagggcctatttcgtcttcacccaatgagggatgaggatgccacgatcaagctctgcaaggtgacgtctgttcaattt

SEQ ID NO: 16720 - DNA, 345 bp, Zea mays
  Clone ID: MRT4577_115246C.1
aggtaggattttttttttattttttatttttttttaacaaaaaaataacaacattttcttttcattcaccactgtcaaatatacaagtccatgcactttcttacttgctttacaaagggtttcggaaaaaattcccgtcggggggttgatctttttttgggcacgtggctacaaaaaccgggggttttgtgtaaatccaaaaccactaatttacatttcttcgttggggataaatgttttttggcctttttcgttaacaaagttaactgatccctttcacaatcacaataaattgtcttgggcgttcactttaaatgcaattttatttttcccctttttgcacct

SEQ ID NO: 16721 - DNA, 739 bp, Zea mays
  Clone ID: MRT4577_115247C.1
agctggagaagagagacacgagctctccctccggaggccacgagcctccccctctgttcgtcgtcccctctccaacgcccgcgcgcccgccaacaccattccccgctccgattcctccgaatttccggctccccatggcttccccagatatctcctttgatattcgcccagagtttaactcatttgatcatctaagaagcacgggatatatttcaacagatagaccatggttgaaactatatggaataagagttccacccgtgtcaccgttcaacagtttgagcagtacgcccgatctggcactcattcaccagtgcttacctgatgaactgcttatcgagatatttgggagaatgagcccatatactttagggagggctgcttgtgtctgccgcaagtggaaatatactacacgcaatcctactttttggcggaacgcttgcctgaaaacctggcagaggaatggaatagaggcaaacttcaggatggtgcagtcgttatatgattcttcctggagaaaaatgtgggtgcagagaccaagaatccgaattgatggtctttatgttagtagaaacacatatattcatactggaattacagaatggcagttcaagaaaactgtcaatgtggtttgctactaccgttacttgagattttttccaaccgggaagttcctgtacaagatttccccacagaaagttgaagatgttgtcaagtgcatgcatctccgagcatcaaa

SEQ ID NO: 16722 - DNA, 381 bp, Zea mays
  unsure (1)..(381): unsure at all n locations
  Clone ID: MRT4577_115248C.1
cgcgtacggcggggacaaacatcaattgtggcaagangttaatggcccgagcggaggcggccatactcgtcgtttttcaactcatggcggccccacccacagccatggccgcccgctcgccgcacggagcacgaccggatggctccctcgccacgacgcccaacgagactatgctgtcggccacgctgtgctacacgggggagacatgcaaatacattggctgcctcactcctgcttgctcacacaactatattgaacgactatgctacatcatatttactactgtagcttgaagccattccgaaaaaccacaactctggcatgcatgcgacaaccctgactcgagagcttctgatcaagtgatgcatgttttaaagcatc

SEQ ID NO: 16723 - DNA, 890 bp, Zea mays
  unsure (1)..(890): unsure at all n locations
  Clone ID: MRT4577_115249C.1
tatagggcgattggtcttctcgaggccggccgggatcttccctttcttggcgaagggcacacgctcccgctgctccacttcgccacggcactctcagcgcaacacgggaggctctgcgtgaccctagtcaccaccccgggcaacgtagccttcgtccggagccatctccccatgtcggtgggcctcgtcgcgctcctgttctcgtcgttctcgccgctaccggagggcatcgagtccaccgacgccctcccgtgcccgtcgctgcacctgacgttcatggaggcgatggggctcctgcgtgggccattcaccgagttcctggcgtcgctcccgtccctgccgctcgcgctcgtctccgacttcttcctcaggttcacgcgtcgcgtggcggccaacgccgacgtccaccgcatcgtgttcaacagcatgtcctgcttcgcctctgtgatctgcaaggcgctcgccgcgagcccaccggccagcttcgagcccgagaccatgatccaggtgcccaacatgccggtgcacgcggcggtcagggcggaggaggttcccaatggggtcaccaagagggccgaccccgacaacccgttcatgcgcttcttcatggatgagatcggtgattcggacgtgcgtagctggggagtccttagcaacagcctcgacgtgctcgatgcagcctacgtgtcggccttggagttgttctacgaggcgggcgcccgtgcctggctcgtgggcccgctgttcatggccgccggcgacatgctgaacggcgagaagaggagcaagacccctgaggctgtctctcatggctcgacgagagggcggcgcatcccggggtcggtggtgtacgtctcgnttgggacgcaggccacatcacatacgcgcag

SEQ ID NO: 16724 - DNA, 232 bp, Zea mays
  Clone ID: MRT4577_11524C.1
taggggcctttttttttttttttttttggagaaacaaataccgaaaagaagaattaccgtatcacttaaggtaaggcaacagccgagataacatgaaacccaccgactatcgcgaggcccaaaaagaataaccacgacgaaactacctccccaccacaaataaagtctcagaggacacaccacaccgaccgactacaataactctcggcatgggctgaggcagtcagaaact

SEQ ID NO: 16725 - DNA, 172 bp, Zea mays
  Clone ID: MRT4577_115250C.1
cccacgcgtccgcttaacatgctgcttcatcttattggcgatggcggtgagacccttcaggttgctgcgtttcgagccatggttaacattttaacccgtgtgcagcaggagtcatcagatggggctgagagaaatagattccttattaattatgttgattttgcttttgatg

SEQ ID NO: 16726 - DNA, 307 bp, Zea mays
  Clone ID: MRT4577_115251C.1
gggacacaagcagggtcattttaaattttgggaagattttggttaacaacaggcgtttcatttcgacaggccccaccatgggcaaccggggctttgggttaaacttaaaccctggcaacccccggcttggacttgagttttttaatgttttgacagggttggggaaccaaaaaaacaagggggtttttttatgggtcctttttgggcccttttggggaccaagaggattcttctgcacttgttgggtgttcaactttttttcacaattttggggacttttggggttgttgttgaccctaattttttg

SEQ ID NO: 16727 - DNA, 373 bp, Zea mays
  Clone ID: MRT4577_115252C.1
tcttccaaccaaaaaccggctttataaacctgctacaaacaacttcaacacctggtcaggtcatcagatgtctgctggtacctataaacaaaaatcatcctctaagtcatcaaatcctaacaatcaccaagatctcattaaaatatcatcttttcaacgagaaaatcttttaacaagtatggatacatgttcagaacactattacaccatactatctccgactctgacaaaatgcatccacctgaactatctccacaatcgcctactcaccttattacagaacatctttccacctcataacaccctactgcgactacatcattaaacctcatccatacagtacatacattatcaacaccttaatatcagattt

SEQ ID NO: 16728 - DNA, 566 bp, Zea mays
  Clone ID: MRT4577_115253C.1
cattgggtacctcgaggccggccggggccgcggtcccgacgtgctgtccgtgtccggactggactttctctcggtgccgactacgcctgcttcacggggctgtccccaggggagcagctgcagctccagagctcccccctgcagagcatctgcgccagactcgagagcctggacaacgcggatggccagcgaggtcaccagatgcggcggggccggcgtcgacgtctggtcgtggtaccaccactccaacggtggcctgtccaagtgaagccggtagacgccggatgtgagtgtggtgagactggcgccgctcatcgacggggactatcctgtcctactgcatgtgcatatctctgttgatgccgcgctgtaggtatgaccttgagcctacgttgtttctgtgttcgatgacacgaagctatggaacgtacttgactttttcgtagccatcttgcctccggacatacatttacgaccgtctgtattagaactgactaggtcaagctcgcgtatactactgatatatatgcatgatgagaggatgaactcatatgctgatcttggta

SEQ ID NO: 16729 - DNA, 408 bp, Zea mays
  unsure (1)..(408): unsure at all n locations
  Clone ID: MRT4577_115254C.1
gagcgcgcccgacccggaccccggcaagaagccacccaggaggaccgacggcgcaccgagcacccccgcagccgcgcccccacccggngaccgggccgcacgcagggagggggaccggagccaacggccgcaaacgacacacacacgggcccggcaggcgcagacaccggacgggagagcggggcacgcgcgcgcccaacccagggccgcagaaccggcgccaggaggcgcccngggacaacgacacggccgcgcccggcagcgacggagccagagacgaggacgccgaccacgacccgcgcgacgacgaaggacgcaggcaaggagaaggacacgacgcggncccnggccgggcnggaggacaacaaggacgccaaggcggagcacgcccccgccgaggacagcagc

SEQ ID NO: 16730 - DNA, 331 bp, Zea mays
  Clone ID: MRT4577_115255C.1
gtcagcgctttacagcatgaaattttatgtttttatatatggtaacagttgtgttttcataaagtcgtttcacacgggtaatgaaaaaaaaagcccggcctgaggttatttatttctggcaaaataatctaaatggggaccaatataaatgtgggtccatggtgtcccaataggaaaaccctactttgtttatggcccaacgtcttgggcccaaaagggggccccaaacctcccccgggggaatgggtaattaaacagcttgtttattttgtttttgaaaagaaacaaacaaatttctttttttggtacgcaaactggcccccctttttat

SEQ ID NO: 16731 - DNA, 1272 bp, Zea mays
  Clone ID: MRT4577_115256C.1
cattgggtacctcgaggagggccgggaattcgtcccaaaccagttcagcttccaaaaaggcaaagcagagcccgcacgcggagaggctacagaagggtatgggtcacctccgcggcctcaccgccgcgcggctcctcgcggcggccttcctgctctccgttgccgtcccggccgccagagcccaggaagaaaccgagcacgaggaggagttcagctacgtcgtcggcgacgagaacgggccggagcactggggcagcatcaaggcggagtggggcaactgcagcgccgggcggatgcagtcccccatcgacctctcccacgagcgcgtctcgctggtgcggtccctcggctacctcacccactcctaccgccccgccgaggccgccatcgccaaccgcggccacgacatcatggtgaggttcaagggcgacgccggcttcctggtgatcaacggcacggcgtactacctgaagcagatgcactggcactcgcccaccgagcacaccgtcgacggccgcaggtacgacatggagctgcacctggtgcacgagagctcggcgaacaaggcggcggtgatcggcatgctctacgagatcggcgccgaggacccgttcctgcaagcgctggagccgtccatccaccggatcgccgacaggcaggaccgggaggaggccatcggcgtggtggacccccggcgcgcgcgcggcagggccagcgtctactaccgctacgtgggctccctcaccacgccgccctgcaccgagggggtcatctggaccgtcgtcaagagggtccgcaccgtgtccaggcaccagctggagctgctcagggaagccgtgcacgacggcatggagaagaacgcgaggccggttcaggacgtcaacgacagggacatcagcatcttccgcccaaagccacacaagcactactagtactagctatggtataggttgcacagtccagcagcgcgcgtagttggtatcgatcagtagtgatgcacgagctagctgacgcggttcagtgttggggagaggtgtctgctgtatatggttacggttttgttttataattctttccatctatgttataggacgaaataaacagacgaggatcaccttcaggtccactcttcagaagaagaacaaaaaaaaaggaaaagagaacatgtcgattcgcatgagccaataatataataaagacttgacgtacgtacgtgtggaccgcggaattcctcattactgcttgctttttatagatcgtccatcgaattat

SEQ ID NO: 16732 - DNA, 1180 bp, Zea mays
  Clone ID: MRT4577_115257C.1
acgaggcaaaaaggcaaagcagagcccgcaagcggagaggctacagaagggtatgggtcacctccgcggcctcaccgccgcgcggctcctcgcggcggccttcctgctctccgttgccgtcccggccgccagagcccaggaagaaaccgagcacgaggaggagttcagctacgtcgtcggcgacgagaacgggccggagcactggggcagcatcaaggcggagtggggcaactgcagcgccgggcggatgcagtcccccatcgacctctcccacgagcgcgtctcgctggtgcggtccctcggctacctcacccactcctaccgccccgccgaggccgccatcgccaaccgcggccacgacatcatggtgaggttcaagggcgacgccggcttcctggtgatcaacggcacggcgtactacctgaagcagatgcactggcactcgcccaccgagcacaccgtcgacggccgcaggtgagaacgaatgaatggtggtctgctggtctcgtcgtcgtcgttgagagccaataatataataaagactcgacgtgcgtacgtgtggaccgcgtacgacatggagctgcacctggtgcacgagagctcggcgaacaaggcggcggtgatcggcatgctctacgagatcggcgccgaggacccgttcctgcaagcgctggagccgtccatccaccggatcgccgacaggcaggaccgggaggaggccatcggcgtggtggacccccggcgcgcgcgcggcagggccagcgtctactaccgctacgtgggctccctcaccacgccgccctgcaccgagggggtcatctggaccgtcgtcaagagggtccgcaccgtgtccaggcaccagctggagctgctcagggaagccgtgcacgacggcatggagaagaacgcgaggccggttcaggacgtcaacgacagggacatcagcatcttccgcccaaagccacacaagcactactagtactagctatggtataggttgcacagtccagcagcgcgcgtagttggtatcgatcagtagtgatgcacgagctagctgacgcggttcagtgttggggagaggtgtctgctgtatatggttacggttttgttttataattctttccatctaaaaaaaaaaaaaaaaaaaaaaaaaaaaactcgaggaagggccgcggtaccc

SEQ ID NO: 16733 - DNA, 359 bp, Zea mays
  Clone ID: MRT4577_115258C.1
ggggtgggctcaataaagatggcggggatggggacaagcccaattcacgtttttttatggggggctatgtcgcccacaccgccccaaggctggttttcgctcttgcattcatcaacgccacaccataactggagttactttatgcttggggaatcaagggctggattcatcacacccaccatataaaaagccttgtttagggggggagaatttgggcttcccattgctgaaacgtatttttccagccatcgatgaatggggtccagatttgcgaacatatatttatcgtaggccccaatcacagaaccccgggctttgtaggctttcagggtttcgtcaaaggaaccaattcccgccta

SEQ ID NO: 16734 - DNA, 400 bp, Zea mays
  unsure (1)..(400): unsure at all n locations
  Clone ID: MRT4577_115259C.1
gccggccgttccgaaacactacgatctccatctatctatttgcacatcgtcgtggaacgcgacggctagccttcctacctgttcctgtgggccgcacgaatcagagggcgcaggaagtccactagggggtgaggcagccaagagaagcgaactgtgccaccacaggcnggcgcggcaaactcatgccccaggggacgcgcgcaatcgaagaagccccaccgtttccgccccggtaccgaacttctgcgggagatccggaagtacaagaacagctcacaactggtgatacgcaagctgccgttacagaggctggcgcgggagatcgcacagaacttcaagagcgaccttagattccagagctcctccggctcatgagttgaggaggtctgcgagggcaacc

SEQ ID NO: 16735 - DNA, 337 bp, Zea mays
  Clone ID: MRT4577_11525C.1
aaagaaccctaattaaccccgcccccccgaaaaaaacgaacgttttaaaatggccttccacgtctattttccaaagattggccgctgaattgagtttcatgtctttacaagattccgaggcctccaaactggccaaaatctctttcgctggagcgtaaaactccatggggctcttcaattgcccggcacttcaaaagtgacttcttcccaaaaaacccccgaaggggaccacataggtcaaaccgccaattctgtccatagagggtgccacactttgacattttatgggggcccacccgagctggacacttaccggggttcccattacccgggtttt

SEQ ID NO: 16736 - DNA, 259 bp, Zea mays
  Clone ID: MRT4577_115260C.1
gggtcaaacaaaaacctaacttccccctaccttccatatattgtctcgaaaccccccactcattattccggtaactaaccaatacaaaaaacaccatccttgtgttttgataccaccctcaaaatcaacacaccctgtgattggtccaaaaccaccacttctgaatttttcaaccacccaaaaacctgcccaagcttgcgtgcccccttttctagagttcaaccagggcctctcttgccaaaacaacttttactttctg

SEQ ID NO: 16737 - DNA, 439 bp, Zea mays
  Clone ID: MRT4577_115261C.1
gggggggacctcccacaaaagtcaatttgatttcaatttgacaatcgcttgtttaaatatccatcaccccgggttttttgtaaactttgtaaacctcccatgggaataaaaagtccaaatgctttttcagttcgtaaaaggggccccaattgggggtggcttttttgcataaacaaaaatttttttgtggggcaaagggtcaaagaactttttttcctgcccggggtacattgaaattccggaaattttttgccctcctagcggggggggccccatgctcaaataaaatttgataaactcaaaaccctcccccaaaggaaaaataaatttttggggcccattgactaaaaaagtttttttttaacccaaaatgcttggagccaaaaatacttaaaaagggcccacagttttgcccctttgatttgtaaggcccaaattg

SEQ ID NO: 16738 - DNA, 276 bp, Zea mays
  Clone ID: MRT4577_115262C.1
atgaaatgcctgtctcaggccctgcataccttccaaaatgacatccacgtctaccccatctggctgtgcccgttcatcctgcccagccagccaggacttgtgcatcccaagggagatgaggctgaactctacgtggacatcggggcatatggggagccacgggtgaagcacttcgaggccaggtcctgcatgaggcagctggagaagtttgtgcggacgtgcacgggttccagatgttatacgccgattgctatatgaaccgggaggaattctggg

SEQ ID NO: 16739 - DNA, 386 bp, Zea mays
  unsure (1)..(386): unsure at all n locations
  Clone ID: MRT4577_115263C.1
gccaatgtaacgcgcctcatcttattgttcattccaaacaacccacactaacagcaaccatctcaagaatgcatcactgttattacccagacgcaaacatcccaacccaacgtacgctgcgcaatgtgggcggggtacacgactcgcccgtcacccccaaccaattcgaaagccaaagccgggatcgtcaggttcaggttgtcgccgaacgtctccgcgtatggcggctcaccgaccaccacgatcgcgtagtcgtacttgtcggccngcacgccgctgtccgggctctccgngttcaccacctgcgtgctggggtccccggtggcctcgttcccggggcggttcgttgtgccggctgtggtgttgccgctggttccttgccccgt

SEQ ID NO: 16740 - DNA, 4073 bp, Zea mays
  Clone ID: MRT4577_115264C.1
ggtagtagaagtagctggcgtatacggtatagtgagcagtacatggatacatgattttacccgtacacggtttgacaaattcttttatcagtacacggctaaatagggtatggaatagcacgggccgatgggtaaatgcacatcgccatctctggtctcagcaggagaggtagtagcgtgccaatgtaacgcgcctgatcttattgttcattccaaacaacccacactaacagcaaccatctcaagaatgcatcactgttattacccagacgcaaacatcccaacccaacgtacgctgcgcaatgtgtgcggcgtacacgactcgccgcccgtcacccccaaccaattcgaaagccaaagagcctcacgcccgcccacgaatacacagctcactcacaggccacatcccatcagagcgcctcacactcactcacttcgtgcccttggtggtgagtccgaagccgaacgggaagagcgggtcgtagtgcgcgtcgcccacgttcatgggcagctggtccaccgacttgaaccacgtccgcggcagcttccccgtgaacccgtagtcgccgaacagcacgtccgccacgccctgcccctccgaccccggcagccacgccgccaccagcgcgtccatgtcgcccaggtacggctccaccaccagcggcctgccggagatgaggaccactacgcacttggcggccccgcacaccgactggatcacgctcggcccgggcgccgggatcgtcaggttcaggttgtcgccgaacgtctccgcgtatggcggctcaccgaccaccacgatcgcgtagtcgtacttgtcggccagcacgccgctgtccgggctctccgagtacaccacctgcgtgctggggtccacggtggcctcgatcccggagaggatcgtcgtgccggcagtggtgttgccgctgcttccttgccacgtgatcgtccaccccccgcactggttgcccaggtcgttggcgtggctgccggcgaccaggatcttgccggccttcttcgggaggggcagcaacggagcgtaggaggacttgccgttcttcaggagaacaagggatttcctgacggcttcgcgcgccagttcccggtgttcttgcttcccgagctcgccggcgaggctggagtcggggtaagggttctcgaacagacccatggtgaacttgacacgaaggatcctgtagacggcgtcgtcgattctgctcatggggatgaccttgttctgaacttgtgtcgtcagatcgtcgatgaattctgtgtatctgaatggaaccatgatcatgttaattccagcaccaacaccagcctcaattgagtaagagtagttggcgtgaggaggagtagtgatccgatcaatgccctcccagtcggaaatcacaaaacccctaaacttgagcttgttcttgagaaaatccgtgaccaggaaatggttcgcgtgcatcttcactccgttccagctggagtaggagaccatgaccgtggagacacctcggatgatagagttgtagtaaggaggcatatggatgctcagcagcccgtgtgtgtcgatgatcgtgttgttctcgttgattccgttatgcgttccaccatcaccgacatagtgcttcgcgcatgcagcaaccttcttacttcccccaacatacggccttcccgcggaatccgcaggagcgtcaccttgcaggccagagatgagtgaagtcagtgactggacaacctttggatcctcactgtagctctcatagcaacgtccccatcttggatctctacagaccgctatacagggagcaaaggcgtaaggaattccagtagctctaacttcaagagcagttgcttctccaattctcttaacgaggtcagggtccctggtagctccaagcccgacgttgtgagggaaaatagtagctttgtagacgttgttctgcccatgcactgcatcgataccgtagatgatcggtatacccagacgcgtagaaagagcgcccttctgcatctcggtcaccatggcggcccaagcctgggcagacgcctgaggagcaggcacgctgcctccgccgctcagcacgctggccaaatacttcataggtagcgtgctgagtggtggaggcagtgtgccttctcctcaggcatccgctgcagcttgggcagtcgatggtgaacgagatgcaaaagggttctctttctacccgccttggcattccgatgatctacggtattgatgctgtccatggcaacaataatgtctacaaagctactatcttcccccacaatattgggcttggagctaccagggaccctatgctcgtgaagagacttggagaagcaactgctcttgaagttagagcaaccggaatctcttatgcctttgctccctgtatagcggtttgtagagatccaagatggggacggtgctacgaaagctatagcgaagacccaaaggctgtccaggcaatgaccacactcatctctggcctgcaaggtgacgctcctgcggattccgcgggaaggccgtatgttgggggaagtaagaaggtcgctgcgtgcgcgaagcactatgtcggtgatggtggaacgcataacggaatcaacgagaacaacacgatcatcgacacacacgggctgctgagcatccatatgcctccttactacaactctatcatccgaggtgtctccacggtcatggtctcctactccagctggaacggagtgaagatgcacgcgaaccatttcctagtcacggattttctcaagaacaagctcaagtttaggggttttgtgatttccgactgggagggcattgatcggatcactactcctcctcacgccaactactcttactcaattgaggctggtgttggtgctggaattgacatgatcatggttccattcaggtacacagaattcatcgacgatctgacgacacaagttcagaacaaggtcatccccatgagcagaatcgacgacgccgtctacaggatccttcgtgtcaagttcaccatgggcctgttcgagaacccttaccccgactctagcctcgccggcgagctcgggaagcaagaacaccgggaactggcgcgcgaagccgtcaggaaatccctggttctcctgaagaacggcaagtcctcctacgctccgttgctgcctctcccgaagaaggccggcaagatcctggtcgccggcagccacgccaacgacctgggcaaccagtgcggggggtggacgatcacgtggcaaggaagcagcggcaacaccactgccggcacgacgatcctctccgggatcgaggccaccgtggaccccagcacgcaggtggtgtactcggagagcccggacagcggcgtgctggccgacaagtacgactacgcgatcgtggtggtcggtgagccgccatacgcggagacgttcggcgacaacctgaacctgacgatcccggcgcccgggccgagcgtgatccagtcggtgtgcggagccgccaagtgcgtggtggtcctcatctccggcaggccgctggtggtggagccgtacctgggcgacatggacgcgctggtggcggcgtggctgccagggtcggaggggcagggcgtggcggacgtgctgttcggcgactacgggttcacggggaagctgccgcggacgtggttcaagtcggtggaccagctgcccatgaacgtgggcgacgcgcactacgacccgctcttcccgttcggcttcgggctcaccaccaagggcacgaagtgagtgagtttgaggcgctctgatgggatgtggatgtggcctgtgagtgagctgtgtattcgtgggcgggcgtgaggctttggctttcgaattggttgggggtgacgggcgagtcgtgtacgccgcacacattgcgcagcgtacgttgggttgggatgtttgcgtctgggtaataacagtgatgcattcttgagatggttgctgttagtgtgggttgtttggaatgaacaataagatgaggcgcgttacattggcacgctactatctctcctgctgagaccaaaaaaaaaaaaaaaaagggcggctgctcgcgatctagaactagt

SEQ ID NO: 16741 - DNA, 1152 bp, Zea mays
  Clone ID: MRT4577_115265C.1
gcgagcagtacatggatacatgatcttacccgtacacggtttgacaaattctttcatgagtacacggctaaaaagggtatggaatagcacggggcaatgggtaaatgcccatcgccatctctgatctcagcaggagaggtaatagcgtgccaatgtaacgcgcctgatcttattgttcattccaaacaacccacactaacagcaaccatctcaagaatgcatcactgttattacccagacgcaaacatcccaacccaacgtacgctgcgcaatgtgtgcggcgtacacgactcgccgcccgtcacccccaaccaattcgaaagccaaagcctcacgcccgcccacgaatacacagctcactcacaggccacatccacatcccatccgagcgcctcaaactcactcacttcgtgcccttggtggtgagtccgaagccgaacgggaagagcgggtcgtagtgcgcgtcgcccacgttcatgggcagctggtccaccgacttgaaccacgtccgcggcagcttccccgtgaacccgtagtcgccgaacagcacgtccgccacgccctgcccctccgaccctggcagccacgccgccaccagcgcgtccatgtcgcccaggtacggctccaccaccagcggcctgccggagatgaggaccaccacgcacttggcggccccgcacaccgactggatcacgctcggcccgggcgccgggatcgtcaggttcaggttgtcgccgaacgtctccgcgtatggcggctccccgaccaccacgatcgcgtagtcgtacttgtcggccagcacgccgctgtccgggctctccgagtacaccacctgcgtgctggggtccacggtggcctcgatcccggagaggatcgtcgtgccggcagtggtgttgccgctgcttccttgccacgtgatcgtccaccccccgcactggttgcccaggtcgttggcgtggctgccggcgaccaggatcttgccggccttcttcgggaggggcagcaacggagcgtaggaggacttgccgttcttcaggagaaccagggatttcctgacggcttcgcgcgccagttcccggtgttcttgcttcccgagctcgccggcgaggctagtgtcggggtaagggttctcgaacagacccatggtgaact

SEQ ID NO: 16742 - DNA, 648 bp, Zea mays
  Clone ID: MRT4577_115266C.1
cgggcaccttcgatacagacattggaggggcgacgaagctaacttcgtcatagcgacacatggagacgatgcaaagaggagtcatcctgaatgctgaaagcaaaggataatgttgcccatgtattatttgtaaatcctgtgtgtaatccttgtgggtgtaaatgtaatttcgtacgaagctgtacgattccccataaatagatgaacagtgcactgcataaagtaccttttgaagggtcggacaattgtgtatgtaatcttttctctaaagcacctttgctctaattcattctctagagctgaaggtacgattgtaaattcattatacgaaagacgaaatatgatattgatacatctgagacaaagttgttatgttaaaattctttaacattcttcacctatttatgcaattaagtcatgacttatccagttaagtttcaacctttcttcgaaggcgttgtttcgaagggatgattgtttaaggacgaaggttgtttatctttttaacattgtgttgccttgtttttgattgtacatagcaatcgggaacaagtgaccaacaagcatgatgctcgaaaaattccggtctgctcctgaaatcggctttaacttgtgctaaataacatgaatatcatttttgcattcacg

SEQ ID NO: 16743 - DNA, 255 bp, Zea mays
  Clone ID: MRT4577_115267C.1
cggacgcgtgggtccgaggacgccgggctccagctgaacgccgtcacagcgctgctcaacctctccatcctcaaggccaacaagaagcgcgtcatgcacgccgagggcgccgttctcaggctgacgtccgtcgatacctagcggcgccgtctcggccggagcctatccatcgtggagaagctggtgcatctagcccacagcggcccgacaagcagcaagagaggcgcgtttgccgcactgctgtcgctggccggc

SEQ ID NO: 16744 - DNA, 320 bp, Zea mays
  Clone ID: MRT4577_115268C.1
gatcagcaaacggcggtgcgtagagaggatcgtcgaacagaacagcatgaagatggtcatcgttctcgtcgtgtgcctggctctgtcagctgccagcgcctctgcaatgcagatgccctgcccctgcgcggggctgcaggtcttgtacggcgctggcgccggcctgacgacgatgatgggcgccggcagactgtacccctacgcggagtacctgacgcagtcgcagtgcagcccgatgtcagcagagccctactacgccgattgtggacagcctagcgccatgttagagcggttctggcgacaccactgccatgagcata

SEQ ID NO: 16745 - DNA, 398 bp, Zea mays
  Clone ID: MRT4577_115269C.1
acaacatattttattggataatggccacaaaggaccaaaacctgccttccaatacctacacctctgggacaaatttttaacccaagcctccttttttaaaaaaaccgggacaatttccgcaggacatattccaatacctttgtttaccggacacccctaccaatatgtttattccctcgctcactttcccgggaccaaatttgtaacgtaagccccagccttgttgtttacaaggtcaaccaagtggtcggcgaagtttttaacaggaccctttcccgtgacaatgggctgcaccaaaaaacccaacatggagaacattgcgaggcggccgctcttgatctccttgaccttgagctccgcgaacgcctcccggtcgtcggcgagccccaacgggtcga

SEQ ID NO: 16746 - DNA, 364 bp, Zea mays
  Clone ID: MRT4577_11526C.1
ggaccccaccaagaacgcctagggcgagcactccagcgcccgctacagcgagaaggagcagaacagcgccatcgaccgcgaggccgagaccaggcacgcagaggacgcggccagcgccagcccgccgctgaggcagaagctgagcgccgagcaggcggaccacgcccgagcagcggagacacggagcgggagcccaccgagaacaccaaaaacaccaggtacgaggaggagcaccgcgcggagcagccccaggaggcggaggccgcccgcgtggcggacgccgagggcaccgcccccgaggcgaaccggaacgcggacagccagacgaacccgcagaaccggaacccgcgcgaggagcccggca

SEQ ID NO: 16747 - DNA, 360 bp, Zea mays
  Clone ID: MRT4577_115270C.1
accgatctggaatttcaccgtgtcacacgtagatttccgaaactgaggagggcctctccgcgccgcgatccacagccatgttgtacatcctgggtatggtgatggaaggcgtcgacatggaggagggaaccctacacatgggaatggacgtcaggactgtatctggggtggtcgcgccactggttatcacggataatgtatagggcccgaagtaccaagaaatggagaacatccgactcgtatatggcaccactcctcgaggtcaaatgcttgaagttgatggagaaaaagctgctgtgcacgtttttgaaggaacttgtggaatatacaacctgtacccaaccgtgcacttgacaggcg

SEQ ID NO: 16748 - DNA, 755 bp, Zea mays
  unsure (1)..(755): unsure at all n locations
  Clone ID: MRT4577_115271C.1
aattcggcacgaggccacgccatacctgcgcgaacccctcccaatccgatcccctctcgtcttcgtttccttcccctcgccggactccgtctttcgccctagtatggaagagagctgaggctgttcggtgcccacgtcgggagttagggccggaggtgtggccgatcggcggggacggagtgagtgtaatgagcgggccacaggagcgtaacatgagggatctgtacaatcgcactcgccacaaagattttccggctctagaggaatcagccgaagggcgcagcggaggacgcccgtcgggatcggagcaacgggaactcgcctctaagatggaggacaaggctgtggtaaggaaaagattggtatcaagcaataacactcatgccaaagtagaatctggcacctgtaatgtctgttatgccccttgctcctcttgtttacacccacatattcgggttgtggattcgaatgttgaatgtgcatcctctcagacatgctccacaaggtcagaagtaaaaaacaattcactcgttcgtaatgagaaagggctttgtagtaaaggagaaaacgatgatgagtttagtgcaacctcaggtcatgtttccgactctgtggttgcaagagcatccattgcagacgattcatcagaggttaacatgccatcaaaacgcaggaggctgttaaatgaaaacacagactacctagagcagaataccttgaagnacagcactcatggtgtactggtatatcagcag

SEQ ID NO: 16749 - DNA, 533 bp, Zea mays
  Clone ID: MRT4577_115272C.1
ttttttttttttttttttttttttttttttttttttttttttttatttttgtttttttctttgttttgactttggaaggacgcgggggcccaccgggggaacccacccgcgcctcccggggggggaccaagagcccgaccaaataatggggagggggggtgcctgaaggaaggggaaaaccgctcccaaggccacaaacagacgaaaacagaagcccaaaaaaaaaaccacccggggccaaaagaggaaaaaaacggagaaaaaagggggggggctaacgaacaaattaacagaagggaaaacggccgggccaacagccgaaaaaaaagggacaaaacccggaaaaaagaagtaaaaaaaaaaccggcaaagggggggagaaatttcaccaccaaaacgggcaacaggtgaatgtttttaaccgccaggagctgagagaacagcagcaggcggcccaaagagggtggcccaaaaaggccaaaaaagggttccaagggggggaaaaacagcaaaaaaaaagaggggaagggggg

SEQ ID NO: 16750 - DNA, 727 bp, Zea mays
  Clone ID: MRT4577_115273C.1
tcgtgatttaggtgacactatagaaggccgagaagggcagcaaaggggagagaaaaaaaaaggaaatcgatggcggcggccggcggcgagaacagcggcgcgggcgagggcgagttctacctgcgctactacgtgggacacaagggcaagttcgggcacgagttcctcgagttcgagttccgccccgacggcaagctccgctacgccaacaactccaactacaagaacgacaccatgatccgcaaggaggtcttcgtctcgccctccgtcctccgcgaggccaggaggattatccaggagtccgatatcatgaaggaggacgacagcaactggcccgagcccgaccgcatcggccgccaggagctcgagatcgtcatgggcaacgagcacatttcattcaccacttccaagatcggctctctcgtcgatgtccagtccagcaaggacccggagggcctccggatcttctactaccttgtccaggatctgaagtgtttcgtgttctcgctcatcaaccttcacttcaagatcaagccaatccagtcttgagctccatcccaagccttcatgtagctggtttgtgagactgagagtgttttgagagagaacctttggtattgtggacgatgcgtgcgataggccctgtgtggtgcacttagtggaagtggaaccccctttgcatttggtttgtgcaaactgctgagtagagaacgtcatatttgtgccc

SEQ ID NO: 16751 - DNA, 1448 bp, Zea mays
  unsure (1)..(1448): unsure at all n locations
  Clone ID: MRT4577_115274C.1
tcgttcgagtcacgataggaggaagactggaagaggaggctagcacgttttcgaggcccacccggaccgtccactccagtacccccacgggatttgcaaattggtgcgtccacacgagagtttacggcggcccaaaccccccaaatccagttccatcccaatcgccgagaaggggaagccaaatcgatggcggcggcggcggccggcggcgagaacagcggcgcgggcgcgggcgcgggcgagggcgagttctacctgcggtactacgtggggcacaagggcaagttcgggcacgagttcctcgagttcgagttccgccccgacggcaagctccgctacgccaacaactccaactacaagaacgacaccatgatccgcaaggaggtcttcgtctccccctccgtcctccgcgaggccaggaggatcatccaggagtccgatatcatgaaggaggacgacagcaactggcctgagcccgaccgcatcggccgacaggagctcgagatcgtcatgggcaacgaacacatttcattcaccacttccaagatcggctccctcgtcgatgtccagtccagcaaggacccggagggactccggatcttctactacctcgtccaggatctgaagtgcttcgtgttttcactcatcaacctccacttcaagatcaagccaatccagtcttgagctccatctcaagccttcatgcgactgttttggagtgttttaagagagaaccttgtaccatgttaagatgatgttgagcttgtgacgatgcgcacggtagaagtggaaccttttttttttttgcggttggattgtgcaaactgcgagcagtagtgagtgtggtatatttgtgccttcagtttcctgttgggtggagtgttcttgtcgtttggcacggcacactagtattcttctctgttatcagcgctctgttgaaggatggaatggatgcccagattgtctgggacttgtggtgatgcagatccagccagtaactagtatgaatttctctagtggggttgttgggctgctaaaaaccgccggactgagcaaaggaaccttgcgtctttgtgtaaagcagcagtcgaatctgtgtgtgtgtgtttgtgattaaagtcgtcattcggtcctgacaaaggattatttttattgctataggatgtatctgaatgaatgcccaaattgtttgggacttgtggtgatgcagatccagccagtaactagtatgaatttctcaagtggggttgttgggctgctaaaaaccgccggattgagcaaaggaaccttgggtttttgtgtaaaccagtaaacgaatctgggcccgtctgtgtgtgtaattaaacccccccttgggtcccnaananaaaaaaaaaaaaaaattaagaaaaaaaaaaaaaaaaaaaaaaaaaaaaaaaaagggcggctgcacgggaatacggacggta

SEQ ID NO: 16752 - DNA, 954 bp, Zea mays
  Clone ID: MRT4577_115275C.1
cattgggtacctcgaggccggccgggggatatttgcagattactctacacgagtcacgataggaggaagactggaagaggaggcgagcacgtttgcggtgcccaccctcaccgtccactccagaaccccaaatccagttccgttccaatcgccgagaagggcagcaaaggggagaaaaaaaaaggaaatctatggcggcggccggcggcgagaacagcggcgctggcgagggcgagggcgagttctacctgcgctactacgtgggacacaagggcaagttcgggcacgagttcctcgagttcgagttccgccccgacggcaagctccgctacgccaacaactccaactacaagaacgacaccatgatccgcaaggaggtcttcgtctcgccctccgtcctccgcgaggccaggaggatcatccaggagtccgacatcatgaaggaggacgacagcaactggcccgagcccgaccgcatcggccgccaggagctcgagatcgtcatgggcaacgagcacatttcattcaccacttccaagatcggctccctcgtcgatgtccagtccagcaaggacccggagggcctccggatcttctactaccttgtccaggatctgaagtgtttcgtgttctcgctcatcaaccttcacttcaagatcaagccaatccagtcttgagctccatcccaagccttcatgtagctggtttgtgagactgcgagtgttttgagagagaaccttttaaccatgtaagatgatgttgatattgtggacgatgcgtgcgatcggccctgtgtggtgcacttagtggaagtggaacccccctttgcatttgttttgtgcaaactgctgagtagtagtgaacgtgatatttgtgcctttttaaaaaaaaaaaaaaaaactcagcttaaaaaaaaaaaaaaaaaaaaaaaaaaaaaaaaaaaaaaaaaaaaaa

SEQ ID NO: 16753 - DNA, 309 bp, Zea mays
  Clone ID: MRT4577_115276C.1
aaactgattattgattaaaacagaccacgaaaaaacacaaaaaaaacttggtgtaaccatgtaaaatacctataccttacaatcactaaactccctggttaaaactttgattaagtcttggaacttaaaacactacaaagaatatagggggcctctaacttccacggcttatctcgattgggttgcccagcataggataccctgatcatttggcccaaccgagtccaagctaacatattgaacaaaggtgccctggaatggaaggaacaaattggtatccacaggatgggcatgaaacgcgcttttggc

SEQ ID NO: 16754 - DNA, 796 bp, Zea mays
  unsure (1)..(796): unsure at all n locations
  Clone ID: MRT4577_115277C.1
ccggccgggatcatcaacaaacactcttctacactcacaacaactacaacaacgttttatataagactttgcaaagtcccttatctctttggacttcctcctcatatcatctccatcttctctcttacacacaaacacaatcacaatggctcaatcattcttgaaacgatgctttggcctcggcggcgtctctgctgctcccactacctgctctaccacnccctgagaaggccgctgtccgcgcccttcccgcttcatggtacacttcagttgagatgtacgagcttgagaagcgtgccatcttctccaagaagtggcttctcaccacacaccaggctcgtctccgcgacgctggcgactggctcaagtatgagatcgccaactttgagcttgtcatcgcaaaggacgaggacggaaacatcaatgccttccataacattacccgattcggtgccttccccatcgtcgctcccgagcagggtgatcacggtgatgccagcactggctttgaccagaagcagaatggtcttctccccatccatgtcaaggttgatgctcgtggcttcatctggatcaacatggacggcgccagggtccccgaggttgcttgggaggatgactttgacaacctcgacacccatgagcgcttctcatactacaactttgaggactacaacttcgaccacgtctgggaagatggagggtgactacnactggaagatccttgncgacaactaccacgagtgctaccactgcaaagtcgctcaccctgatatcccccacatcgccgacctca

SEQ ID NO: 16755 - DNA, 152 bp, Zea mays
  Clone ID: MRT4577_115278C.1
attcgacctcccgcttttttgtttttacagcgccactgctggcttctccaaccgcggtgcgggggacgcccaccacctccttgaagatcgggcacgccccccccacctgctacttgaaaaactataggccccgcgctaacacccccaatggg

SEQ ID NO: 16756 - DNA, 1081 bp, Zea mays
  unsure (1)..(1081): unsure at all n locations
  Clone ID: MRT4577_115279C.1
cgnaactggtggtttcccccgtggtccgntcggtttggttattcatgtttactttttggttcctatccatctgtagttatcagagtttccaatagcatgtctgttcaggtttgtttgttatatcatattcgagtatgagctaccgttaggttgattgctttttattcactgttgagattgtgttttttgtactgtgctttttgttttttgtatgtttgttatgagtctttttctgtttttttgtttttgttttttttttttttttttttttttctttttttttttttttttttatttttttttttgtttgtttttttttttttttttttttttttttttctttttttttttttttttcttcttttatttttttatatcttttttttttttttttttttcttattatattgttttttttttttttttttgttttttttngtgtttttttgttattttttcatattttttttgttttttttttgtttattatgttttttcttatttnttgtattttttntttcttttttattctatttttttttttgtttatntgtttttttnctgttttnnctttttgttttattttttattctttatttttgtttgtttttntgtttttttttatattattttattttattgtttttttttttcttttttttttgttttttttttttttattttttttttttttttttttttttttttttttttttttttttttttttttttcttttttttttttttatttatttttttttttttttgttttttttttgctttttttttttttttttcttttttgtttttttttttttttttttttttttttttggtttttattttcttttgtttattttggtttttttntctttttttgtttttttttttgttttttttttttttacttttttttttttctttttttttcttttttcttttatttttttttatttgtttttttcttttgtgtgtttttttttatttttttgtttcttttacttttactttttttttttttttttttttttttttttttttttttgtttttctttattccttttttttatttttttttttt

SEQ ID NO: 16757 - DNA, 418 bp, Zea mays
  Clone ID: MRT4577_11527C.1
aattcggcacgagggagagacgaggagaggaaatctcccgctgacttttcccgtgtccgtgtcgtgttgcctgcgtccgccgttggccagccacgaccacgacccgtcggcatctcctttcgtctcgtctactcacccgcgcgggagcgggtggttgctgcggcggttgacgttcagtagtagagagggacccggccggcagttaaagccgacgcgagagaaccgaggcgagaggggatatggggaaccaggtcgggggccgccgccgccggcgggcggtggtggacgagcgctacacgcgcccgcaggggctgtacccgtacccggacatcgacctcaggaagctccgtcgtctcatcctcgaggccaagctcgtgccctgccaccctgaggccgaagacacgcgcgctgacctcga

SEQ ID NO: 16758 - DNA, 266 bp, Zea mays
  unsure (1)..(266): unsure at all n locations
  Clone ID: MRT4577_115280C.1
gggttaaactcaagcccccatttccgaaggataaaatattgggaaaaagaaaccggaaaaattccattanaanttaaaaacnggaataacggggagaaggattttatttggaaggagccataaaaatgaggccttaaggggataattgaccggaaaaacaaagcgggcgggctaggggaatgggggggagggggacgagggggggggggggggggggggggggggacggggagagggggaggggagggagaagggggggggggggg

SEQ ID NO: 16759 - DNA, 278 bp, Zea mays
  Clone ID: MRT4577_115281C.1
aaaaaaaaaaaaaaaaaaaagatgaaaaaataaaaaaaaaaaaacgtataattcttaaaaaaaagaaaaaaaaaaaaaaaaaactaacatccgtaaccatgccaaggggggcttcttctttggggtcgggggccttcattttaatggccccggctttccaacccctttgttgggaaaaacaaaattttttcttggcctaatttatttgaatcgcagggcccgcttttccccgggggtaataggaaaaaggccgggtccaaccgcattgacttccggtg

SEQ ID NO: 16760 - DNA, 384 bp, Zea mays
  Clone ID: MRT4577_115282C.1
tttttgcttttgattttattttttatttttatcatgactttcaaactagacatatcccgcccgtgggccatccggctgtgcattcaacgtgagcctgatagcgactatagtgctgaactgtactgcttgccagcggaccctcacttggcctcacaaagctaaacagatgatgcaccaagccatgagctcctgattctcgatgtgttagcaaacataccaaactgacgggccgccccagtacaattaacctgatgccttcgcctaataaggagccagaaatcatagcgggcagcttattcagagtggagagctcatgaatacccaagccactgcaggacgccgatcgactatagtaactcgagaaccaaggctgacatacataac

SEQ ID NO: 16761 - DNA, 381 bp, Zea mays
  Clone ID: MRT4577_115283C.1
gggcggaccacaggcgtccggggccgccgccggttaatttgccgccgcattaatgctattaccttactaaaccgccccggcttaggcttaatcccaagcaacaccagggcccgggccaacagccgaatcaaagcccgggccagttgaagggaacctgcggggtgggcagaaccccgatcctgggccagggcgtcaggtttttggggcataagggcagccggacggggacgccttactgttggcttaagggccagtcgttgcggcagcagtgttgccagcagttaaggcaggtggggccgacaaaccggtcccaggcgatcttgggttgggtcctccagtccatcctgcagaagaagccgaaaaggggccaggttcgggggt

SEQ ID NO: 16762 - DNA, 291 bp, Zea mays
  Clone ID: MRT4577_115284C.1
gggggggggggaaaaccaccctctgcatatattttattaagctggataataaatgaaacaacccagcattatatcgatagaccgggggcaaattcgctacccttattggaacagtagctaggcttcattcgtcccataaaagggaaccgcggtgatgagatttcacccgttacgaaggggtcaacctttgccttgggtagtttcaaactcacaactgggtggctgccttggaggctcatttgttcaggctcaggcaggacccttgaaccattatgcagcttgggcacttaa

SEQ ID NO: 16763 - DNA, 361 bp, Zea mays
  Clone ID: MRT4577_115285C.1
catccaaaggggacaggttatagttttactaatttgaagttgcatgtgtttaaaaacaggaaaagggtaaaggaaaacattaagtgggaaggaaaggaaaaaacaaaaacactcaatattcagggggggggaaaaaaaaaaaatacaaatggggggataatcttgccaaaaaaattggaggtattggggaagaggaagttacagggctttcttagggggagggttttgatcaaaagcacccggaggaaaataacgattttggcgatcaggaggttcaggaactgggggcggggggcaaacaaaatcccgggaatattttgggggtggggaccccgaaacggggggggccccaaaaaggggg

SEQ ID NO: 16764 - DNA, 563 bp, Zea mays
  unsure (1)..(563): unsure at all n locations
  Clone ID: MRT4577_115286C.1
tcnctgctgctgtgcatgcatttaacggcggaggtgcctgactcgttgtcaccagaccagtgcaaggctctcagagacagttctgtcaacaaggtcttcatccaagctgacagacatggatatagatgaatgcgaggagacgactatgcatgatgtgaacagcatctgggaagagatgcgctggaagcacgctcactcttactatgaggcttgcgaggaggacgacaagatgccgggcggagcacaacagagtgcagtgctcgcaaaatttagcagactctcatcaacgctgtggggaggggaggtgccataaaagcatgggagtgatctctagattatctgtctccgagctgtagaagataagaagctgaatcgacctcgcaagcgcgngaatgtatccttgtttgctgcaacatgcacaatgctgcccacgcatagctggttacctttaaacttctggtagtgggatttactagagtgatgggtgcaatgtatagggggactcgaatgtctggaatgctacggnctaacgcacatangggtgcaatgcctgacgaattgct

SEQ ID NO: 16765 - DNA, 384 bp, Zea mays
  unsure (1)..(384): unsure at all n locations
  Clone ID: MRT4577_115287C.1
tacngcattcgagctcaggtaccctgaatttttaccatcgctatcaagaagatattcaactattcaaagaacttggtttaaattgtttccgaanctctattgcttggacacgaatttttcctaacggagatgaagaaacgcccaatgaagaaggccttcgtttttatgatgcactttttgacgagtgtttgaaaaatggcattgagccagtcgtgacactgtctcactttgaaatgccttatcatttagtcacaaaatatggcggctttcgcaatcgccaggtcattgatttttttgtcanatttgctgaagtctgtttcactcgttaccagaaaaaagtaaaatattggatgacctttaacggnattaancanccaagncgat

SEQ ID NO: 16766 - DNA, 478 bp, Zea mays
  Clone ID: MRT4577_115288C.1
gcaggctatacgtcatgaagcttttacacacatggatggccagaagcaatatgttcagattgatcagaatgacttgtttcccttccttcttgttaatgtcggatctggtgttagtataatcaaggttgatgggcatgggaaatttcagcgagtaagtgggacaaatgttggtggtggtacgtactggggattggggaggctaatgacgaagtgcaaaagttttgatgagttgctagagttgagccagcgtggagacaatagcaccatggacatgcttgtaggagacatatatggtggtctggactactccaagattggcctttcagcatctacaattgcctctagttttggaaagataatttcagaaaacaaggagctatcagattatagacctgaagatatatcgctctctctgttacggatgatttcatataatattggccaggtatgtcaaccttgtcaggacatggtatggtaa

SEQ ID NO: 16767 - DNA, 364 bp, Zea mays
  Clone ID: MRT4577_115289C.1
cttttattggaatttcctgccacacatgggtgggtgttgcaatatagtgtgctcatcatatggaacattcaataactaagttaggcaacagggtcggataatgtcagaatctttgctcaaccctgacacggctcgattatgtgcaccaaaaccacactgaatgtactgattcaacttagtatcgatgagatgataccaatctcatgtctgtaagaccaacttttttaacgagacggtatggctaagttcttaggagctgaactaacatatgtatggacctagaactagacgtgaacctatgatctgaaacttgccaaattccaggaagtgcaagtggtatacgatttgtaagtttcatcttttt

SEQ ID NO: 16768 - DNA, 483 bp, Zea mays
  Clone ID: MRT4577_11528C.1
cgggccgagcatggcagacaccgaccacacgctcaggagcatgaaggagcacctacctttccggaactataatgatagaattactgactcatggatcatgcacagcaaggctaccagctatcgtgcgacagatagcgaccacagatcaatccgcctatacgacactcaaagcgcactgtgtgggagaactatgaagagcagaaacattggcgcctaacgagccgtactcagtgagcgcctatacataggctgatactgggcgcaaattggattgaactggagcttgatactgacgtctcagtgacgtataagagactccgcaataggatgcattggcctcacagaggactgaccttggaagttccacggacgtgaaaagaaaccctacggagatgattaaccgcggcggacatggatcttcatagagcgacggcttcaagcttgggtgggctgggtgagagtacatcggaaaccacaatgctg

SEQ ID NO: 16769 - DNA, 1804 bp, Zea mays
  Clone ID: MRT4577_115290C.1
gccaccggtttccccaaatcgaggttgcctgccgtcactcacctcggctcagctccaccaagtgcccgtgaggtgccacgaccgcagcgaggagtgaccatggttgaggtgatgatggtacccagctcccacggctgcggcgagggtggtggtgtaggaagcgacgggaaggcggaggacgggcagcagcaggggcagggacaggggcaggtgctggcgctgctgctggccgcgctccgcaagtcggtggtgctaccgtgccagatggcggacgccgacgacccatcgggggcggcgtgggggatggagatcggctggcccacagacgtccgccacgtcgcgcacgtcaccttcgaccgcctccacggcttcctcggcctccccgtcgagttcgagctcgagatccccggccaggtccccagcgccagcgccagcgtgttcggggtatcaccggagtcgatgcagtgtggctacgatgacaaggggaactcggtgcccaagatccttctgctcatgcaagagaggctgtacgcgcaggatggactcaaggcagaggggatcttccggatcaccccggaaaacagccaggaggagcatgtcagggagcagctcaacagcggcatcgtgcctgacgacatcgatgtgcactgccttgctagtttgatcaaggcctggttcagagaactccctgaaggcgtgcttgacaggctttcacctgagcaagtccttcactgcaacacagaggagcaatgcattgagctcgtgaagcttcttccagcaacccaggctgcacttcttcattgggtcgttgagctcatggctgatgttgttgaggaagaggagtcgaataagatgaatgcaagaaatgttgccatggtttttgcaccaaatatgacacagatgtccgatccctcgacagcactgaagcatgcctgtcaagtggatgaccttgtcaaaaacttaattctcaaaacaacttcgggaacgcgaggatgatgatgcaggggcctattcttcattctcatcttcgttatcttcaccgggtgaacttgagaggaatgatgccatgaccaacagggatgtgaacatgatagtggcagtgagaaaaactataatggcagtgctaacggaagaccaagagatattgacaaggccactgcactgagagtagacagtgagcaactaattgggttgtccaggagggcaccatcaaccgatttccatctgccttacatattagacagtaacgacagtgaagaagacgcactggatgatattgaggaatgcttcttaagaaggctagaatggaaatcagtgagggaagaaggtgatgaaggcgacagtagaaactctcctccctcagagaaagaggcagaggcagagtggcttagctcctctgagaacgtaacggaagctagcaacgcaattggtgaagaaagaggcagaaccaatgccgccgctgatggaatcaatgagctgaggcaaacggaaaccagaattgaaatgacgagtgctgcaaaaggggagcttattctttgctcataagcaatcctggcaagggtgcaggtttcggtatggtcatcatccatgtaagggtatgtgaagttgtaagcctatcgttcctggcagtccttgtaaaattctttgcacgcttgactgcatgagctgcgaagttgattaattgtcttgtttagttgaagcagaaacaaccagtttctggctagttggacctcggtaatcagctggactcttgcaaccggaagcatgtcaaactatatttgctcgtaaattaaaaaaaaaaaaa

SEQ ID NO: 16770 - DNA, 375 bp, Zea mays
  unsure (1)..(375): unsure at all n locations
  Clone ID: MRT4577_115291C.1
ttctatcgcttcacaaccaaaggtggaggaaaaaaagcttacccaggctcctgaggtggaggccccaaagattgaataagcttcttaatctgaagatcgcatatttgccagccctcttgcccgtaaactgtctgaagataacagtgtcccactatcaagtgtgaaaggtactggtcctgatgggcgtatttttaaggcagncnttcaatattccttntccaagggtgnnnctnannttggctcnntgttctnnngcctttnngttccttnntgtttgagtgggggggtgcnnnattaattttttaannnttttaaatccttttttgggccgcangtttggttttgtcctttttttcttgtcttgagttaagtttt

SEQ ID NO: 16771 - DNA, 681 bp, Zea mays
  unsure (1)..(681): unsure at all n locations
  Clone ID: MRT4577_115292C.1
tccctttctctcttctcccagccgtctcttccgtggagttttcttccccagcgcgcagggnaacccccacgacgccattcatccctgctccccatccatggaggctcggctccagcttcctcggcactcccttcctgctcccagtcgttggtccaggcacaaggggcttccccctcggcagcaccatctggccgccattttttttccaagtgcaggtgcctaggacaagctgcgaacccctttgctcctactcgtccatggcgcctcccacggcacgggcgctcctctggtccagcgcgcgcgaggaatcccccatggccggcgcatgccgctgctgcgtttccccatgtgagctcgagcttcttcctcccagcagccatggcttcttcctgctcgcgccctcccccatgatcttcgcgtgcagggcactcctctggccttgggaccacctcgccacttcccctctctgcccgcagggctgcttgccggagcgcggcatggccggaccagccctagctcgagcagtgagctcgccggcgtccatggcgcgccgcctctgctctccctccacgacaccctctcttccagccgagctcccccaaccggcagtctttntctccagcgcctctctccactcgcccncccccctcgacgcacacaccagcgaggtgctcgacgtcg

SEQ ID NO: 16772 - DNA, 625 bp, Zea mays
  Clone ID: MRT4577_115293C.1
ctactcctgatagcaagggtttgaatggtgcggaactcattcatcttcagtttttaacttgtgtgtcatcactcatgtattctgtatataggttcctgccaagttgggctacaggaagaatacattgtttgctccaactatcgcacttggcaaaatctcattattactggcaacagctgcacctgggttggatactggagaaggttgcctgaagagactactgaagctaagctactgatgcgttatttggttcagttaatcagttgtatcctctgcccttgtaggctgttgtacctcacctgtgtcagcaacatttttgtgaatctaaaacagttagcacatcaacaatgctgacagactagaaccgggctttgccggtctggatgtactgcttacgtgcattgatgctagtgtggacagcaaatctctgcactgcatcatcagactgtgttcttgaatgaaaactctggagagctgggacgcaaagacatctgtccgagccaactgcagaagatggaagacggttcagactggaaaatagcagcatgtcatcttagagattttgtgatattggcaggatgcatccaggctgggtaaatgtcatgggattcaaagagaactaact

SEQ ID NO: 16773 - DNA, 387 bp, Zea mays
  Clone ID: MRT4577_115294C.1
aatatataagggcgcaaattcacataattccaaatacataagttcacaaattcacacaagttcacatccatagttcacaagttcaaatacacaagttcaactctcgatcaggacatcagattgttgttcgtagctctaccactagaattgagacatctgtccgcaaagtcaacgtgaggggaaggagtcacttgatgggagccggaatcctctcctctcggcatcggataatcagaaatcttgtaaccaccttcttcccatgaaacaagcttcacatagcagcaagtggtgtcatcccattcagtgaaagctgctccagcacaagtttcggtcaaatcatagccttgacccactgtgacactgcagcaacacaacaatcaagtttca

SEQ ID NO: 16774 - DNA, 299 bp, Zea mays
  Clone ID: MRT4577_115295C.1
ccggccgggactccaccgtgccgtcgcctcgcctattcgatctggcacctcctctcgtctcggacgtttctttccaactccgcagcggagactctccgcggtgcgatccagattcagggttttcagcatgggcctggtgaacgaaggcatcaacatggaggagggaacccttggagatctgatggagtacaggactgtttcctggtgttgctgggcctctggtcatattggaatatagtaaggggcccaagtacccagaaattgtaaacatccgacttggagatggcaccaatcgccgt

SEQ ID NO: 16775 - DNA, 330 bp, Zea mays
  Clone ID: MRT4577_115296C.1
attcggctcgagtgagaatctgcagaagtccttccataagtatttagaaatcagaggaatcaagcctaggacaaccaatttcttgcatgagtacatgatcaacaaggacagtaaagagtacttggtatggttgaacaagctcaagagcttcgtgcaagcatgagccttcacgtctcttttatgtgcttactgtcgtcatttgaagaaaagcatgaatgttgctgagtttttgtttaatcacatgctgtacattcgaaggaaaagataccaaggagattttactggtttagctgtagctcctattggttatggaaggtagattatgcctga

SEQ ID NO: 16776 - DNA, 1202 bp, Zea mays
  Clone ID: MRT4577_115297C.1
gggaccctcaccactacgcacggacgacatcgagtaaccctagacggcagcacattgcaccggcgacggcgcgccaccggtgactggcgtcccctcctcggttgacataccccagcatgagaacaccctgctgcagcagaaacgatcaaccgatcggaaatcattaatttgtacacggttcgatttgaaagcgcacccggcacctgctccgttcctgcgctgcttggctaccggtctgtgtcaaagcgtgcatctcacgcgaggcgcacaaggacgaaccctatacagctccaggaggccggcgccctagccacctaggccaccttcctggagaccggtcggcgacgacgggaacgactgcgatgggcttcgagcgtgtggagctgcggtgtcccagggagctggacccacggccgagctggacgctcggcgatgtgctcgctgagcttgacgcgctggatgccacccggcgcgctgcgccacccacgcccctgaagcagacgccggattgggctaacggtggtggtgagaaggcctttgtgatgcgggttgacgacgacgacgaagacgacacagaagatgaagacgatggtacaagtggtgggaagtcccgggctctggtggccaaaggagcaaggttctcgtgtaatgatcttgcatcaagtgattcagaggatgaattagatggtcaggttgccccataccacttaatggaaaaaagggacctagcgaagagcattcttcttgagctggaacgcgagcatcatctaaaagttcaagaagaagttagaagtaagctagcttcattggaggtatgccaccaaaatgaaattcggagaacgatctctgcatttgtccgacttcagaaatatgcagaatcaagaaaggagatagacagaagacttgatgtacacttccagagaagaattgcagaagtactcgataaacacttatctatggtccaaagggaccatgaacaaaaatcccagattgttgaacgccgaataagagatgatgcagctcttgaagaagctaaaagaaaagagcaagctgtcaaggaagaaaagttaaggcgggaaagagcccagcaagaagcagaggctagacagaaggaagctgcaaaattagcagctgaagcacgaaaaacagcatttgaggctgctaaaaaggaagcagcagaaaaggaagcagcagaaaaggag

SEQ ID NO: 16777 - DNA, 702 bp, Zea mays
  unsure (1)..(702): unsure at all n locations
  Clone ID: MRT4577_115298C.1
ccacgcgtccgcattgttccggcgacggcgcgccaccggtgactggcgtcccctcctcggttctcactccccagcatggcgacgccctgctgcagcaggtgaccacttctccccaatccccgacttcctgttgctgttcaccggcgagtggcctgctgccctgtttctgttaagctcatgtcctgtgttcatgtgctgggtgtgctctcatggaatctgtgctcagtcatgtcgctccgattaatcggcctgttcattcgattaatcgttctgatcgacttgttgcttctatggtgatcagaaacgatcaaccgatcggaaaacattaatttgtattcgatttgaaagcgcacccggcacctgctccgttcctgcgctgcttggcttccggtctgtgtcaaagcgtgcatctcacgcgaggcgcacaaggacgaaccctatacagctccaggaggccggtgccctagccacctaggccaccttcctggagaccgggcggcgacgacggngacgaccgcgatgggcttcgagcgtgtggagctgcggtgtcccagggagctggacccacngccgagctggacgctcggcgatgtgctcgctgagcttgacgctctggatgccacctgccgcgctgngccacccacgcccctgaagcagccgccggattggtaatctctaccttgcgtctggctctagtatttg

SEQ ID NO: 16778 - DNA, 644 bp, Zea mays
  Clone ID: MRT4577_115299C.1
ctggccttgtgcatgtaaatagttccttctaattatgcattacaaaagtggtttgttcattcatgagattggtaccatttattaactgaaagatgggttataaaagcaatcagatgaattatgttgtataccacaactttgtagtactttattgacaaattttttattctcttcagtattatgttaccatattgttttgttgtagtgcagaagtactcgataaacacttatctatggtccaaagggaccatgaacaaaaatcccagattgttgaacgccgaataagagatgatgcagctcttgaagaagctaaaagaaaagagcaagctgtcaaggaagaaaagttaaggcgggaaagagcccagcaagaagcagaggctagacagaaggaagctgcaaaattagcagctgaagcacgaaaaacagcatttgaggctgctaaaaaggaagcagcagaaaaggaagcagcagaaaaggaggctgctaaattgagagatgcagcagcttctcaacctagtccgaattcccagaataatactgcagaaggcatcaaagtttttggcgataaatacgcactagaagcagagtcacgaaggcatgcattagtacagaatcaagtgccagaaaaaattcatcacaacaag

SEQ ID NO: 16779 - DNA, 1112 bp, Zea mays
  unsure (1)..(1112): unsure at all n locations
  Clone ID: MRT4577_11529C.1
cattgggtacctcgaggccggccgggagcatcggctctcgcgatcagcaagcacagctccaagcaggctgccagcaatgctgtcccacgcgccgtctcaaatccccgccgcctccaaaccgcgcctctcctctcgcaggcgcagctcccgcctaggcgccaaacacctcacggccaccgccgctgcggcctcaacactccgcagcgtatccgcctcccgccgcggcttcgtcctcttcgttccctcgctcgccgccgcatccgccgtcctccgcccgctcccgtccgccgccaccgaggccgatgacaccgaaagcccggctccacatccaccgcccaccgaagaatccctctccccgcagcccgccgcggatgcggcggagacgaagcctgaggccagcgagtcggccatgtcgagggtgtacgacgcgacggtcctcggggagccagaggcgttggcaggggacgcgcgggggcgggtgtgggagaagctggcggctgcgagggtggtgtacctcggcgaggccgagctcgaacccgaccccgacgaccgtgtggtcgagctcgagatcgtcagggggctcgcgggccgctgcgccgacgctgggaggggcctggcgctcgcgctggaggcgttcccctgcgacctacagcagcagctcgaccagttcatggacggcaggattgatggtggaatcttaaagttatacacatcgcactggtcgcaggagctatggcaggagtatgaacctcttctgtgttactgccgtgatactggaattaagcttattgcttgtggaacaccactggaggtgaaaagaactgtccaagtggatgggattagagctctcaaaaaagcagaaagagaagcatatgcccctccagcaggctcaggattcatctctagtttcatgtttggctcaggaaggtcattgatagacaagatctcatcaattgatgactctctgtttggctctacctcatatctatcagaaacaggcagagtagttgatgattatacccatttcccagntattacgagagaacttagtgatggagatggttcacggttgctaattgctgtgacgggtgcaagccatgttatgtacgggc

SEQ ID NO: 16780 - DNA, 363 bp, Zea mays
  Clone ID: MRT4577_1152C.1
ttctggtatcaggaaaggagatcaccacttgactgaggaaggcacccttccttgccactccttttacttgagatgaccatgaccacgatggaatgaagcagcagcaggctcctcctcctcctttctatcatgtatctcggtgatgagacagcagccggtgttgctgccgatccacatccacagcaggtgcaggtgctgcatctgcagcaagcacagatgaggattaacagggccaccagataccttgtttctgagacggcgtcgtaactagactggccgttcacctgctccgtgcgctggggttacaactgggagaaccagatgtgcaacaagatgtacaacatgtgctgcaacaagtgcatc

SEQ ID NO: 16781 - DNA, 530 bp, Zea mays
  Clone ID: MRT4577_115300C.1
ttcggggtgaactaccctcgccccgttgctcatctaatctttacttattagcaatggctccctctgtcgttaccttgaagaagaagtcggtcgtcaaggccactccccaaaagttcttcattgactactctggtcccgccaacgacaagatcttcgatgctgccgcttacgagaagttcctcgtagaccacatcaaggtcgagggaaagactggtcaactcggtgaggatgtcaagctctcccgtgaaggtgccggcaaactttcggttactcttccgttcccttctcgaagcgttacctcaagtacctcaccaagaagttcttgaagaagaaccaaatgcgtgaatggctccgtgtcgtcgctacctccaaggacacctacaccctcaagttcttcaaccttcaattcgacggtgccaacgacgaggatgccgagtaaactattcgttccaactgactgatagtctcgctcgatatggggggcttggtgacgatagtctttcgagatttgtcgtttttgagttttcccg

SEQ ID NO: 16782 - DNA, 1944 bp, Zea mays
  Clone ID: MRT4577_115301C.1
atggcgcattctacttcgtctaggttttggcctcgatcatcccggcgccaacgcgaggcgacggcgtctgtgcgctcgccctccgtaaggggtgcacagaccgacgacctccgggcggagctcaatcgtaggagtacgggagaaggcgcccgggtctctttgaaaagggcgcgtgagcgccgtcagaacattgagggtcgcaatctcgaccgagatttcgccgcgaaggcaccgtatacaccagtgggcgcctggtcccaaacgggtgtccccttggcctgcgtgggctgcgccgccctcgcagaccatcttcgcgcggcatcatggccgcccaagttctggccacacctgctggaaaaatacgacggaacatcaaacccatcaaagttcctgcaggtgtacgttaccgccatcacggcagcaggtggaaacaccactgtgatggcaacatactttcatgtggccttgtttggacctgcccggacctggctcatgaacctcaccccgagattagtctattcctgggaagaactctgtgcgtggttcgtgccgaacttcgccagtgcttaccaacagcacggtgtggaggcccacctccatgcagtaaggatatctttaccagaggctcctactccagtgaagacaactagacggacctcggggggaccccgttttccccggtctacgaagctgaagcacgccttcctccggaggcccttccggacctcccacgggtctaagcttcagacaggtacatgcagaagtgatcacagccagagacaagggttcccgtgtcaagtgcggataggaaccctgggtcggcgcttagccccgcgacaagtgccacaccaagaggtgctccgcaactctcccccagctgggaaggaccctccaagtctttcagataataactttcagctaacccacccgtacgggttccatctgtctgacatggcgacatccgaattgaacagccaggcttgcagttcagggcccctgacacgaaagtggggagattcagatcccggcgaggttgcctcccaaggattgttgacaacctttttcagaaacgctggtatccaacctcaacacatcaagcctgcatcccaagcggggggccagcaaataccattacattccctcacaagcgggaccctagctccatttccgcaggaatggactacctccacaccagaagggccgcggaatgacaaaccccgagcggctcaccagcagaggcaaccgcatcagcaccgacggcgacggccgcctctgcaccgacgactcgccagcagcgacaatcatcccagcatgtgcaccgctgcaggaaggacctcgcccccgtctccatacggggggcgacaacaagccattaaagccaaagagccggaggtccggcaacaggtggcactgacggtctcgccggcggaggcaaccacctctgcagaggggagcctcaccaacggcggcgaccacctcagcatcgatgatagcggccacctatgcaccagtgctgtaccagcgaatggcggccgcaccagcgcacacgaagaggtcttcgctcccgtcctcactatgggagtgaggacaagaccatccaagaacgccgcccccacccgcacggcgtacgacgtcttgtacgacctcctagtacggctggtgccgcaggagaagccgtgggtgtggccaacccgcgtacggcgcgaccgtcgcccatgcggtggacggacagccacgctccgccccagtggtaggaggcggcgccggaggcggccccagagccgcccaagccggggagccaggcacgcggcagctgacagcaccacagacggcgaacgcccttctcccccgaacactgagggaagaagcgggtcgctgcccacgcggaggcaggtcctaactcggcgcaccctcctccccagcacggatgatgaacatccttga

SEQ ID NO: 16783 - DNA, 601 bp, Zea mays
  Clone ID: MRT4577_115302C.1
gccggccgggctgcggtgtgcttcctgctccccgttgctcatcgaaccccccatacatcagcaatggctccctctgtcgtttccctcaagaagaagtcggtcgtcaagactgcgccccaaaagttcttcatcgactactcgggacccgccaacgacaagatcttcgatgccgccgcctacgagaagttcctcgtagaccacatcaaggtcgagggaaagactggtcagctcggcgaggacgtcaagctctcccgtgaaggtgccggcaaactctcggtcacctcgtcggtccccttctcgaagcgctacctcaagtacctcaccaagaagttcctcaagaagaaccaaatgcgtgagtggctccgcgtcgtcgctacctccaaggacacctacaccctcaagttcttcaaccttcaattcgacggtgccaacgacgaggatgccgagtaaactattcacattccgtgattagcccgcctctgctcgaacgtgtggggagactcgaaaaagggttccgagcggttgttgtatcatttgttacgacaaacggaattccaatcttcgggtttttcttttaaaaaaaaaaaaaaaaaggccccta

SEQ ID NO: 16784 - DNA, 493 bp, Zea mays
  Clone ID: MRT4577_115303C.1
gggtacccgcggccctctctcgagttttttttttttttttttttttttttttcaggaaaaggtgaaccaccccaccagatttataatctgggagatcgaagaccgatctactaactaccttgagttccattcctacatgtttattcacgacaaaaataagaccttacatacacatatacgcagaaaatggacggacgggaccatatacacttcttaaacacaaacacggagaaaaacagaagctgcatcaccttggcggggcgggtcggttacacaaaagcaaaacggatgaggagcctgagcgccttgcacatgacacccttgctattgttcagggccacagcacgggagccctgcatcacctgccataccgaaaagaaatgactgtcccagggcgccctgcttctcagacatggagcagtcctggacccgtaccctcacaagagtcggtggaggaacctccctaaagaaccagaactcctgatcccacatt

SEQ ID NO: 16785 - DNA, 186 bp, Zea mays
  unsure (1)..(186): unsure at all n locations
  Clone ID: MRT4577_115304C.1
gggttgaccttgancatgaccagtcggcgctcggagctcgcttgagtatagacattggcatcactcagccttggagagttgcagctgttacaagagcaaaacgtgtagctgaggaatgcaatgaccatattggcaaaaaagggtggatactccatcacatttgatgattccacacaacatacgagc

SEQ ID NO: 16786 - DNA, 228 bp, Zea mays
  Clone ID: MRT4577_115305C.1
ggccgtagtgtgctggattttcccttacggggcggggcggggcttttctctctgttcgtgtcgtgggggtgtcgcctggcgctgggctgccggtcggccgggtctctttctgcgccctggtgtgctcttttgtctgctccgtgttgttttgtttcgttgcccccctgtggtgtggcggggcccgtttttttttcctccgcgccccccccccgccgtgcgccgggggtg

SEQ ID NO: 16787 - DNA, 216 bp, Zea mays
  unsure (1)..(216): unsure at all n locations
  Clone ID: MRT4577_115306C.1
gggttccgggccccccnctggatttttttttttttttttngnanacnanagggaaagaaggngagagacnatgcacgagacttgcaaacnaacaagactcatacaagcgcgtncgagccccagccttngcatatcatacacatgctcaggccttaccatgtttggctttcgagcaaactttctccagatcccaaataatataatatccgatcaaat

SEQ ID NO: 16788 - DNA, 1617 bp, Zea mays
  Clone ID: MRT4577_115307C.1
gccggccggttctgggtacccggcttccctcgtcaccggctccggctccggcaccggctcaatacaatcccatcaccaatcattcattccctttgcctactactgctaccttctcctccttccatcttcgatagacgacgaaataatggcggtattcgacgtctgaatcctcgtactcttatactgcatacatacagacagacccttcttcttccttagttccctatagctctagctaggcgaccgatcatgagcatctcggtgaacgggcagtcggtggtgccgccggggttccgtttccacccgacggaggaggagctgctgacctactacctgaagaagaaggtggcgtcggagcgcatcgacctggacgtcatccgcgacgtcgacctgaacaagctggagccatgggacatccaagagaagtgccgcatcggttcgggcccccagaacgactggtacttcttcagccacaaggacaagaagtacccgacggggacgcgcaccaaccgcgccaccgccgccgggttctggaaggccaccggccgcgacaaggccatctacgcctcgccgggcgcccgccgcatcggcatgcgcaagacgctcgtcttctacaagggccgcgccccgcacgggcagaagtccgactggatcatgcacgagtaccgcctcgaggcgcccgtcgacgccggcgccggcgccgcgcaccacctgctgctccccgccgccgaacatcctccctactacacctcgccgccgcaggcgccttcttctactactaccgcagaaaggaaattaaaggagggggccccggctgggctggggacggacgaggccaagcaggttgcttggacgatccgtggcgcggcgggagaccaagcggcgcaggagcaggaggggtgggtgatctgcagggtgttcaagaagaagaacctcgtgcaccacggccagagcagcggcgtgaagcagcaggcagaaggagacgaccacgcggcgtcccatacggcggcggcggcagcgcacatggacgagagcagcccgagccagtgctcgtcggtgaccgtcatcagcgaccacgtgcacgccaacgttaacgacaagcagcagcaggcgcaggcgtcgttgctgatgatgcacacgcaccactccgccagcagcgacgacgacgcgctggaccacatcctgcagcagtacatgggcggcggcaggcaggcgcccgcggcggacgccaagccggcgctgctggagctggaccatcgtctgcaccaccaccaccttgccgcagcgcctactaatactagggccgccgccggcttctacgggaagttcatgaagctcccgcccctcgagcacgccggcctgccgccaagcccaccaccaggagcgcgcgagtacggcgccgccgccgccgccggctgggacgacgacgacgacgcgctggaccgcctcgccgcctacgaccacctcaacggcctctccaacgacgcgtccaagaacatggccgcgttcttcgacgtcgagcctagcgccgccgccgccgccgtggacggcgacctgtggagcctcgcacggtccgtgtcggcgctgcacgcggacttgaccatgaacaacgtctag

SEQ ID NO: 16789 - DNA, 1895 bp, Zea mays
  Clone ID: MRT4577_115308C.1
cccacgcgtccgcccacgcgtccgcccacgcgtccgcccacgcgtccgcccacgcgtccgcccacgcgtccgcccacgcgtccgcggacgcgtgggatcgtcttcctcccctcacatcctctggcctctggtcctccaccgtcctgctagccagagctgctcttgtacgcgcagctggcctctgtgcatatcaccagcacaccgcgcaggggaaggaaattaacaagagaaaaggcaaggagagcaggcaggcaaggaagctgcagaagccaaggaaggagaaggaggatcatcaatgagcatctcggtgaacgggcagtcgtgcgtgccgccggggttccgcttccaccccacggaggaggagctgctcaactactacctccgcaagaaggtggcctcccaggagatcgacctcgacgtcatccgcgacgtcgacctcaacaagctcgagccatgggacatccaagagaaatgcaagatcgggtcgggtccccagaacgactggtacttcttcagccacaaggacaagaagtacccgacggggacgcgcaccaaccgcgccacggccgccgggttctggaaggccaccggccgcgacaaggccatctacaacgccgtcaagcgcatcggcatgcgcaagacgctcgtcttctacaagggccgcgcgccgcacggccagaagtccgactggatcatgcacgagtaccgcctcgacgaccccgctgctgctgctgctgctggatccggtgatgccgtggccaacgacgacgcagccgccacggctgctgctgctgccgccgcgtcgtcggacggcgggcaggaggacggctgggtggtgtgcagggtgttcaagaagaagcaccaccacaaggagtcaggtgggggcgggggcaacaagcacggcagcagtaacagcgagcatgggcacggcggcgccggcaaggcatcggctgcggctgcggctgcggcgcaccagcaccagcaccatggaggcctgcagtactcctccagcgacgaggcgctggaccagatcctgcagtacatgggcaggtcgtgcaagcaggagcacgagctggtgtcgccggcgccggcgccgccgggacgggcggcggcgtccaggtacctccggcccatcgagaccgttctgggcgggcacgcgttcatgaagcttcccgcgctcgagagcccgtcccagcgccaagcccaccaccaggagcgcgcgagtacgccgccgccggctgggacgacgacgacgcgctggaccgcctcgccgcctacgaccacctcaacggcctctccaacgacgacgcgtccaagaacatggccgcgttcttcgacgtcgagcccagcgccgccgccgccgccgtggacggcgacctgtggagcctcgcacggtccgtgtcggcgctgcacgcggacttgaccatgaacaacgtctagctcccgagtcccgaccaacaacaacagggccccgaatccccgatacacatccatggcgtgtgcacgcatgcatgcatgcattgcatgccgcgcgcaccactaaccactcgaccagcatgcatgcatacgtgcgcaccccaccggcgcccgcggccgctagtgcgtcgtgctcccgtagtgcgtgcatgcatggccgccgcacgtacgtattgcacgctcgctcgcgcgtacgtacgtacgtgcgcgaataagctagctagccctaggatcggaaacatatgtatgcatccattgcatggccggatatacatcaggagctgctgccgctggtgtatgtccgccgccgtccaaactccaaagtgagctgagaatctgagatcgatcgatcgagctcgctcgctccaggtgtgtgcagtacgtacgcctgtgtatgtgtaagcagacagcgtggtagt

SEQ ID NO: 16790 - DNA, 267 bp, Zea mays
  Clone ID: MRT4577_115309C.1
ctgctcatacaacctctgtggttaactgatgcatgtcaggatgatgctactaagctatgcagctctttagtgaggatccttattatcggccggtcttctaatcattagatttcgaaggagattaggcagctttccactcaagaaaaatgatttgctgaacacatttttatttagcgagattgtatatttatatgcccaaggaagtgctataaaaaacacgctctattctcggattaccgaactatctcaaaggtgaggcaactgagc

SEQ ID NO: 16791 - DNA, 613 bp, Zea mays
  Clone ID: MRT4577_11530C.1
gagctccattatatacagaggcaagtgggagccgtttgttcagcagcgctacttgtgctcccccaacgctactaccgccgctagctggttcaagtgcggcgagcggagccggagaccggtagaggaaattaagaggcgtcgatcgggcatggggtgcgacgacaagtgcgggtgcgccgtgccgtgccccggcggcaaagactgcaggtgcacgtcggggagcggcgggcagcgggagcacacgacttgcggctgcggggagcactgcgagtgcagcccgtgcacgtgtggccgggccacgatgccgtccggccgcgagaacaggagggctaactgctcctgcggggcgtcctgcaactgcgcatcctgcgcctcggcctgatccgtgcgcctcgccctcgtgctaccgcgctgcctagtggagggagttgtctactgtccagtgaggatctggacgaagcaactagcgctacttctagtagagtacgcgcatgaggataataaaggggcttgtgtcatgctcgccagacgcatcacgcgctgcatctgcatcgtggtatcgtgtagtaagtttgtgtatgaataaacactaccactttatgtcccgcaaaaa

SEQ ID NO: 16792 - DNA, 540 bp, Zea mays
  Clone ID: MRT4577_115310C.1
gtagaaaaaagcgagcgagaagatccaattatttaacacaacggggtcacagaaattaataggtccattaatgctcattgcggcggacgcatagagccagcaagcgcggtactctgacttattgatactggtccggggtggggcaacatcggaggtccatatgctcacagacgacaaatctgcataacactaacctggttgggatgttggacacagtaaccaatccacaaccacaaagttgctacggatagatataaacagcggactagcaaatcgaccccataagcccgtcttactcataaagcactcccgtcttttcctccatggcattcggttgcttctcccagcagataatataagacagcttggatgactgatttataggaggaggagcactttccaggttttccccggcaaagcagcggaaaacagatttgggcgaggaagtaaaagtggtatgagtacaacataagctttggctcacgaggagcctgcttctaggcggcttctgttccaccaggatggggcacggatagacct

SEQ ID NO: 16793 - DNA, 450 bp, Zea mays
  Clone ID: MRT4577_115311C.1
cttaaataaaacagtcctattaaaagcttggaccggccaccagtacggacataactaacttgctgtagggataggagagggagcccggctagaatcttgcccgtagagagagttagccaccttgtcgcgcccttccataaaatttaactggaaacgaggcggcacatggagcacaagaggggaaacgtttcctcggaataagacaagcggcacatggtgagagagctagccattgtttgggtcggggggacaccaacacgatcgacatgtgacgcttaccggaaaaccgccgggcaagctattgttattctgaggaagtgaggaggttaagtttagcttgtttaaccccttagagctactagacccctactaccgaagaaagcttacgttttcacaagaccaccacccttcgtgcgagtggagctaactagcccattttgatatgggaga

SEQ ID NO: 16794 - DNA, 334 bp, Zea mays
  Clone ID: MRT4577_115312C.1
acgcaggaacagagcgaggcgacgccgccgaacttattcttcgtcgatagtgattattaacgcgaagggaattggcgaccgttcaaggggatctgatctggcaagtcgtgaggaagaacaacttcttccttgtgaagcacatcggcaactgcactgccgaggtgcagttcaacaaggagccgaacaacctctacaacatccactgctctaaacacttgggtgtggcgaacaagaatactgtgacgattcaaccagctgcaaatgactcggctaggagcctatctactactacaaccaagaagctcaacgcacctgctaagctcagccacaagtc

SEQ ID NO: 16795 - DNA, 288 bp, Zea mays
  Clone ID: MRT4577_115313C.1
gattccgggtcgagcacgcgtacggtccgcctccccggccttccgcgaccgctggctgctctagtacggctcgctcggcctggtcggcgccgatgacgacctggacgacgacctctacagcttcctccccgtcgacttcttctcggctccggccccgctctacgagagcgagcgggaggacgcctcgggcaggagggcggaccgagggcttgaggtggccgcgtggggcatcgacaggtggaggagggcgcacagtggtccgacggagaccccgaggttctcggagaa

SEQ ID NO: 16796 - DNA, 1276 bp, Zea mays
  Clone ID: MRT4577_115314C.1
attgggtacctcgaggccggccgggagtgaattcgttccgtgggcgaagtaactgccgcatctcaagtctcaaccctcgcctccaatcgcaccgctcccgaggagagccaggaggaggtgacggcggcgccgcgaggaaggagggatcgatcgaggatggtggacgtctcgcgcgtgcagaaggagctcaccgagtgcaaccgcgaccgggaggtatcgggcgtctccatcgcgctccacgacggcgccaacatctcccacctcaccggcaccatcgccgggcccgccgacagcccctacgagggcggcacgttcgtcatcgatatccgcctgcccggtggatatccctttgagcctccgaagatgcagttcatcaccaaagtatggcaccctaacatcagcagccaaaatggagcaatttgcttggacattctgaaagatcagtggagcccagcccttaccttgaagactgcgctcctttcccttcaagctctgctttcttctcctgcacctgatgatcctcaggatgctgttgttgcacaacagtacctgcgtgactatccaacatttgccgctacggctcgctactggacagaggccttcgcgaagagtgcatcaacgggcatggaagagaaggtgcagaagctggttgagatgggcttcccagaggatcaggtgagaagtgccctgaagagcgtggatggcgacgagaacatggctctcgaaaagctctgctctggctctgggtgaaccattctcttggggccaatacatgagcagctgtacatttcacagtgcctgctaatgctcctgctcagccatttcatataggggccgtgccatggcccatgggactggagtgagactctcctaggacaacattcgtttctttaaactattttgctgttgtgtctggtaggctgaatcgactctttgcccatggaaccctggtaatatctgatgcaaaggaaacatgagcataggaaaaatgaggttgacataaaaaaaaaaaaaaaaaatgcgagtcatcagacgaaaaaccggtggtaactgcaatctcatgtcgttgcgctacaaagggcgacggcaggtgtaggtgcagcagcgtcatcttctggtgcttgtgttgggtcaaacacgttgaaacaaagcagcctccggcggttggcaaagctggagaggggagacgttgactgttagttgaagggcaagggcgtactacatgctcgtcgggtagtaccatttcatacccgtatttataaaaaaatttacctgt

SEQ ID NO: 16797 - DNA, 592 bp, Zea mays
  Clone ID: MRT4577_115315C.1
gacctcgagaacaggtacaatgcgggattttggcgtgtatggggaccgaattctaaaaattgcttacgtttttatcaatttataagagaatcaacgctagcggaattagatattgtcgctgattccccgaactatgatggtaaactgcttccgatccaaacaaaatttgaattaacaagagaaatttatacatccccagtatccgaatattattatggggctattaataactatgatcaaaatggtatccaaactgaacggcagataaggcaaccacatgttatggacttctttaacaccatggccatgtttacatcatataatagacgggaatattattggtcaggacttgaaatgacggcttatttcacaggatttgcaggacctcaagtgacattccctttagctgggactagaggggatgcagctccaccatttaatgttagaagtgttaatgatggaatgtatagaatattatcggcaccattttattcagcacctttcttaggtacctttgatgagtgctatccaacatatttggatcaaaaaattgatgaaataaaattaaaagcctttacccgttatcaaatta

SEQ ID NO: 16798 - DNA, 396 bp, Zea mays
  unsure (1)..(396): unsure at all n locations
  Clone ID: MRT4577_115316C.1
agcaggcacgcctgcaggagccgggccggagtatattgcttggtcgacgatgctacntgtcggcggccggccttagttgggggcgcctttatttaaacatgggcttttgactatgctgcgagctcttactgaagacaactaactcaggccgttgcaccggctccaccaacactaacagcttgcgggtctatataacaaacgcggggaactccaacggccgggggcgcaccccgtgggagatgtctggcatcacctacttagacaagcgtatgcggcgcaagatggccaggccagtcctattgccctagtacctggacgcgctgcagctcggactgttgccaccaaaccggtggtaataggccacggggctcgccgcgagggggtcacacttgcctg

SEQ ID NO: 16799 - DNA, 348 bp, Zea mays
  Clone ID: MRT4577_115317C.1
caccaccgaccccttatgaattatcaccatggcgaacatgccctaagccggatgatcgacttttaagagaacttgtcccttgcccaagacaaaaagaattcatcaccagatggggatgctaataattataagaacaactaggggtcgcgtaaactaataggtaaaaaagagggttactttgacgccaataagggggggggccatccgtatagctaccccattaagttcttaaccgagtgcatggacatggaggattttacagggcaagcctcagtgtttttagacgaatcttcgtaaaacaaccgagaccttctgttttaaatcaaaagaaagaattttttggaggag

SEQ ID NO: 16800 - DNA, 285 bp, Zea mays
  Clone ID: MRT4577_115318C.1
ttatttatcgccacagccaacaccacccggcggggcaacgcgacgggcggggggaggaacgaataaactcactgacagccagtgaagggggagaagtgcactgattcctcgaccagtgcgcgcaccgcccggcagggctgataattttgtcgacgaccagcgtagtaatacgcatggcggctctggccacgtcacagtttgcagcaacgcgcgccggcctgggtctacacctcacgtccactttccgtctctgagccgtgcaagtcatgaagggggtaccgtctt

SEQ ID NO: 16801 - DNA, 429 bp, Zea mays
  Clone ID: MRT4577_115319C.1
ggcattactcattcaattattcagccataggatcccctcgtcggcgccgacgccgcagctccaggtctgtccctcagcatcggccctcatcctaggtaaaacatacagactctgaccctgtcacaaaacgtgcttggccgccgccgccggcggctaccactcaccagcccgccatctcttggagggcctccgcttcctgcttgactacccatcgacctctccgccctcggggccttcgcaccggcgccaccagcacggacaaaaggtggcggggatgcccagctcgagtcttcctctacggcgtcctgaccacgctccctgagattcaccaacacgcacatatcaagtgcagaatttacatttgccccgtgcacacctttacctaccaagaggttcaaattttactgcacaatcaacgagttcttgggg

SEQ ID NO: 16802 - DNA, 673 bp, Zea mays
  Clone ID: MRT4577_11531C.1
cccagcgtccgcccacgcgtccgcgtttgttcagcagcgctacttgtgctcccccaacgctactaccgccgctagctggttcaagtgcggcgagcggagccggagaccggtagaggaaattaagaggcgtcgatcgggcatggggtgcgacgacaagtgcgggtgcgccgtgccgtgccccggcggcaaagactgcaggtgcacgtcggggagcggcgggcagcgggagcacacgacttgcggctgcggggagcactgcgagtgcagcccgtgcacgtgtggccgggccacgatgccgtccggccgcgagaacaggagggctaactgctcctgcggggcgtcctgcaactgcgcatcctgcgcctcggcctgatccgtgcgccctcgccctcgtgctaccgcgctgcctagtggagggagttgtctagtgaggctctggagacgaagcaactagcactacttctaataaaggggcttgtgtcatgctcgccagacgcatcacgcgctgcatctgcatcgtggtatcgtgtagtaagtttgtgtatgaataaacactaccactttatgtctcgcactaccagggcgcagcactgctgcacggagtgtggcgatgccatgtgcattattcaacgtgtcaacctaagaatcacaaaatctactcaattcaaccatc

SEQ ID NO: 16803 - DNA, 789 bp, Zea mays
  unsure (1)..(789): unsure at all n locations
  Clone ID: MRT4577_115320C.1
taaatagcccaaaatgccttaatgtgccagaccggtccatatacatacaacagtaataaaaaacaaaaagtatagaatatatatgaccaaaataaaactaaatgttttgtggatgcatattaaaaacttttggtcagaaagaaaaaatattacaactagcttagaaataatattcagttctctgttcagtgtttaactgagtactatacaaccatacagaatacatatacaatgatcatcatcactacttactattctaatctagttattggttctctgaaggcctattgaagctctagattcttgaaattgtacaggtcatgtaggctttgacgagccttagttaaatactaagtctatattttgtgggctttcatgggccttagttaaatgggccgtgccaggccgacccatgagcttgacttgagggctaggcacggcccacatattgggccgtgcgagatatatgccgtgccaaaaattgtatgctttaggccggtctattaggcgcagcacaaatgtacatttagaacctgcatagggtaaatcttatttttgtttcttatagtattatcaaatggtcacttattgtagctgcaattaaactgttttagcacacatgaactagaacagtaacataggtttagcaacctggaagattataagttcatatagatcaaaaggaagtttgtgggcatatcggntgaattgaatgaatgattgaaaaaagtttcatatgcttcgttgtgtagccattgggtaacttctaaattcagcactgatgctacc

SEQ ID NO: 16804 - DNA, 188 bp, Zea mays
  Clone ID: MRT4577_115321C.1
attcctggggggtcgacgcttccgccttgtcatgcacccatatcgacgaatttttcccccctctccgatctctacgcgcggggatgctgtctatgtcctcgcccaataatgttgtgctgctggcacagctgctcggggcagagcgcgttcgcggcggctgcctgctaggaagccggtccgcctactac

SEQ ID NO: 16805 - DNA, 448 bp, Zea mays
  Clone ID: MRT4577_115322C.1
aacaaagggggcccaattaaagacttatttccgggcccaactccagataacgttggggtaccattggctcacccatttgggttttttttttggggaaagttaaacagggggggatagagtcccaaaacttttgggttttaaaagactcgccggccttggaaagctcctccagttttttataaatttgggcttccgggaggccatccaagttaacccttttttccacacccattttgtagcgcccccaaagttgggggggaacaccggagccctcggggacaaggaaggggaggggggggttgcggcccttgatttcaccatatttttttttaacaaactaacgggcaggggctctggccggggaggactgacaaaaaaggacccggtttttttttaggctccaaaacaggttcgcccgccatgccatggccgccgcttgttttctttt

SEQ ID NO: 16806 - DNA, 344 bp, Zea mays
  unsure (1)..(344): unsure at all n locations
  Clone ID: MRT4577_115323C.1
agtgccggtgccagctggagccacgcctacggaagcaggatcgggtctccgtgcctgccctttccatttcacaagactctgcaccggcggcgtgagcgcgcctgaactgtttcctatgactactgctgctggcggagcttgtgccttacgggagtatgtatgggcgtcgctgccggaaacgctcagatgctagcttctcctgtcagatcatcaagttgtaataccacccatntctctgttnaaacggatcgtctttttgncagatctctacgcgcggtcactgattccattcatgatggcctgcctccatcctttctatgggagaattcttttatgggcatcct

SEQ ID NO: 16807 - DNA, 497 bp, Zea mays
  Clone ID: MRT4577_115324C.1
cattgggtacctcgaggccggccgggtagatcactctattaagctgttccggacggaccgattcgccccccctggggctgcgactgcctccggtcatggaggcgatgtactacgtactgtgcggggctgctgctcgacggcaaggcgaggatcgagatcgctaataatgacaaggaccgcggcaacgccagctccgcagctactcctacaagagacaactacgctgtcaagtactccctcatgatgctgggacactggctgcaggggccctaggtctactacctctacagtcagcacgactaccacaacgtggacatcggccacctcttcatcaacgatttggcatcctacatgcgcttcaggatgatcgattattcccacgcctgacaaagaggatcgaaagagggcctgggtctgctattgcagcatgtacatactcagctggatcaccaaaaactgcatctaggacatgcatcacaagatggccctgatcctct

SEQ ID NO: 16808 - DNA, 149 bp, Zea mays
  Clone ID: MRT4577_115325C.1
tgttttttgcatagagggcggagctgctgtcgtggcgggcgtttcataatagcttctgttggctgcaaaaagaattgaagaatgtgcttggccacgctgccacgtcagttagacagcacgcagttgctaccggccaacggtactgttct

SEQ ID NO: 16809 - DNA, 440 bp, Zea mays
  Clone ID: MRT4577_115326C.1
ccgtttcgggccaggcctacgctttcgcatagactcactgctgatgcttattagagttaccagtattggcctaatgctcactggggagcggtcagaatgcacttcacttacaactcatgtagctacctatggacagtcccgagatgccatcgagctatgaccatgatgatgtgccaccacaactggcacaaacactctataggataatagggctgctcaaaaacgtactgtgcctgctaatgcttctggcaagaataaagaatctgggaaatcgtcagttttacttgatgtgaagccattctacgatgacactgacatggccaagctcgaggaagctgttaggagtgtccagatggaacgactgctatagggcgcatccaagcttgtcccagttggatatggcattaacaagctgcaaatcatgatgaccattgtcgatg

SEQ ID NO: 16810 - DNA, 228 bp, Zea mays
  Clone ID: MRT4577_115327C.1
cggaaacaatggaacgggggtcccccgtcccaaaaaggcccattctcctttttgcccgggccttatataaccggccctataacaattgttccaccccgggccctgggtgcttttccctaaccccaagtgccgtttaaaggggccgacccatggttcccccccgctatttccgatccgatcccctgagggtccccattttactctatagggagtcactttaagaacctt

SEQ ID NO: 16811 - DNA, 466 bp, Zea mays
  Clone ID: MRT4577_115328C.1
gggagcaatttaatttattacttgaggggggggttttgaatacacgaagacagggcaaatttgggcgggttcgagagggggggggggggggggaaaacaaaactcaataaataaagaggggcagggccggaaaaaataaaaagggggggcaggccctaggggcggccaaacctagggcggccattatgggccgaaaagggggggggcggctattcttccgggccttgggtgttaaaaaacaggagggagttcaaattttttggagggggccgagtcactggcccagggggaagggggggggcctgggctggaaaaggggccggggggggaaatgggctcggggggggggtggtgtccccaaaaaaacgggggaaaactaggttaggggttgggaggcgaccacttgacaagaatccatgggcctggcactcggtaaaaaaatccatcttccgggtcggtcatcagc

SEQ ID NO: 16812 - DNA, 160 bp, Zea mays
  unsure (1)..(160): unsure at all n locations
  Clone ID: MRT4577_115329C.1
acttctcncggngccgccaatnacctnacgttcnctngcacnggnaatcnctcagtctacngaactctgcttgngcgagngantggactgcaaggtgataggccggattcgnatgatatgggagactatttgcgtcggtgngtnncagacnaccngtcag

SEQ ID NO: 16813 - DNA, 1520 bp, Zea mays
  Clone ID: MRT4577_11532C.1
ccggccgggcccggttgctgccgttcccggcctaaacggaggcggccgtataaaggcattctcctcgcgccccacccggcggttatcttcaccaccatatcgacatcgacgccagcgagccaaggacagaacagccggcgcccggccctaaaactgccgtgcagcgagagagaagcgagggaaagatggaccggtaccagagagtggagaagcagagggaggaggcacccatcaaggaaaacgagatccgcattaccacgcaggggaggatgcgcaactacatcacctacgccaccggcttgcttcaggacaaaggttctgatgaggttgtattcaaggccatggggagggctatcaataagactgtcatggttgtggaattgatcaagaggaggattgttggcctccatcagaataccaccactggatctactgatattactgatatgtgggagccattggaggaaggcctacttccgcttgagacaacaagacatgtctctatgatcactataactctttcaaagaaggagctggacacatcatctatcggatatcaatctcctttgcctgctgatgaagtgaagcctttggttaaatatgaaaatgatgaagatgcacactcacctggtggccgtggaaggggtcgtggtggtcgaggccgtgggcggggcgagggcagaggtggacgtggaaatgggttcaatgactatgctgatgccggttgggaagaggatcacacccctgcatatatgggcaatggatatgcccgtggaagaggtcgtagtttcaggggccgtggcaggagaggcggctacaataaccagcctgaataccaacaggacggaggttattacgaggaggcacctgtccatgctccagccttaggtcgaggtcgtggtcgtgggagaggtccattcagaggcagaggacgtggtggcaacgcaaacggcgtgatgcacgctgctgcggacagtgcataagctgttcgttaccagtccaggctggttgtttgttggatgcctgctccaagtatgaagatgtatcatctgttgttatcagttaacgtcattacttggcataagattgacattctgtgtcggagtgcagccaggttttgatacttgactagatctgtagggtagcgtctttacagtgctttctcctttcacagtagatgtcttaaactaattgtagtttcgtaaaggtttagagcagggcattctttctatttttaaatataaaaacgaagtcttggtgtatgttcaaatgtgcacgtttttatatgtgctgtttttgaaatgcgagttagattaagttcgtggtaaactgtgcggccacaaatgaagtgtacaaaatattttcaaacaaaattaagcaaggcctgaagataatctgaagagctttgtacagacgatttttgatcattgtcgatcctgattcctgatgctttaatttttttcaccaccaaattttccccatttgtaatggaactgaaaccagcctctcatcgaagtgcg

SEQ ID NO: 16814 - DNA, 343 bp, Zea mays
  Clone ID: MRT4577_115330C.1
cttacgcgtccgcatgatttgcgtcacaaatgggctaccctgcagactcattcagcgctttgcgaaagctcggagaggcaagctgtatggcacaacctggtgcatcggcccagacgagctcaggagagggaacaccagtatactgaccacgaccacgtgtgatgctctgatgacctacgcactaggacttgtgcatatccaacaagatcaggaggctgagaatctaggacttgatgtcatgcatgctcaactaggaacaattcgacgctctcaagctcctaaacggcacggaccgcatctgccctaccatcactgaggaccttgacaactcgggtttagacca

SEQ ID NO: 16815 - DNA, 240 bp, Zea mays
  unsure (1)..(240): unsure at all n locations
  Clone ID: MRT4577_115331C.1
gcngngnganccgagacangccggcnncncgngggaaaggaaaaaaaggcacagacggacgagaacnggacgcaaaagcgngnccangancgcgnaagcanggcgaaaccanncaaaaggcaaancagagaagaacangggcagggcnaagcacgggaacnnggagggaccaacgaccgngngccgcgagaccagcnaggaggaaaggagaaacgngnngacaaacaacaggacgaggag

SEQ ID NO: 16816 - DNA, 949 bp, Zea mays
  Clone ID: MRT4577_115332C.1
cccacgcgtccggtactactatccccgctagcaagcccgcaagcaatcaggagccggggagatgtggagacgccggcgacgaggcgaagaagaaggaggcggcgcttgcatcaagcaggctcctcgacccggcgttcaagccctccaaactatcccaggaccggctcgacaagtttaaggaattacacaagaaacggttacagataactgaaaagccgaagtataaaagaaaactgaaaggaaccgctgggagaagtaccaaagtaaccagtgattacaaattcactaatacggatgcatctgctgatagttctccaagagatgtacatcatacgtcatcaattacaggaatccaaggggatcctgcatcaggcctgtcctcgaggaacaaaagaaagctacattgggggcttgatattaaaggacgatggggaaggaaggcaaacatgtaaaaatctgaagacccaaccgcaaaagcatatccacagttccacaccccacttgattcagatttgaaaggagaaggacagaggaaagtggcaggccttttccacggatcatcaggttgcttgtaaggttcatgtttgtgacagcaaccagaaacactggagcgtggacagcagtctcagaactaagcagtaagctatagtatccaaacttacaagtgcgatgatagtttgtttatcggtttcgcttgctgtgtggtgtagtttgtctgtttttgtttgttttttttttggtgaaaaaaacactgatggtgcaagtgcaacagaggcccacgtggctcgtcaaccttttgcaaggcctggcaggcccgcgttgatttagcccttttcccttgtaccttatgtttatgatctgggggttgagcctattatgatcaagatgttgttgaggtatatattaagattattctctcacacaaatagcctgaggtgccgtttgaatc

SEQ ID NO: 16817 - DNA, 293 bp, Zea mays
  Clone ID: MRT4577_115333C.1
caacatttgaattcgtgtaaatatttatttttgtgtgtgaacaatactacaaagtaatcagtaagatcttttgcaaaaatgttaccccaggcaattatttgtgaaaatcttaatgttaaaacctggcagagacccgtgctgagtttgctgagagatcggtagccaagctggaaaagacaattgatgacctggaagatgagctctatgcccagaaactgaagtacaaggccattagcgaggagctggaccacgccctcaatgacatgacctctatagcgtctctacagccaact

SEQ ID NO: 16818 - DNA, 268 bp, Zea mays
  Clone ID: MRT4577_115334C.1
cgaacctgggttcaccctagaggccggaggtggccgtgaacccaacttcgcagacgctccgaggatactggtgatcgacctgctcgagctcctgtggggtgccgtgtgcccggccgtgatccacaactgcgggtgcacgccaatcttcctgtgcatcaaggttggctactggagcgcgaccaaccactactgcggcgactggggccagggggccccctcccgctccagcggcgggggcatcctcggcagcggctgaggctgcggaggc

SEQ ID NO: 16819 - DNA, 231 bp, Zea mays
  Clone ID: MRT4577_115335C.1
gcaggggccacgggcatccgatgcccaagctaggagagtgggacgagaagaatccgcccacttgcgagggcttcaccgtcatattccagagggcccgcgaggaccagaagatcaccaccggccctggggctgggagcactcgcgcaggcattcctccggccttcaggaacggaggagatgaggggctgggacaggccccacttcggcgactggaaccagtacacgccgccc

SEQ ID NO: 16820 - DNA, 1053 bp, Zea mays
  Clone ID: MRT4577_115336C.1
atgagaagccacagactgtcgctccgatcgtcgcaactgcgactggggggccggagcgagcacaacaagcgcccccagccacagggaggcaacagcggcacatgccctatgcaccccaacagtcgccacagcgcctcagagtgccgtgagatcatcaagctcgcaaagcgtgtcagcgagcggtgcgagcagtcctccaaggatggctccccacctcgtcgccggcctggcaaggagagggtcgacggcggcgaggtggccgcgggggaacgagagctcgggtatcagtcacctgagggggtcctcaaggacatcttcactggagactctgactccggtgacaacggtgaccgccacaagaagctgtacgtgatgtacggcaggagctgggagctcacctcccgcaggaacgtcaagtccctgcgccgagaggtcctttcggcagtcccgagggtcccgaaggctgctccacatcagcggtggaggagcaccactgtctccttcggggcatccgactgcctcgaaaacatggcaggggccagtgtactaccgctcatcactgcccctatcatcgccaacatgcggctgcaccatgttctgattgacagaggggccggcctcaacgtcatcagtcatgctgcattcaagcagctgaccgaggagaactttcgcacggagaacgtccagttcgacgtcgcggaggttaacctccccttcaacgccatcatcggcatgccgaccatataccggttcatggccattgcctattacgggtacttggtcatcaagatgttgtccctggctggggtcctcaccgtgcggggcgactgcgccgctgcgcttgcggctgtggaaaagctgcacgccctggcggcagaagctgcttgcccggacgacggagggaagaacccctcgacctctgggaccaaggcgcctaccaaggtgccgaaggtgcggccatccggagcggacgacatccccgtcaaggccgtccagctcagcgcgggttcctcccagaccactcgcattgtgggtgatctggaggaaaaatag

SEQ ID NO: 16821 - DNA, 856 bp, Zea mays
  unsure (1)..(856): unsure at all n locations
  Clone ID: MRT4577_115337C.1
acgaggcggacgcagtgtgcatgcatataagagcaacaagatactggcgcagaggagcaatgcccggcatggatgccttcgctgctgtgtcactactcgccacactctttctggttcgtgcggcagctgcccatcctccggcggcggctgcggacgccatgacgccgacggactattggcgagcggtgcttcctgagaccccgatgccccgagccatactcgacctattgaccacatctacaggtgaggaaggctcaaggaaggtcaccacgtcaaatgggtaccaaggccatgacttaaggacggtcagcacatcatatgcatctcaagatggggacaactcatggaaggctaccatgtcatatgggttccaaagtggtgagggctcgaggaaggtcaccacatcatatccgtaccgaggccaggacttaaggatggtcagcacatcatatgtatctcaagatgaggacaactcatggaaggtctcgatgccatctaggttccaagttggtgagggctcaaggaaggtcaccacgtcaaatgggtaccaaggccatgacttaaggacggtcagcacatcatatgcatctcaagatggggacaactcatggaaggccaccatgtcatatgggttccaaagtggtgagggctcgaggaaggtcaccacatcatatccgtaccgaggccaggacttaaggatggtcagcacatcatatgtatctcaagatgaggacaactcatggaaggtctcgatgccatctaggttccaagttggtgagggctncaggaagctcaccacacattcgaatcacagggaggactcagggaggncacgcatctatggaatccagatgat

SEQ ID NO: 16822 - DNA, 699 bp, Zea mays
  Clone ID: MRT4577_115338C.1
cattgggacctcgagccggcccacctgcatgtccggatccttccgccgttgctgacgttgccgaggcttctggaggagcggcgggcgacggacgacctgctgaagcaggtggactacctgctgcgcaacggctggataccctgcctcgagttcagcaaggtcggcttcgtgtaccgcgagaactccacctccccgtgctactacgacggccgctactggaccatgtggaagctgcccatgttcggctgcaacgacgccacccaggtgtacaaggagctgcaggaggccatcaaatcctacccggacgccttccaccgcgtcatcggcttcgacaacatcaagcagacgcagtgcgtcagcttcatcgcctacaagcccccgggcagcgactagaccgcgcccgccggccgccccccgccggctagctagctagctagctcctgcgtgagctagtagctagtgccatgcgccgtctctgtcgttcggttttgcttcgggtcaccgtaccctttgcttgcttggtttcttctttcctttttcctttttttttttcttttccccggccctggttcctttgctttccagttttctctgctggatgtgatgtatccattgttgcaagcatggccttgcattggctacctctatacctgctacaaaactactgcaacgcctaaaaaaaaaaaaaaaaaagcggcc

SEQ ID NO: 16823 - DNA, 419 bp, Zea mays
  Clone ID: MRT4577_115339C.1
aagcgagtgttcttccaaatgattgggcattgcacataccgatgcatccgaagactgaggtgcttcacattattcacctttggaccggccccggcaccctttatccctaaagccaactgattacatgcctatactaccctaattgctcgactcccagctctaaataagacatatgttgagctatcgataaaacatataaactataaaccctttcttttcttcccacaacgtttctactataattttttcaagctcttgttacgggcatacagacttttcttatccacaggaactttggaagccattgggccatacatctttggtgccggcgcatgtcctacagcacgatcagaaacagggggggtctgatgctgcaaactcttaccaaatgctctggctgcactggaggtagataccgc

SEQ ID NO: 16824 - DNA, 720 bp, Zea mays
  Clone ID: MRT4577_11533C.1
gactggacagcgagcaccttacccttgcctttgtttcctcagcgctcaacgctcctcgcatccgtcgctagggttctcaacaccacttgcccacgccagcatcgcgacaccagcacgagtggcacaccggcgaggcgccagtgcgaccatggctgtgatccgccagcctgacggcggctgtacacagcatcagtgcatcagctgctacgcgaagcaccatcctggcaaaggtgcgagcaagcggtcccaggtggcgcggtcatctttgactcaagcaactttccgtcacgcatctgctccaccacttggccaacacagcctctccgacctggatctccaggcatccggatctgcagcacctgaagacagccatccgctgccaatcaactgcccccatctgcagagcacctgcctagatgcgtattaaacttttggctacagacgtccctgcatcagcaacaaaattgcattcaacagtgtcatcaaaaccctgatatcactcagtgaaacaaaaagttgtctcgaacacctgatttcgaccgggccaggaggacatcacccggtcttttaattagcggatgtttttgagcttccgttctactgcagttttgttttgtttttttttattttgcccaccactctgttccataaccatggccatgtgcttgaactagcctgcaagaatagctagcttgaagaagctgcagctagattatctct

SEQ ID NO: 16825 - DNA, 600 bp, Zea mays
  Clone ID: MRT4577_115340C.1
ggccgctttttttttttttttttttagactaattttccggttaacctgtgtatcatatatattaataaaacttcccatttttaacacctataatcccgcaagcactgggacctattgagacatctttcactacacgacatcgaccaaatcaccgtaaacgactcgggcatcctaataaatattatacctaccaccacgacacatatatactaaggcaataggaccgatataattagtatatctaacaattcccttcatcgaactaataacagaaatagcaatccgactcactgcaaaatcatcacgattaatatacctagtcagaccattcatcaatccactaacatgattaacaaattggcttaccctgactaattcgacgagatagtcggaagcacgatgactcccatacgacgaagaagacggggtagccacccccgaatcaggcttcttgtcgagcgtcagacgagtgtcgcacgagccttgctgttacaccatcggatctgcccgaagactgacctacctcccatctcctagccacacgacgtcatgacgaattcttaccactggatcgtacctgatgctgtaacccacgtgctg

SEQ ID NO: 16826 - DNA, 285 bp, Zea mays
  Clone ID: MRT4577_115341C.1
atccgcagcgcccggaatggcggcacctcttccacgtcctcccgttcctgtcccgcggcggcttgtgtgccgccttctccgcccgcgcccactctggctaccgggctagtctgctgcgctgctcggccgacgtcgatcatgcgagcttgttcactcgcctaggccggatcataaatgacaaggaccatacctacgtgcagaacatcatttgccacttgtacgcgaatggccagaactgatgtgacttcacaacactcgttacttactggaaccttgccgctcacg

SEQ ID NO: 16827 - DNA, 378 bp, Zea mays
  Clone ID: MRT4577_115342C.1
cccacgcgtccgatcaagtccttctcttactaagcttcctaaccacattgtggagatcaatagtggcggttgaaaaacaaaacccccgctacaatccccaactagcctgggccaccaccaacaactcaaagaacaatgccttcgcctcctaccacaaaatcctccactccaatgacatcaccgaccgtgacacagaaaagtcccgcgcattccactaaaatacctcctacaccaaaaactccaacctcaaccatatctataacaagaactgcaaggaactcaacagacataacatcacagataaccatacaccatacaaagcagctgaatcaacaaaaacctaacgctaatcataccaaataatcaactcttacaaat

SEQ ID NO: 16828 - DNA, 646 bp, Zea mays
  Clone ID: MRT4577_115343C.1
gcgtctcccctcaattttgggacactgttcttcaaatttgtgagctctaggcattgaccctgctatctctgtgcaatcaggtgccatgattgcttgcaagctagctgccatggcacctcacaggctatgttcgctggcattgcttaatgtcaccggaggtggctttcagtgcttcccaaaggtactgtgattttggtatctgcacaagtgtttgcagaactgaatacactcaatgttgtgaaatgctacaagaggcactaattataatttttaacggtttgaggcaagaattaagtttcccctctgcttctataggtagacgcgcagatgctatctcttgcattccgtttcttaagggcaaaaactccagaggaaagagcccttgtggacctggaaacacattatacgaaggtaaagaaccgacaatgcatccattatcattcccggtttaacagaaaatagttttagttttgtcagactcactgcatcattgttgatatgtttggtttaataatgatcctatgcaggaataccttgaggagactgtcgggtcatgtactagaagaatggtcctctatcaagtgagtagtggtgtcacattttctatgatgctttatatataatagtctgctgatggtgatgtatc

SEQ ID NO: 16829 - DNA, 214 bp, Zea mays
  Clone ID: MRT4577_115344C.1
agtgaaaagttcgattatgcataggcaataaactaattacctggcatctcaaaatatttaggttatagagtattaaacactttaactaccaattgtgacacatactaacctggaaaaaaactatcattggtgctcagttcttttattagagtacactgcatatatcagatgtttaaaactaaacatggttcacgtttaattattcaataaaata

SEQ ID NO: 16830 - DNA, 409 bp, Zea mays
  Clone ID: MRT4577_115345C.1
gccagttgaggcgccagggttgggccgccattcccggggtcaacaagggccaaatcgggggggacttcccgaagggcttccgccggaacataaagtacaacttttgcttgaacttggtccgccaggtccaatttttccagaaaatggacaacctggggttcaaaaccatttgcaacggggggaaatccttaatttttccaaagggaaaaacaatcgtagggaagggcaacgtggtgcaccggatgctgttaatcgggcggggccacctgcattgcagccagttgttgcggaacggcccaacaagcagttgaaccttggggcctggcaacttaagggggaacaagctgtttgcggggtgcctgcgccgcccgttcttggaacgcttcccaacgttgttgggaaccttggt

SEQ ID NO: 16831 - DNA, 893 bp, Zea mays
  Clone ID: MRT4577_115346C.1
gctcgaggccggccggtctgggaaaatttgggctgatagaggccggggtgacgcccgtctgtctccactctacagttgtgccgcctcgtctctctcctctctgctgcgcccccctatcgtgcgtgagcgtgattctatccaggattctagggttcgttcgcctcgtctcgcgatggacaagggcagcgtcgtcgtgcccccggcccctgccgccgccgccgcgaagaaggccaagcgcttcgagatcaagaagtggaacgccgtctctctctgggcctgggacatcgtggtggacaactgcgccatctgccgcaaccacatcatggacctttgcatcgagtgccaggcgaaccaggcgagcgccaccagcgaggagtgcaccgtcgcttggggaatttgcaaccatgcattccacttccactgtatcagccgttggctaaagacccgtcaagtgtgccctcttgacaacagtgagtgggagttccagaagtatggtcactagagagaatggcttcggcgtggaattgcttcatgtttctcgtcgtttagcagtagtggttactgaatagattctggtgaacatgctatggatctgtaacgtttctgaagttctgccttacttgaagctgtaggcgaatactctggttatgccatattcgtccttcagggcgctgttcaacagctcttcctcacatgaagctgtagacgaattactcagtttgcagaaattaattggtaattgtgggctatgggctagagcaatgtttagctctccgtttccctatattggcatatgaatttgtgatgttttaattagaaagctctgtttctcacgtgaattcagaaatacaagctatactcaggtgaaataaaaaaaaaaaaaaaaagcgggc

SEQ ID NO: 16832 - DNA, 489 bp, Zea mays
  unsure (1)..(489): unsure at all n locations
  Clone ID: MRT4577_115347C.1
ctgggggttttttttttttttttttttttttttttttttttttttttttttttttttttttttttttttttttttttttttttnnggggaaattggaaggggaattaaattaaggccgggggaaaacaaattggtggtttaaccccaggggtgacttttggcaaaatttaaaacttttcaacaaacgttttaaaaacaaacttttttaaaaccgggcaaaatttttttaaaaaaacctgaccaaaaaacctttttttttgaaattggggggactttaactgctttgaggagggcccataaaaactgaaaaaactgttcctaaacccctttttgccataccccaaccatttttttgtttttttggcgcagggggcaaaaatttaatttgggaaggggaaaacaatccccggtgacttaacgggggcctgggggcccctttagtcaaaggattccaaaccattggcaacctttttttttatgtttaacttg

SEQ ID NO: 16833 - DNA, 703 bp, Zea mays
  Clone ID: MRT4577_115348C.1
actccttagggcgattgggttcctcgaggccggccgggacacttagagctccatttcttagtaacacagattgagtacgaccatgatgtccctcgctaataacatcatggacaagagcgccgaccttgcttcgcttgagcgtgtgcgcgtcgtgcggaacgactaaggtgttgcccggcaccaacatatccaccaaatacaaccggttagtgtattcaccgctatggggcacctgaaatctcgagcctatggcgacagtcgctcctgcatgcgaatactactagtacaatctgaaacgcgaagctgtcaccctacctcggcatgagggttcgccgtcaacgctgacatctttcacgatacccacgtctgtgaactcactgctacgaggcgcacacgccgggaaatgcttgaggggtcggagaatcagcgacgacgttcatccatacatgaactactaacctatcggtccctaccactgcatattgaccgaggaaggcttcggatccctgggaaagtgcggcttccacgacaatctttcctactgtgcgatcatgaactgcgagtgcacaagggtgctgccgccactactctcgatgaacacatatatatcagtctacacatcgcataaagtgtgaaacactgcaactacctgatcgtgatgtactacataatgagtggaaggatgtttacatcatgctgatgg

SEQ ID NO: 16834 - DNA, 299 bp, Zea mays
  unsure (1)..(299): unsure at all n locations
  Clone ID: MRT4577_115349C.1
caaaccaaacaacaggcagcacccggcccacccaagcggcccggaaccaccacaaaacaacggggaaaaacaaagagaacggcagcgccgccggcacaccgcgcccacancacccaggagaagcccggaggcaaaaacagcagaaggcacagacccagccggacgaccaacccaggaagccaaacgccccggaggaaccaacagggccacggagggacccccccacaggccggaaggcccaccccagcccccgcagccccccagagccgaacacagaggcgacaacaccccccacaaaa

SEQ ID NO: 16835 - DNA, 491 bp, Zea mays
  Clone ID: MRT4577_11534C.1
atccggctgctgctgtaccagcgcgccgacgatgccgtcccaccgtaccagggccacaccgtggccgacttcacgcgccggatctccgactggcgcaaccggatgtccgggtgcggcgccaaggacgaaggggtcaaggtgctggaccggcggcagggcgccgagcgccgcaccataagcaacatcctcggcgccggcgaggagtcgctcgggttccaacgcacgcctgcggaggtgctccgcatcctctacggctcgcgcaacgagcagatccccggtgggttcctccccaggggtgccaatggaaccatcgctagaggtttcttccagctcgcgtagatcaaaagatactaacaacatcctagtctatcttgagacatcacaagctgatcgatggtagtaccaatcaacttgaaattaaaggtccaagaaatgtgataaaaaaacagaaaccattattattttgaaacctaaaaaaaaaaaaaaaaaaa

SEQ ID NO: 16836 - DNA, 345 bp, Zea mays
  Clone ID: MRT4577_115350C.1
gcccgcacatggcataaattcattctaaaaaggatataaatatatatatatatatatatatatatatatatctataccctaattaaaaggcaaccggactgtacaaacacagaaaaatggtttctttttttccttgccgaaagccacagattccaactcgggtggcatgctacgggtgcaagaaaccgagcagctacccatggaagcaaacattaattccaagccggtgaactaaaataagtcttaatttgtaaataaatagggctgcaagctcccctctttccgccgtgggccaaatgatgtctctttctcccacgagctggcctacgaccaagacctgaggga

SEQ ID NO: 16837 - DNA, 466 bp, Zea mays
  Clone ID: MRT4577_115351C.1
cggacgcgtgggcggacgcgtgggttttttttttttttttttttttttttttttttttttttttttttttttttttttttttttttttggaaacctctttttttttggggattcaacaggtttttcgggctaaaagtttacagggcaatcaatcttccccgagggaagggaaacgacccccaccatgcaaaccttttaaccacaccgaactgggcccccccccggccccccccccaatggagcggaccctgtttgcctgagggctcgcgcgggccccggaccccaccggccaccaacgccacgtggggttcgtccccgtcccagggcccctggcgccctgttcggccagggactgggggactggccaacaggcaacaggcaatcggcctacaaggccaggttcaccgacaggatatcgccgagcgacccccaaagctcctcgtccttgtaaaaaccaacaacctgc

SEQ ID NO: 16838 - DNA, 243 bp, Zea mays
  unsure (1)..(243): unsure at all n locations
  Clone ID: MRT4577_115352C.1
ggactgtttgggacagctgctgcttgttgaaaaagcagcttatctgataagctggtaaaaagcagcttctgcttgttggctgcttttagttcattttgagaagcagctgaactgataagctgctgcagaagctgcctgtttgtgtaacaccctaaatctagcaaatgcaaacaaccctatttgaattattaaatttcagtagaaagganaaataattatgtttcaaataaagaaaccttgata

SEQ ID NO: 16839 - DNA, 784 bp, Zea mays
  Clone ID: MRT4577_115353C.1
cccacgcgtccggctgggtgcgaaccatggaggaaacagtactgaaggtggcatatcgtcgggcgacagcatttccagctcgctgagtgggataagctaccaagacgttagctctgcctgtgcctacggagcatcctctcatcatcaccatcagaggaggaggacatccgaagaaaagggtgccgagcaactgcgtccttccaaacccggtccagaggcggagaaggtcggtctcagacatgaggcggtggacggtcggagggccgctgaggagtggatggtcgactacgctctccggaaggaagtcaagaggctggctcgtgctcagaagaggaaagttgagatgcttgtccaggccttcgaatcagttctgcccacggtagcaatagcaagcgagaagaagccaatgcatcacgatggcagtcgaacttatactgggacttgattagcttggtgtttggaaaagatcatgcaaatggtgaagcggcaaagaccccagctgatggtgcgagagatatgagtaaggaagagggaactggtaaagatcttacttcatcaacaacctcaggaagcttgaagaggcaaccggtaaagaaatttttagcacattggaggagatagttgggttagatgaggacttgattagcttggtgttttgatttttagtttatgttgggtgaattgaacatcacattgagtagcaagtaatgtgttccaaagatatgtagacatttgagacaaatctgcattattattactattctcgtgatgcatgctgcttgat

SEQ ID NO: 16840 - DNA, 684 bp, Zea mays
  Clone ID: MRT4577_115354C.1
aggctggtacgactgctagccttcctcttcctggtctgcgcttgcctcgtgatggccgccatggtggcgacgacggacggcggagcgagcttagcagggccgtcgtcgaacagcgctgcgtcgtccgccacgaagacgggcggctcgccggcgtggcgttcaggcgggacggccgcagacgcgttccggagcagcgagaggaggatccccaaggggcccgacccgattcacaacaggcgtgccgggaagacgacgaccgcgccgcgccggagagactagctagccggaggccggccgggggcggcggcggcggcggcaacagaagctaccactgccggtgctcatcgtcctgcacctgaagcagcagcagcagctgatctgatcgacatacagttcgtgttcggcagctagcccctagccatgctcggagaggtttaattaattacgcagcggactccttcgatgggggtggatttttggtgatcattctgggggtatgtataaacctgcaacctacccttgcaaggattagtttttcttcttctgtttttcttctttcaagtttcaccgaggtggagtggaggttgaccgacattctgttcttcccgcatattcttgtgagattttgattccaatcagtgtctatcaattcaatttcgatcaaaaaaaaaaaaaaaagcccgg

SEQ ID NO: 16841 - DNA, 319 bp, Zea mays
  Clone ID: MRT4577_115355C.1
atcaagcaagcaagaatctactcggtaccaccatctgcgtacacatactaatccagcctgtcatccatcttcccatggcgctcaacgtgagttatctcctcttcggtgccgtcttgacttcgtttcagcgtctcatatccgggggcatcctctccatctgacgtctccaatctggagtattggcattctcaccccccgcgaaagtttatggtgaatttatttttggacggcttccgtacaaagatttttttcaagctgtcttatctgagtaatgtttttttcaaagtgtgttattagattgcagtactttttgtgtttc

SEQ ID NO: 16842 - DNA, 280 bp, Zea mays
  Clone ID: MRT4577_115356C.1
ccacgggtccgcccacgcgtccgcccacgcgtccgcccacgcgtccgcccacgcgtccgcccacgcgtccgcccacgcgtccggaaccaccagaaaacatacaagtttgagtagacaatgcttctccctgtagtctgaatcgtctcgtggggatttcggtctttacatgatccggaggcttaaggttgtaaaattagttgaaaatctatacctgttgtaaagggctgaacttttgaccactgaattgactgccaagcttcttatactgtgtgagagaaaa

SEQ ID NO: 16843 - DNA, 470 bp, Zea mays
  Clone ID: MRT4577_115357C.1
ggacaaagcccttcttggttctttatttgaggagaggttatgactaggccagaattttgcccagtaacaaataaggggggggaaatgccacccccctctcctctccttttcacgggattataacaatgggctcctagtccacaatttaaccaaaaaatcttcgggggcaaagaagcggaaaataaaataaaagagaaactaagaacctcatttttttgggtcgctgggaaccgaatagttccatctccaaaaaacaaaagggcagagctttaaaccctggggggagcaaagccatgggcggccatggctcctataaaaggcgctgatgggtcccaagaaaattcttaatcttccccggggccatggccatggccacaaggggaggcctttgggtcaccaacattgggggccgccaatttttccttaaaaaccctttcaccacgctcccttttttttgaagccttgggggg

SEQ ID NO: 16844 - DNA, 460 bp, Zea mays
  Clone ID: MRT4577_115358C.1
cggccccccgggtcggccccgcgttttgccggtccttctctttccctctagcgctgctgcggtctggtcgcctccggccctggcgctggtgggtcggcggtgatgggagcggccgggcggttggccggtcgggccgtggtctgatgtcggggtcgcggtccgtggaggccgggctcctgttccccgtcggccgcctcgggcggtgggctggggagggccgtttcgcgccgcgcgtttgcggcggggcccccgttttcctcggggccgttctgtcctccctggccgttgggggcctgtggctcgcctgctgcgctgcgcccgtgcgtctttgtggtctcgctttgtccctcgccgcgtgctgttggcgttccgtgccgtcgtgtcgctctgtgggctgggttccgtttgggccttgctccccggcggcttgttgcccttcttgcccccgggcctgctgccc

SEQ ID NO: 16845 - DNA, 699 bp, Zea mays
  unsure (1)..(699): unsure at all n locations
  Clone ID: MRT4577_115359C.1
ggccgtccgggaaaaaaataagaatatagcaccaaaaattatagaaattcttggagagttttgtaagcacaatatgagtacttggtaaaagttggtggatgtttggaagccagttgcttaggaagctttgtaaggtccaaaatataaaggttaaatccttaataaaagtggataaagtgctttggaataagaggaaagaagtgagatctgggtgtttgcataaagtctagtatgttttaatcctttaatggctcaagcttaaagggataccttacagggttcaaagtaagagagttgaatccttgtttaagacataaatggagtgttgcttaataaagacaaggttccctagtatggtttaggatcttgggtgtggtattagagtgtttagctcttttgtgatgttgttagttcttgggtgcacctttagagatgtgtagtcttgaggttctttttgttattttttatgcatcttcgtgacataaccgcaagcatatgtgatcatgacatttcatgtagagtaccaagaagaagatcctaaagagaagtctactcagtgctattgatccagtggtggattccatctaactgcttatcgtgttagaagatctcagatctcctnctgtaataaggcaagcccccggtgcatttgccccttccttgngttttaaaatgtttatcacctgatatgatgcatta

SEQ ID NO: 16846 - DNA, 171 bp, Zea mays
  Clone ID: MRT4577_11535C.1
acaagccatacacaaatctaatacaacacccttccatcaacatacaacaatcacacaaaccgggcgcctttacaaaaagacgagggcacgaaaacagctcccacaaaaccacgtcaactacaaatacatcatttccaatcaccagaggaaaagcatcctcaaattaccatc

SEQ ID NO: 16847 - DNA, 340 bp, Zea mays
  Clone ID: MRT4577_115360C.1
agccatagctcccatcgacgatcatctctagcctgaccattcatttcttgtggtaggctacttactacatatggctgtcaacattctctttttaacgatggaaaggataacatataataactctcctagatactgagttccactacaaaaaaaagacacataagcactctcagactctcattcttcacagcatcgacccatgaccgtacagtctcattctcatctgattgaagaggataccctttctaatgccatttatttacacctctatatcgatcaaccatactccgtcggacagttactacgcctgaaacccaacatttcaaccccaaagttcgaa

SEQ ID NO: 16848 - DNA, 594 bp, Zea mays
  Clone ID: MRT4577_115361C.1
cctcgaggccggccgggagacagactcacgatgagtgtcccgtgcaccgtgacacttggcggtggcacgtgcgtgagataaccagggtgggagtgagcgatctagttagctgagctgccatcctcagtagctacgtaggatatcgcgatccctatgcctctcttcgccagtttacagatcgaccgctataagagaccgatggtgtctggcagccggctccagtgctccttccttcccgagaagcactaatgaggccccaccagtcatgacggcgggcctaggccgcccagcggcgccatggttcaccgcggctccgcctacaccgatgagtgcgagaggaccgataaatggattgacccctggacttgatggcatcctgctcatggactatgcgaacactaccagtgggaagctattgacgtgcatacatttgaatacaacggatgtcaagcgggaggcgtaccgaaagctgctgctcactgcgcctgacctgggacacaatgtctccggtgccgtcctcttagacgagacgatgaatgaggccaccgacaacgctctgaatatcctggacatcctggctgagaaagccatcgt

SEQ ID NO: 16849 - DNA, 833 bp, Zea mays
  Clone ID: MRT4577_115362C.1
gatcctgaggtggttcaacgacgccccgattttctctgtgcctagctcggtggcctcgtcttcgtggttaaaagccgggtgtgtcgtgctctctccaccgcttgcgcccacctcttccttccctagttcccccgagcacaatcgtaacgctcttatcatcgccattggcggtgcgagtggaagcagtgcgatcaccggcgtagtaacactggtgccgggtctggggttcggacagtcgtataccgggatcgtcggcggcgaagcattggccgtcggcggcaggcgggatctaccgatggcccatctgcggtgagtcggtttttctttttatgcggtacattggggatccgttggacgtcgcgggagcgtgggtaggaagcggtctcggggccggtgcaccgacgaaggacggcgatggtgaccactggatggtctcggccgggcagagcgctggttggccggcagggaagagggagccgggtatggcgcggtgtctaggcctgggcggcgaaaggttgaagacgccagggcatccgtagattaggaaactggcgactgagatccgtgcgcaggcaaacgtttcctggtaatgctcttgaccgttgatctcatacgaacgtctcagattagaataaagggtagcgcttcgcgcggggatcagatccattggatcgtgatcggatggtcttgggttgatcacgtatatttagaatctgtgccgtagatgcgggatccggcggctatcgtggcataccgctttagggaaaaatgcgatctaatcctggcctctggatctgatctgaaaggcccacatcaaccgataccccttcccg

SEQ ID NO: 16850 - DNA, 368 bp, Zea mays
  Clone ID: MRT4577_115363C.1
ggtaagagggttttttttttgaattaatttccaaaccaaccattctctggaactttatttaactccacaaacaaccacaaaataaaggtaataggaaaaatacttctttttttgaaaatcacactccactttaaatttcatcatattacaacttccaaaatctaaccattaatttgaatttatcaccactgtctcacatattcttatacgctaattataaacactaactttcttgacacgtatacttacttcctacattattatttcttacagggcgccatgagcacccacaacaatgattgcttttttttttctggcctataattcattcacacaaatttcaccactaatttaacaaaaactggttt

SEQ ID NO: 16851 - DNA, 414 bp, Zea mays
  Clone ID: MRT4577_115364C.1
gggggcccaaaaaacgggccggaaaaaaaaacccctcccgaggcccaacccaccctttcttggacaatatcctttttccccccaaaaaaaaaaaggggggggggggctttaaaaagaccccggccccttttatggcacaaaacaatttttcaaaaaaaaaagggggggggggggaccccacaagaaaccttttttaacaaaaacccccccaatctttaaaatttcctggggccccggggtttttgaaagaaaccagcccgggggggggacgcccccaagacatggaccctaacccttctccaaaattattccgcggttggaaccccccccgaaaggggcgtttttttggaaacatgccctgggaaaagggcctttgggggggggaccatccgcccccgattttgcccccaaaaa

SEQ ID NO: 16852 - DNA, 170 bp, Zea mays
  Clone ID: MRT4577_115365C.1
atgaacatgacgagaagtcacctaaccctattctagacacaaattaaagtgggagtgaagtaagtgagtgggtcatttagtaactgtatattggcaaaatgaagtaaaacaatagacaaagtacagatgtagccccatcacgtgccattggtagagggtcgaattgatga

SEQ ID NO: 16853 - DNA, 284 bp, Zea mays
  Clone ID: MRT4577_115366C.1
taatattttcagcattcaaaaacacaccttgctattcgcactagcaacgacctaacaccaatggctaccaagtatattagctcttcttgctctgattgcccttttagtgagctcaacagatgcattcattattttatagtgaatacttgtttacattgcctgtttaccacaatatattcttgagattaataacatagttttgcacaatgatgccctactgttgcttacattgtgtttcttgctcttattgatgattcttcaatgatagctgattccagttatat

SEQ ID NO: 16854 - DNA, 2825 bp, Zea mays
  Clone ID: MRT4577_115367C.1
ggtactgagcccccaaggggtgatttggtgtcagcgtatgttccccttctttgtgacaatgaggttgaagtgcggattgcagctgctggaaaagttacaaaattttgcaaaatattaaacccccaaattgcaattggacatttttttccgtgtatcaaggaattttcagaaaaaaaagggaatagccaaatgcggttcaggagaaggcccctcgtgaccggctgggcccggcccgaacggccgtcccccgcattcccctcccgttactcgcgtaccgtcgctcgccgtattcccctgccgcgcacagttcactcgcgcacctctcgccccctcgctctacgacgactagtgggccgccggcgctggcgccgccttacgccaggtgccgaggtcttcgttgatctcttcgccggcgacgagcacccaccagctggaaaaaaaatctatagccaaacataataatggctatgattgatgaacctctctacccgattgctgtactgattgatgaactgaaaaatgaagatattcagttgcgccttaactccatcaaaaagctttctacaattgcccgggcattgggtgaagaaagaacaaggaaagagctgattccattccttagtgaaaacaacgatgatgaagatgaggtgcttcttgcaatggcagaagagttgggcgtttttattccttatgttggaggagtagagcatgcacatgttttgcttccaccactggaaacattgtgtactgtggaggagacctgcgtcagagacaaggctgttgaatcactttgtcagataggagcacagatgaaggaaaatgatattgtggactggtttgcccatgtcgtaaagaggttggcggtaggtgagtggttcacagctcgagtttcttcatgtggcctttttcatatcgcctatcctagtgcacctgaacaactgaaggcagaactgaggacaatttatggccagttatgtcaagacgacatgcctatggtacgaagagctgctgcatctaatcttgggaagtttgctgcaacagtggaacaaagtcatttgaagacagaaatcatgtcaatgtttgatgatctaactcaagatgaccaagattcagtgcgactattggcagttgagggttgtgctgctcttgggaagttgttggagccccaagattgtgcagcacatattctcccagttattgtaaatttctctcaggataaatcttggcgtgtgcgctatatggtggcaaatcaactgtatgaactatgtgaagctgttggtactgagcccacaaggggtgatctggtgtcagcgtatgttcgccttctctgtgacaatgaggctgaagtgcggattgcagctgctggaaaagttacaaaattctgcaaaatattaaacccacaaattgcaattgaacatattcttccgtgtatcaaggaattatcatcagattcatctcagcatgttcgttcagctttggcatcggttattatgggaatggctcctgtattgggaaaggacgccactcttgaacaactgcttcccatttttctttctttgctgaaggatgagttccctgatgttcgactcaacattataagcaaacttgatcaagttaaccaggttattggaattgacttgctgtcgcaatcacttctgccagccattgtagagctctctgaagataggcactggagagttcggcttgccataattgagtacatacctttgttggccagccagttaggtgttggtttttttgatgacaagttaggggcactttgcatgcagtggttggaagataaggttttctcgatcagagatgctggtgccaataatttaaagcgtttgacagaggaatttggccctgagtgggcgatgcaacatataattccccaggttttggagaagataaacaacccacattatctgtatcggatgaccactttgcaagctatttctttgctagctcctgtcatgggtcctgatatcacatgccaacagttgctccctgtcgtcattgcttcttcaaaggacagggttccgaacatgaaattcaatgtcgctaaagtcctgcaatcacttgtaccaatccttgatcaatctgttgtggagaagacagtgaaaccatgcttagttgagctcagtgaggacccagatgtagatgtaagatactacgcacaccaagcccttcgggcgtgtgaccaaatggtgatatctagttgactagcctgtccaggaattagcaaatgagatacatattggtctattctttttgaacattttaaagtgttatgtagtcttaaaaatattgtaccaccaatgacgttgatgcatctttttattaattatgtgttttttgatttaggtttagtttagtttttggatttaatcaaccttgggaagtaggtgcacacatgatatttgtgtgattgacctgtgcatgacttgtgctgttggtaggtcactagtgtaagcacattattttatagtccgctttgcttagtgttgtgcgcggaaactgtatgcattgcttgttcagacatgaagttgtgcgcagaaattgtatgcttgtgaatttgtttttgcagatccatgtgctaggactgataaaagtgatcggtaaattgcattgatgtatgatttgatcaatgatgagcaacactaagcaaagaccgataatgaaactggttatcgtttctcctgttgtaatggggtgtctttgtgtaatgggcttaggcctaactactcatataaatatatcccccacccttggttagggtttgggtcccaaaaaaaaaaaaaaaaaaaaaaaaaaaagagaaa

SEQ ID NO: 16855 - DNA, 616 bp, Zea mays
  unsure (1)..(616): unsure at all n locations
  Clone ID: MRT4577_115368C.1
naaaaccaaatccaagccgccaccatcacttgctcctccctccttcagtcccccactactctttcccccgcacgtccccacgcaagcttgggggaccccccaaattacttccccgcaatccccctccatttactgagcctctggaccagaaggaggaggaagaaaaggaaaaaaattttttttttttatccggggaaaaccaaataatttctttttttgccccgccgggggggggggaaaaattcctggggtttttttttttttttttttgggccccacaaaaggggggccgccctttttttttttttgggctttcccccgttttttgttctttgtttttttttttttttccccccaaaaagacccccccccccataaaatttttttttttttccccacccccccccctatttttttttttttttttcttttcctccccccccctcggattgttgtgttttttttccctctcctcctcgggtggggtggggggagtctttttttttgtttgtaggtncggattctactctttccgctcagggaggtgttttttttttttttttttccttttcccaccctccattaataaaaaaacacacccccctctttctatttt

SEQ ID NO: 16856 - DNA, 283 bp, Zea mays
  unsure (1)..(283): unsure at all n locations
  Clone ID: MRT4577_115369C.1
tacttttattaaacttactatttcgttttttggctaccacgaacaacggttgctggcaccttcattatctatcccttacctttttttcattccatatttttttttcatatatcccattttgtattattaaattctttaaaaattaaggccttgttcttctaacttattaggtatattaagagaacatctatttttacntcnagaatattaactccttcaagaaaattgcaagatccattggataccgcgaggattatctttnnttaattatatattaattctt

SEQ ID NO: 16857 - DNA, 813 bp, Zea mays
  unsure (1)..(813): unsure at all n locations
  Clone ID: MRT4577_11536C.1
gctaactgggaagaagaacttccacttcccctagctttgatagaaaacaaagaaagaaaacagagaagctcacaccatggcaaccaatgggtactccaatggcggcagcaccaagggaaagcccatcaagtgcaaagcggcggtggcgtggggtcccggcgagccgctggtgatgcaggaggtggaggtggcgccgccggcgcgcatggaggtgcgcgtcaaggtcctctacacctccatctgccacaccgacctcagcttctggagaggagagaacgagcgtcaacgcaggttccctcgcatccttggacacgaggcagccggagtggtggagagcgtgggtgaaggcgtggaggacctcgcgccgggagaccacgtcgtccccatcttcaacggggagtgcgggacgtgcgcctactgccactccagcgcgaccaacctgtgcgggacctaccgcgtggacgctttcaagagcaccatggtttccgacgacgggacgaggttctccgtggtaaacacctccggcgacacggtgccggtctaccacttcctcaacacctccaccttcgccgagtacaccgtgctcgacgccgcgtgcgccgtcaagatcaaccccgccgccccgctgcagaagatgtgcctcctcagctgtggtatctcgacaggagtgggagctgcatggaacactgcaaacgtgtccaagggctccaccgtagcaatattcggacttggtgctgtntggtcttgcggttggcgaaggagcaagaataagaggggcgtctcggatcatcggcgtggacatcaccctgaaaa

SEQ ID NO: 16858 - DNA, 352 bp, Zea mays
  Clone ID: MRT4577_115370C.1
ttatgctgttttctctaggtccagccaagctccttactgccgagctccctccccatcacgatcatgcccctggtagtgccgtcccgccctagcggagctttttggaattgtgatattaccaacactggggcttctgaaaatagttccgtttcttattacaacggatccacgggcgctgctctccccgagcgctcctcctctcctcgagcaggaggctgagcgcggttgaggagcctctcttcctcatgccgcccgcacctggagacgccatggacataggggcctccttgccggcgccggagctactggtatgggccagtaggaacctggctctggggagcatctgggtcgg

SEQ ID NO: 16859 - DNA, 323 bp, Zea mays
  unsure (1)..(323): unsure at all n locations
  Clone ID: MRT4577_115371C.1
cgtacgcgtgggcttgcagctagctgacacggccgagaagcagcttgcattgcaggcgtagtacgtacccagcagcagctagcactagcagtccatcggagcgacgatggtgagaaggacagaactggcggcgctgctggtggcctaaagaaacaccggcggtgcgctgtccgttactacgcagggatggaacaccatgtctgtatgctgtcgagagcagtccatttgaatcccccgatgttattttccttgaactgcatgcttctgcaatgctctggnctaccttctgaaaatgtatgttacccagatgcaacatcatgcac

SEQ ID NO: 16860 - DNA, 190 bp, Zea mays
  Clone ID: MRT4577_115372C.1
acgcccacctgtcagcgacggatattggtggtgggctagtcaagtaagctgtaaagccagggagacaagtgcagtgtaatagtattgtcaacgacgcggcgccccaccgacagggtcgtgaatattattcctaaactgcacaaaatagaaattttaaaaacaaaatatttctaataacttttgtagacaa

SEQ ID NO: 16861 - DNA, 365 bp, Zea mays
  Clone ID: MRT4577_115373C.1
gtggtctcattaacaatccagttccggtaactcgcctggagggaaaaaggacacattgggggatggcacagggaatcgcaccatcgtgggacccgtacagcgcaccgcccaaccgccggatctgcgccggcaactcgcccggacgttggatctacgcctccgcatgaggggggaggcggtgctgtggccgatctctgctccagagcgccctgatccgtaccgccggtgagtacccgcgccaactactcggcctgtgatgaatgtctttcgacgggagccacaacacacggtgctagtgcggactcactatatttcttgattttggggacgtgtgtgatcgaaatgagcgcctgcgacccgcaatg

SEQ ID NO: 16862 - DNA, 1860 bp, Zea mays
  Clone ID: MRT4577_115374C.1
gtgaggacacaccacaaggaaagaccattttcacatcatacggtacaacattatatcagatgtttgtcctgttcaccacatccaataatcctgacgtatgggtccctgcttacaagagctctcgttggaacgccctgtttattgttatttatgtgctgttaggagtttatttcctaacaaatttaattcttgctgtcatttatgatagctttaaagagcagcttgcaaaacaacttgctcaaattgactctataaggaaaagtattctacagaaggcatttgatctcatcgatactaacggtcagggctaccttaacaaagaacagtgcatatcgttactggatgagctaaacaagtacaggtcgttgcccaaaacctcgagggaagattttgaactaatcttttccgagcttgatcggagtggtgatttcaaggttacctccgaggaatttgctgacctatgcaatactattgcaataaaattccagaaagaaccaccaccttcatatctggagaagtacccatctttctaccattcaccacagtgtgaaaggttgaagtcctttgtacggagtcgcctctttgagtatattgttgtctttgttcttctggtgaacctaattgctgtcgttattgaaacaacgctagatatagagaacagctcttcacagaaagtgtggcaagaagtggaatttgtctttggatggatctatgttgtggagatggcacttaaaatattttcattaggatttggtgcctattggatggagggtcagaataaatttgattttgtgattacttggactatttttattggagagactctgacatttgctttcccatcaacgcttccttttctttcaaatggagagtggattcgatatcttctccttggaaggatgttgcgtttaacaagaattttgttgcaaattcggcgtttcagagcatttgttgcaacattctttaccctcatgtctagcttgttgccatacttggggaccaggttttgcatactttgtgtatattgctccataggtttacagttttttggtggcatcgtgtacgcaggaaacttgaagttggaagaaacagatctctttgggaacgattatcttcttttcaacttcaatgactacccaagtggtatggttactctgttcaatttgttagtcatgggcaattggcaagtctggatggagagctatgcacacctgactggaagttcttggagcctggtttattttatcagtttttaccttatttcagtattactgctgcttaatctgattgtggcatttgtgttggaggcgttttttgctgagatggaactggagaaagctggagaagctgatacgcaggattctaccccacaaggaagaaacaagcggcgatccatgcgtgcgaggacgaagggtactatggttgacattcttctgcaccatatgttgagcaatgaacttgatggatctcaaaactcggattgattactcatcttaatggtaccagaccactagtactaccctgctgttcttttaacttcgaccacggcttccgttatgaacacctgtctcatctctactctacagcacccaagacttcgattggtaatttatataccatacgtatagcttaaagtgacacaatggatactgacagatgcttatttatctgcaatttcagtcaatatgtataccccctacattttttttgttttgggtgcactactttcaaaattttagtctagtccttgtaaatacacatcgtccttacaaatatgcctagaagtctagagggcttggaagtctctaaacatgtgaataatcaaaattatgcatctatgataagctattattcagtttc

SEQ ID NO: 16863 - DNA, 470 bp, Zea mays
  Clone ID: MRT4577_115375C.1
gattaagtgtaacccatggaatgtcatgggacgggacacatttagctactacagtctacaactgttttgtagacttatataaacagcaaataatggcatcctatgtgaagacagtgtattatatgtattgtatcatagagagccaatgccaaaaaaaaaaaaaaaaaaaaaaaaaaaaaaaaaaaaaaaaaaaaaaaaaaaaaaaaaaaaaaaaaaaaaaaggggggggaaaaaaaaaaatttaattaaaaaaaaaaaaaaaaaaaaaaaaagaccctaaaaaaaaaagttttttgctccctttaggagaaaaaataaaacccggaagcttttaagaaaacccctattttgtctaaataaaaaacttaactgggaagaattgccttacgttaaatacccgcatactaatatggaaaccacttatcccaataaaagtggggaacccaacaaaattttttaaaaggtttttt

SEQ ID NO: 16864 - DNA, 472 bp, Zea mays
  Clone ID: MRT4577_115376C.1
gccggccgggtccagagaatcttcgaagccgcaagccctaaaggaaacgcaagaatcgccgagagatccgaagcgaggtggagagatcgagatggcggacgtggggagcctcgagaggatgggccgggagctcaagtgccccatctgcttgagcctgctcacttcggcggtgtccatcacctgcaatcacatcttctgcaacgcctgcctgacggagtctaagaaatctgcctcctgctgccctgtgtgcaaggttccattccaccggagagaaatacggccagcgcctcacatggataatttggtggccgttttcaaaagtatggaagctgcagcaggtattagtgtcgtgtcaacacagctgactcctgcacccaaagctgcagagtgtggtgagtacactgctggaaagcctagaaggtcgaataaaaagaagctagcatccgaaaaaaaaaaaaaaaaaaggccccta

SEQ ID NO: 16865 - DNA, 385 bp, Zea mays
  Clone ID: MRT4577_115377C.1
cgttgcttcgtcggcgggcttgcctgggccaccagcaacgagtcgctggagaatgccttcggcgtcctggggcgagatcctcgagtgcaaggtcatcaccgaccgggagacggggaggtctcgcggcttcggcttcgctaccttctcctccgagaactccatgctcgacgctatcgagaacatgaacggcaaggagctcgacggccgttacatcaccgttaaccaggcccaatcccgtggcggtggcggtggcggctgtggctactgatggagccgcggtggcccgtggctatcgccgtggtcgccctgaccgtgttcatggcagcggtggcggctacggacgccgccacgtggttgaaggctgttgataccgacgctttggccg

SEQ ID NO: 16866 - DNA, 367 bp, Zea mays
  Clone ID: MRT4577_115378C.1
gccgtgagctctcctcgtcctcagaccaccgtccccgaggcccccctcccgccgaccgccccatccgccgacggggaccaatcctaacccagcgcgctcgcgtctctgccggtatccgctcgctgcccgtcccgatcttctctccggacgcgggccggccctggagctgagtccgtgacggatgccagcgccccgcggttgcgcgcgacgaggccgtggaggtggagggcgccagcagcggaatccagtagccggaccgtgacctgcgtggtgtctggtgctgtagcagtagcagtcgcagcgacagcagcgggaggaaggggagggaggcatgtacgagttcgacagcggcggccggagcgggtac

SEQ ID NO: 16867 - DNA, 471 bp, Zea mays
  Clone ID: MRT4577_115379C.1
ggacatggaacccgggaaacccaacacggaaactatagcacgccagacaagggccagacccgaagcggaacaaggacggacccacccacaggggccgagaaaggaagcactcccaaacctccacggggacgggaaaaaacacgaaaatcaccgggcctcgaaacacgcacagcccggagaccacgggggcggccaccacatcatgagagcgccgggattaccaagccgagcgcaaagaaaccgcgcggggggctcccacggggggctaaagcgcagcgaccccacgggccaaaccgtcaggcccagcgggcggggaccgtaccgcacgacttgaacgatgccaaaccacacgcggaaccccgggagccctaggacggtgcccccgacccacccccaggggggccgcgccccttcgaacccaaagataaaccgtccgtacgacaggcaatgtgatgggagaagtaacccaac

SEQ ID NO: 16868 - DNA, 574 bp, Zea mays
  Clone ID: MRT4577_11537C.1
acccgtcccaacaataccagaggatggttacacactaatagcgctttttggcataaaggatccagtccgtcccggtgtgagggatgcagtgatgacctgcatggctgctggaattaaagttacaatggtgactggagacaacatcaatactgctaaagccattgccaaggaatgtgggatattaaccgaggatggaatcgcaatagaaggaagagagcttcacgataagagcacggatgaactgaaggagatcctgcctaaaattcaggtaatggcccggtccttgccgatggacaaatataaactggtgacaagcctaaaaagtatgtatcaagaggtggtggcagttactggtgatggaaccaatgatgccccagcattgagtgagtcagacataggtctggccatgggaattgccggcactgaggtcgcaaaagaaaatgccgatgttataataatggatgataatttcagtaccattgtaaatgttgctagatggggtcgtgcggtttacttgaacattcagaagtttgtgcagttccagcttactagttatatagtggctctgatagtg

SEQ ID NO: 16869 - DNA, 347 bp, Zea mays
  unsure (1)..(347): unsure at all n locations
  Clone ID: MRT4577_115381C.1
aaaaccccgggtttgtggggttttttttttcattatttttggttttttttttttttttttttgttttttcccctttgtttgggaaccggtttccttcctgcatggacagtcgctgagtgagggcggggagggtgtttttttttttttttcccccgcctttggggggggggggggcgccctttttccgnnccccggcccctctttccgtggggggggggcgggccctgccgtcgccggggtccattgcgaccccgccttggctgtgttgcctctaaaaacagggttaccggtggcgccgggcccgccctttggctttttgacctgggcgtgggccaaggaagggggcc

SEQ ID NO: 16870 - DNA, 288 bp, Zea mays
  unsure (1)..(288): unsure at all n locations
  Clone ID: MRT4577_115382C.1
aataaatggggatggcatatcccgcgtgggtaaatgtaaatgccaggtcatcaaaattcatgcgcgccatctagacgaacagagaaaaaatatattgatattgttatttttaggcatgatgcatgttattatattcctattatattcacaacatgtgtgaaaatggtactaatatgagctatgtattagtagtagtacacatattggtttcacaataaaaataccanaattttgtgagccacggtaatgttcatcgacatttaagtaaggcggtgaaaattagctaac

SEQ ID NO: 16871 - DNA, 379 bp, Zea mays
  Clone ID: MRT4577_115383C.1
ggggccagcccctgcccggaaattttcaaaagacaatccttgggatttttgggaaaaaaccccgcttacattgggacctttgggaataaaaaaccgtaaaaaggtctgaaacttcgtaagggattgttcggtaaacctaaaccttttgggaaaaaagaatttctggttggcaaacacccacacaaacaggaaggaaaatgctaattccacgcagggaactgggggggggggggaaaaagatgggttctaacacccacacacaccagaaggaaaatgcaattactccccatggaacttgggtgggtggtggaaaaaatgtgtgtctaacaacccccccctaagattggaaatcatctatctccactcagggattttggtg

SEQ ID NO: 16872 - DNA, 526 bp, Zea mays
  Clone ID: MRT4577_115384C.1
tttttcattctttttgtttgagttttagaaaacaataaaggtttttttagtcatggtagattttttctccacaaaaaatgctttaagctcaaatggggggggggggcctgcgtttttaaccaaattaaaccaaggttccagcccgagcccggactaaagcaaaaacgggggttaaataaggttaaaccgcgacccccccccccccaatagggggaaaagacgggcccaggggaaaaaagaatcccttggttaaaaaaccttttttgttttttcacctcaacaaaaaagggaaaactggaccgcttaaaagtaaccctttaaaaaagaaaaagggccccacctttttggctgagggatataaaaaaagacccaatttcaaccaggcaattgtgggggggacgggttttaaatttaaaacggccctttaatttgcccgggactggccggacaaaaacaaaaggataatgccccccataaaaccataagggggaggtgcttcaacaaaaataagggtggggattatgcc

SEQ ID NO: 16873 - DNA, 439 bp, Zea mays
  Clone ID: MRT4577_115385C.1
aaccaccagagcttgtcttattggtatatggattctttcacaacctgaggaccccagggggagcgccttgacccacaacacattgttccggagcccaaggaaaaacgttcacaaacaagacccccagctggaaatatcatcacgagtactttaaacatgcatactacgcaccgctaagggggtttggggcttccaagatccaggaccgccaccgataaaaggcatacgccttagatttgcagccgggggaaaatattccccctggatcacgcaaaatatcctcccccagggccggaacaccatcccccgagggggctacacccgaatgggtttgaaaatgatccacaaatggttttccttgaggagcttccatctttcggagggggaacctaatgggccatccccactagtgaaagaagcgaccgcgggaaaatttccc

SEQ ID NO: 16874 - DNA, 271 bp, Zea mays
  Clone ID: MRT4577_115386C.1
atagaagtacagtctttaaaacaaccatacctgaagaagaggaggaggaggaagaagcagttggagtggttgttgaggaagaacttttccaccagcagggaaccctaagagcatccaatagaagctgtgcaattatgtaaaattttcaactgtcttcctcaaaataaagaagtatggtaatccttacctgtatacagtgcagagccttctcagaagcacagaatatttttatatttcctttatgtgaatttttaagctgcaaatctgatgg

SEQ ID NO: 16875 - DNA, 343 bp, Zea mays
  Clone ID: MRT4577_115387C.1
ggagcgcatcaagaagaccaaggatgagaagaaggcaaagaaggcggaggtgaccaagtcccagaagtcgcagtcgaagggcgcggttcagaagggttccaagggccccaagctgggcggcggcggcggcaagcgctgaaagaactgaagatgtcatttgctgctgaccttgcaatcgctcctcattagcctacctaccttgtttctccagagccagttttgtagtacctgtacctgggttaaatttgcagttcctttcaccgttgctttgtgggtgttaaataccgtgacgagaaaatggatttatctttgtgttgcaaaaaatgatggtcgttcatgtgct

SEQ ID NO: 16876 - DNA, 369 bp, Zea mays
  Clone ID: MRT4577_115388C.1
atatgcttgacctttcgagagcaaaacaaagatagttaaaccttatcaggtattgatgacattacaaatacagcgaaccaaacagcaccctagtcctaacgagttcccttgcttccctctctagctcctggaaaccaacatggagtagggggaagactagtagagtcaacgagacagacaaatcagccttagcgtatgcaccaagaggggggtgcgggtcagccacctgaccgaggggacctcgaaactgatgagggtctgtctgggcggactggaactggaatttcagctcagaccgcagttgactaccgaatttgcattgccatagctttggacacaagagtctgaattccaggatatgcatatttg

SEQ ID NO: 16877 - DNA, 861 bp, Zea mays
  Clone ID: MRT4577_115389C.1
agtgcgcaaaagaggaatttctttgggctgggtctaataaaccctaatgggctgcggcctcgtagataaaccagcactactcatccgtcgccccacggaagtttcggcggcgccggcgtgctcgtgatctcaaccaaggcgtgcctccgctccggtcacccgtcgctccacgcaaccatgtcgaggaggaagaccagggagcccaaggaggagaacgtcacccttggacccactgtccgtgaaggagagtatgtctttggtgtcgctcacatctttgcatccttcaatgacaccttcattcatatcactgatttgtctgggagggaaactctggttcggatcaccggtggcatgaaggtgaaggctgaccgtgacgagtcgtcaccttacgctgctatgcttgctgctcaagacgtcgcacagcgctgcaaggagcttggcattactgcactgcacattaagcttcgtgccaccggaggcaacaagaccaagacccccggacctggtgcccagtctgccctcagggcgcttgctcgttctgggatgaaaatcggacgcattgaggacgttaccccggtccccacggacagcactcgcagaaagggcggtaggaggggaaggaggctgtaggcatctctggcggctcttggcggcatgaagctagtcctctctgggtggtgttgctgttttctgtgtttgtcaagacgagctttaattttgctctatgtggatgaccgtttacagttactcgagcctatatgatgttgcatggataatgttttttggctgaggaattggctcgtcatatttatatatgcattttcactctctataaacgtgtactagagtaaccttccgttt

SEQ ID NO: 16878 - DNA, 1134 bp, Zea mays
  Clone ID: MRT4577_11538C.1
caagatcaagaataatccagcgccacacgggatcgacctagtacatagatacaacaagtcaacaacgtactaactagcccaccatggcgtcacgcctcgccgccgcccttctcctcgccgtcgtcgccctgctgacgtccgtggcgccgctggcgtgcggccaggcagcgtcggcgccgtccccagcccccgcgccgcccaagaccatcacggcgatcctgagcaaggccgggcagttcaccaagttcctccagctgctgcagtcgacgcgggaggcggagcagatcaccaaccagctcaagggcaagccgtccaacggcgggctcacggtgttcgcgccgcccgacagcgccttctccgcgctccccgccggcacgctcaactccctctccgaccagcagaagacgtcgctggtgcagttccacgtcgtgtccgcggcgctccccgccgcgcagctcgagaccgtcagcaacccgctgcggacgcaggctggcgacaccggcaggggcaagtacccgctcaacctcaccgcggacggctccagcgtcaacgtctccacgggggtcgtcaacgccacgctcgacgccacgccgctttacgccggggacaggctcgtcgtctaccaggtcagcaaggtgctgctgccgtgggcgctctacggcccgccggtccccgcgccggccccttccccggcggagagcaagaagaagaagaaggccacgccggatgctgtggcggatgcgccggcggctgagactgcggcggggacgacgacggcgtcggcgaccgcgcgcgcgggagggaccccagctggcgtccgagctgcttcgtcctgcgtcgtggcgctcgccgccgtggcagctttgtggtgggctatctgaccacgtacagtacagtaaggatgcatgcgtgttttgccatcgtggagcttctttccggacagatttgtttctaattcatcaatcgaccagttcattattcttttcttcgttttataaaaaaagatgtattgtggatgtatttggtggcgttttgtaatgtttgtattgtatactttgaagaactgtacatcatattttgtggacgtatattgttatccaattgtattaatgtggacattatttgcttagggct

SEQ ID NO: 16879 - DNA, 787 bp, Zea mays
  Clone ID: MRT4577_115390C.1
tcttaaaatcctcaataacaactgacgccggcccacggcttcaaatagctgcagattgcagcccatcatcaagaaaccaacaccgtaccgtaccgcagctctccgtcgccccaccgccacctgcaagatgagtccgtggtggaagcccctcttgctggccaccgcggccctcgccgcgctcctcgcggccgacgctaccgtggatacgacgtgcaaggcggcagccgccacggacgaccgcgtcgactacggcttctgcgtgtcggagctgagcaagcaccgcgacagccctggcgcggacgcctggggcctggccaaggtggcggccaacctcggcgtcaacaacgccggcggcgcggtccgcgacgcggaggcgctgctggccggctcgccgggcgcgggcgcgggcgcggacggcgccaaggcgagggcggcgctggggcagtgccgcaggctctacttcgacatggagctcgcgctcgcgggcgcgtacgacgagatcgacgcgcgcgagtacgcggcggggaaggagatggccgtggagggcatcgcgttggcgcggcgctgcgacgccgtcttcgccgaggccgggatgccgtcgctgctcgcgcggcgcgcggagtacgcccagcagatcacggtcttgtgcattgccatcaccgacctcatcgagtgatggtgcgttcttcagttgtgtagcaaataataattggtacgatatgtgaagagtcaacaaggcgtgatttctttgaataacagtccaggtttctagaaattggttccttga

SEQ ID NO: 16880 - DNA, 834 bp, Zea mays
  Clone ID: MRT4577_115391C.1
aaacagcaccactcatccgtcgccgcacggaagtttcggcggcgccggcgtgctcgtgatctcaacccaaggcgtgcctccgctccggtcacccgtcactccacgcaaccatgtcgaggaggaagaccagggagcccaaggaggagaacgtcacccttggacccactgtccgtgaaggagagtatgtctttggtgtcgctcacatctttgcatccttcaatgacaccttcattcatatcactgatttgtctgggagggaaactctggttcggatcaccggtggcatgaaggtgaaggctgaccgtgacgagtcgtcaccttacgctgctatgcttgctgctcaagacgtcgcacagcgctgcaaggagcttggcattactgcactgcacattaagcttcgcgccaccggaggcaacaagaccaagacccctggacctggtgcccagtctgccctcagggcgcttgctcgttccggaatgaaaatcggacgcattgaggacgttaccccggtccccactgacagcactcgcagaaagggcggtaggaggggaaggaggctgtaggctctgcgtgccatttgccggctcttggcgggtggccattatgaagttagccctctctgggtggtgttgctgttttctgtgtttgtcaagacgagctttaattttgctctatgtggatgaccgtttaccgttactcgaacctatatgatgttgcatggataatgttttttggctgaggaattggctcgtcatgtttatgtatgcattttcactctatctataaagtgtactagagtaatcttccgtaaaaaaaaaaaaaaaaaacaaacac

SEQ ID NO: 16881 - DNA, 170 bp, Zea mays
  Clone ID: MRT4577_115392C.1
atcgaacccacgctagacgactgcaacccatgggcgaaccaactgaccgattaaccgaccaaggtgtatcctcgtctacgatatcttcctaggacaaagccggggccgttaagctggacgcaggggacgcaccggccagcactcatgaacggcataaaacgcaacggctg

SEQ ID NO: 16882 - DNA, 492 bp, Zea mays
  Clone ID: MRT4577_115393C.1
ttttttttttttttttttttttttttttttttttttttttttttttttttttttttttttttttttttttttttttttttttttttttttttttttttttaaaaaaaggaagggccccgcccctcgagggatggttcaacccccggaggacaaaccaggcgttggggcttatttaaaatcgcccctttacagggggcccccttggactttgttggggggccccccatggataatgaccatccccgggggggggcaactcccccccccctacattttaaaaaaggggggtccaaaaaaaacccccttgttcactcaagggggggacaaacaaagggagggttctgggggaagaccaaattgccggggttgctaaaaaaataagttcccgggaacaaatttgggggcttatccccagcctttgttggcaacggggccggaaactgggcaaaaaaggttctaaagggggcccttgccgggaacgagggcctccac

SEQ ID NO: 16883 - DNA, 191 bp, Zea mays
  Clone ID: MRT4577_115394C.1
gttcttttcagcaactacaaacaacatggtcaccacaatttatatagccggaacgaaggccaagactacacatcacccaaccaaggtgatcagaaatgccaacgagaatcagaacaccaacaacaccatcgaagtgcagggtaataaataccacagggcgcgtgtatgctacaagcagacgcagtgcccaa

SEQ ID NO: 16884 - DNA, 166 bp, Zea mays
  Clone ID: MRT4577_115395C.1
tcgcaatcttaaaaccactttattcaagcttttatttcacaccggggatggatctcagtggggggggatatattacatgcttgtgcgtccaaccgaggagaatgtagttatatacgagattcatccatactcgtagaaacatacactatataatcatggcacacac

SEQ ID NO: 16885 - DNA, 1057 bp, Zea mays
  unsure (1)..(1057): unsure at all n locations
  Clone ID: MRT4577_115396C.1
actccccgcgcccgcgccgttcccgacggcggctgcgtgggcggtcgccgcgctgctcgcggtgggcctcggggtcggcgccctcgtcctcgccgtcgtgcgcagcccggcgctgctcgtggtggcggtcctcctcgcggcgtccgtggcggcgttcctcctgtggaatgccgcggccgcggcgtcgggccacgcgctgcgccggttcgtggacgggctccaggcctccagcctccgcgttgcggccgatggccagctcgtcaagatcaccggatttgtttcatgcggcgacatttcactgatatcttcatacgaccacgcgtccgattgtgtatacacatctactattttgagaaaatgtgctagatggggttccatgacactaaatccttggaatcgatgttccaagtggaaattagcacatgccgagaggttcgctgctgatttctacgtagcggatgcaaaatcaggtaggagggccttggtgaaagctgggcaccactcaaaggtcgtgccgctgatcgacgagaacctcctggtgacaacaagcaggggcaccgagttatcttccactctagagcactggctcgaagaaaggaacctttcttccgaagaagcccaggttatccgtctagaggaagggtatatcagagaagggatgcggttgagcgtggttggagtgctgagcaagaataagaacggggatgccgtgatacttcctccgctggagcctcaatcgacgggctttgtgttgctgtcgtgtctcctcccgtcatatttcgacgggatagtgctgagactggccgccgtgccgaactcgggcgtctcatgaagagctgctgtgtgggtaggggagctcggtgagatgtaacagctaacaacaactcttgtgcggtgcccttgcccccttgggatctttttcatgtacgggtccaccttcacctttttctttttgtttgcttctgggactcgatcatgtatgtggttttcttttcaggtaatcctaatgtacattctcactatatcatcagttgtaagtgcgaggcattncagcgct

SEQ ID NO: 16886 - DNA, 249 bp, Zea mays
  Clone ID: MRT4577_115397C.1
tccgttcaccccgtccatttgatttgctgttcactgcgttgcgtttccggggaggggattgttctctcctctcctttggattggaggtccctacttcttctcctctctctctctcagaggaaggcctgaggatccaggaagaggacaggaatgggggaaggtgcaggagaacgtgtgctgagaagggtgcataatgccactggggggggggggggcttattttctgaagaccataaagagctcgtgggg

SEQ ID NO: 16887 - DNA, 262 bp, Zea mays
  Clone ID: MRT4577_115398C.1
aacatttctgcacttttcatttacttctcttctttgacaaaaatggtattcgagtttgtaccgtgtccactaatgatcacttagagtcgtaatcatagaatcttacggcatgttagaactttgtgatcactgagaagcttaatcagtctgttacgtgttcataaagcttatgacatgtttcgaaatggcagcttcatgtggaagaggtcacagacagatttgttatcacttaaacataaaggtgtaatgtctatgtcaaaaa

SEQ ID NO: 16888 - DNA, 333 bp, Zea mays
  Clone ID: MRT4577_115399C.1
caatggatggtatctagtatagaattttcacaacagtaatcagatagtgattggcagctgtatggcctcatcattcaaaagacaaaagagcatgataattcacaggctaaaccatctgggaacgacaaaaaggaaatactcgcacaatcagctcccaacaatacgggagctgggcctacgcaatggtacgtacggatatgtgcctagcttgtgtgatcacagaatcctattgtgcttcctggggggccggctcaccacctttagtggaatctgcttgggaccgctagcttttccccttgtggatcctatctttcctgcccatctcttcatcca

SEQ ID NO: 16889 - DNA, 206 bp, Zea mays
  Clone ID: MRT4577_11539C.1
ttttatttttttttgttttttttttttttttttttttggaccaatagaggtggcccaaaagggaatacttaaagtcctggggagaagttacggttcaaaaatgtcagatgttttttcttggggacccaacacggaaaagcttattgttttcatacgcaaaagatgaccatcggttaaatgccgtaaccctggaagaactcattacc

SEQ ID NO: 16890 - DNA, 1190 bp, Zea mays
  Clone ID: MRT4577_1153C.1
gggattagtccctacaaaccaaacaccataatccaacctatatatcacatttagcacacagaatacgtctctaatataaatttttgacgtgtagaggacacccaggagacaggctacctaaacctcgcttatataagctgaggtactcagtcgggaggggcggtggcattgcatctgagaaattagttactcgatcactgtagtgatattattactgaactccaaataagcaatgtcgacaatttcgacatccctcggcctgctaatccgtccgccaagatcatcagctggtacgccgtcctttgggtctctcaaaccagtagtggtgactctcccttgcgctcctgctgagaagaagcggcctcgatccatctgttactctgtggatgccaaggctaacgaccatgccttcaacatctctcccgttgcccttgtgcatcccaacatgccgccaacgtcgacgccgcgatgggagatcaaggaagatggcaaggaagtcaggctgacattcttcaacttgtcggagggtgctacaacgggcgacttccaggttgccgtggaggacgatgtgctcatcatcaagagcacgaagcccaagccccctgcagctgaggaacagaggcaaaaggaagcccccgtcgacagcgtctcgttccacgtccggctactggtgcccaagggatacgacaaagagaacgtgcgtgcccaactgcagctccgggcgctggttgtcaccatccccaaggttaatccttcattcaccaaggaggttgacatcgacgacggaaaataggaacgaacacttcagtttctgtattttgtgtttaccatgggtcatatcgttgtatcccagctgtggtagtaattatgtggacgcatttttgcgtcaaaataaccatggcttagcagcgaaatatctattgcgggcaccacagcaaaataaaaacttttcgtgagtcaaaatatataatttctgtaattttttttgaaggtaaggcttactttaggaggtccctatagtatttttttttatttcagacagagttcacagaatttacgggccccccaatgcgggggaaaggggggagagatttacaatgtttgtatgcattgtgtgacattctcggcttaagtctctcatatcttgtatgtgttgaggagcaactcttttataaacatggccttacatg

SEQ ID NO: 16891 - DNA, 356 bp, Zea mays
  Clone ID: MRT4577_115400C.1
gctcgatcctaacttctctttcaaaaagggcatcgcccatgggcatggccacgcaagcctgcggcttcacgcacggcctgctggccgcacactgtgcgccggcggtgaaaccgcggcagctgagctcgcaactcgcgctgccgtcaacgtactaccgcgagccggcccctctccgcacgtccaccgacgacgctctggaggcgcctaaggagttcgtggccccgcagctggaccccagcacgccgtacccgatcttcggcggcagcacgggcggtctgctccgcaaggcgcacgtggaggagttctacgtcatcacgtggacgtcccccaaggagcaggtgttcgagatgcccacc

SEQ ID NO: 16892 - DNA, 462 bp, Zea mays
  Clone ID: MRT4577_115401C.1
cccccaggatttaaggaaattaaaaaaggggctttggaatttaaaaaacaaaccctttttttttggtcgaccaaacccccatgggggaaagggcggttggggcctcccggaaaaccaacccgttaaaaacttcaaatttttttaaaacaaacgggggcccaaaaaaggcttgaccccccagttggctaacgggccccttttttctttggaaattgggggcattttgcagccaaaacccctggccctaatccggaaaaaatgggggacaaccttttaatttgaaacaaaaaaaccaaaaaattttttaaactgaaaaaccccccgccttaaaattcccccccaggaaagggcccccccttttggcccaaaagagcggaaaaagcacttgccaccccctgccaaaacttgggggggcggaacccgggcaccaccctaaaggaccttggaaagtctttttgttgg

SEQ ID NO: 16893 - DNA, 407 bp, Zea mays
  Clone ID: MRT4577_115402C.1
gggtacctcgaggccggccgggccgggttcaacaaggggcgatgccccgtcggtttccccccgccgcgcgaagcaaggatcccccgcagcggcggcaacccggcgtggtcgtcgacgtccacctgctcctcgccgcggactctcccggagcgcgccagggtaagaaggacgagacccgcgactgccaccagacgtccttctggaagggcggtcggacccgagccccacactcgcttgacgggccgttctacctcggcgacagattcgtgaacaactccccctacggatatatctccgctgaggtctgccaccggaacagctgtgggcctcccatccgatgacgccctgggcaacagtgaagcgggccacaatgcactaggagctgggagaatttccgcccaacgtgc

SEQ ID NO: 16894 - DNA, 240 bp, Zea mays
  Clone ID: MRT4577_115403C.1
gtcggggagggggggggtaacccgagagaccaggacccgtccctttaagggaaccagtttttcctatatggaatcagttaaaagcttagatgaacacgcgggcaaacgggggctcccgggaaaaatagctgccccattcacaatcccccaaacatactaaccggatggataaatgtgtaaagcgggggggcccaaaaagagaccccaccacacttgatcgggggggcccaccccgccccc

SEQ ID NO: 16895 - DNA, 328 bp, Zea mays
  Clone ID: MRT4577_115404C.1
ctttattatcggtttttcctggtttgttttgaaaaaatctatcccgatacacctataaggagggttcaggaaccagtccaggtgtttttaccttcatgtacaacatttcctttccaagcaggatttgaacggttcttattatccacctaaaagtaacaagatccacactgtactttgggaaaacgtgtatactattaccaccgtattccatgtcatgctttattgtgcttatagtgtgaatggcttgccaaactacagaaggggacgatttatatctaggtggagactacaaatcgttcactaacaagtaacgctggaattgcctcac

SEQ ID NO: 16896 - DNA, 337 bp, Zea mays
  unsure (1)..(337): unsure at all n locations
  Clone ID: MRT4577_115405C.1
anntannntttttttagctacgttccctttttaggggggggttttactgggggtgtgggcacttttttcttttttttttttttttttgggggggggaatcggcgactcaaacttttttccaaatttatccttttccggaaccggaggggcgggggcggccccatgactggcttgcttccaaaagcctaaccggggctgttttacatgacatcccaagaaataaaccccgcggaattttttggggccgaaaaggacctgaaacaccttttgctaaagggcttagggttttcccattttaaaaactgaaaccggttttttttttaagaaaattttcaat

SEQ ID NO: 16897 - DNA, 296 bp, Zea mays
  Clone ID: MRT4577_115407C.1
gagagaagaagccggccaccttccttgtttatgaagttggggggaatattggtccacatcgcctggacccagatgcctacctcttggatttataccgtgccaacccccatggcgaatgggtcattagacagagccccacctaagaaacagcctgggagcagagctgttcacatggaaagaccagttctttcaaagtcccccttccaggaaatacctcttctatggccaacagcacagagccggcctgcacttcgccacatacggagagctctggaggataccacacgggtacctgc

SEQ ID NO: 16898 - DNA, 1417 bp, Zea mays
  Clone ID: MRT4577_115408C.1
cgattgggtacctcgaggccggccgggcccatctccggcctcacaccgcaaccgcaagcaagcgaagcgcagagcctgcctgaccagagctagctgagtgcaacagccaacagcagctggtctgactgacatggcgaaggacatcgaggcatcggggcccgaggcgggcgagttctcggccaaggactacaccgaccctccgccggcgccgctggtcgacgcggaggagctcacccagtggtccctgtaccgcgcggtcatcgccgagttcatcgccacgctgctcttcctctacatcaccgtggccaccgtgatcgggtacaagcaccagacggacgcgtcggcgtcgggccccgacgcggcgtgcggcggcgtcggcatcctcggcatcgcgtgggccttcggcggcatgatcttcatcctcgtctactgcaccgccggcatctcaggtatacggacgtacggtgcgcgcggtggccgctcgccgccgttgcacgcagcgtgtgcgcgtctgcgtgtttatttatgtcatgtcagtgtgtgtcactgacacgtagatgcatgcgcgtgcaggtgggcacatcaacccggccgtgaccttcggcctgttcctggccaggaaggtgtccctcgtccgcgcgctgctctacatcatcgcgcagtgcctgggcgccatcctgcggcgtgggcctcgtcaagggcttccagagcgcctactacgtgcgctacggcggcggcgccaacgagctcagcgacggctactccaagggcaccggcctcgccgccgagatcatcgggcacgttcgtgctcgtctacaccgtcttctccgccaccgaccccaagcgcagtgcccgtgactcccacgttccggtgctagctcctctcccaattgggttcgccgtgttcatggtgcacctggccaccatccccatcaccggcaccggcatcaacccggcgaggagcctgggagccgcggtcatctacaacaaggacaaggcctgggacgaccaatggatcttctgggtgggcccactgattggcgccgccatcgccgccgcctaccaccagtacgtgctgagggccagcgccaccaagctcgggtcctaccggagcaacgcctaagttccgcccggacgcgccaggagctgggcaccgttccgattctgttcctccacatgacgccctgttctgtttccgtgtggccaggactccgcttgcttcctgctgttttctacttcggaccaaagtgtgacatatctttgctttctgtatatgtatgtaggaatgcatcatgtaaggagaatttggaatacaattgtgtgagtttttatccgatcacaatctattgagtagtggcatataaaaaaaaatatcctgccctttcgaaaaaaaaaaaaaaaaaaggcccctagggcc

SEQ ID NO: 16899 - DNA, 492 bp, Zea mays
  Clone ID: MRT4577_115409C.1
atttctttcttttttagttttttatttgcttgctttgatactcaccattgctgtttccgtattggtacagtcgttttattatttactaatatatacttatatagcacacgagcgccacccgtcctttttttccctggcactgaggtacaggacaggtggctaagagccaccctcagggttgggggggggtacttgtggaacccccacgtcactcaaatcccaaatgtttccagcccccgcccggaagaggatcccattcattgaagccacctacgcccaaggctgaccgctccaaattgttattgccccgcctggggattcccttgggggacacgacctgcctaaaacccaaatacttcagttaactgaacaacatcttctcattgcgaacatccagctgggacagggcacgtaccacagcactaacaggtggaggcacaccaacagaccctgatgcaagctcaagggcaagtgcaagaacacatactgggg

SEQ ID NO: 16900 - DNA, 220 bp, Zea mays
  Clone ID: MRT4577_11540C.1
caccgacagacaacatggccgcatccgcatccaccgtctccggactcgccggcacctccctggccagcagcccggcgttctccaccagcatcacgcggggcagcagggtgtcggcgaagaaccccctgatgagcaggaacctgaagaggaatggcaggatcacctgcatgacgtttcaccgggactggctgcggagggacctgagcgtcatcggcttcgg

SEQ ID NO: 16901 - DNA, 316 bp, Zea mays
  Clone ID: MRT4577_115410C.1
cacatcttgctccgggccttgctttaaagcggtacttactatttagtgcttcgtcctctcacaaatctcatctctgctctcgctgttctcgcgactgttaggtaaaataggaaaagaagagatggataaagtcttcatttgttcgatatttcgttcgcattcagtcatcttcgtatcggtgcaggcgcaggctgctgctgctggcggctgctgcgggtttcagagcccagagagcagaggtatcagcatgagcggcggcggctcgctgcccgccctttccggacctgcctgctccagatcattgtccatcagcgag

SEQ ID NO: 16902 - DNA, 492 bp, Zea mays
  unsure (1)..(492): unsure at all n locations
  Clone ID: MRT4577_115411C.1
ttatttttttttttntttgcacaatacagatttaatatattgctggccataatgagcataatgagcagccgaacagctgaaccagctgtagacatgccaaaaacaaaaatcatgcaggggaatatagcataacaagagacaacaccacagtataaagactcgagtgggacatagcctaaacttctagtggatcatcaactaaatgcagttttttccaatactttgcttcctaataatgtcaatatcgaagctgctaagacatctcatttcttagccaaatcaaagttgattcttgatctgcttcacaagcacatatgaaagtttctctattctctttgctcttggcgaagattgaatatgcttttgccttctccaatttggtcacttcttctattgggttcataactaatatgcacattttgatggagaaatcatcactttgagttacctccatttctcttgcctccttttctcttgcttccttttctcttg

SEQ ID NO: 16903 - DNA, 238 bp, Zea mays
  Clone ID: MRT4577_115412C.1
cagacgcgtgggcggattcacggtcacggtcgaggtcgaggtggaagaaacggtgccgcgctcgcggcgagagactgggaggaggaaggagcctctcgacccgattcttcgcccatcgcctcgccgccccgatccagttggtggcctatggcgggcgagggcgaggacgaagcggcggcgattgagcggcagctggagcagcagctgcaggagcagcggtcctccctcgcagcggtcg

SEQ ID NO: 16904 - DNA, 582 bp, Zea mays
  Clone ID: MRT4577_115413C.1
cacgcctgcggaaccgggccgctattacacggtcgacctcagcgttcgtactagcaacaaaaaagccataatgtaccaacagtggcaagacaaaatacaaaagatttcttatgctgattggaatttatgaacgagctgatacacgacaccaatcaaccacgagtgctcacaagactaactatagctggctttgtaaacccagacctctgacacagcagcgattgtagcatgtgaaaaacgaagccttcaaccctaccagatccaacaggcaaccgcaacaagcgttgtacctttaagaacgtagcagcttcacatacacgctagccctattacaggaggtacctgttggtcatttgatgacacaaaacattaaaggacaacaactacaacaacttgagctatgaaaccttgctggctactcttagcaacatgaatggcttccattgaaccaactgactgcattgaactatgctgctcatttgcaacaacaaaaaaaactgcagtcagctaagatgatgcctaccggcagcaatattacaacattcaaccaactgggagccttgaactctggtgcttacttac

SEQ ID NO: 16905 - DNA, 438 bp, Zea mays
  Clone ID: MRT4577_115414C.1
ggcaaagggagttccaactgggtacctgttttttggtagtttgcatcaattacgtcgggggacatcaaaatcgaatacactgggactgaaaaggaaaaaaaaacgggggaaaaaaaaaaaaaaattcgttggtcgacgtaaccttaaactacgtgttttggaaaaaaaaatgggggtggaatgcttttttaaaccaaagggaataccaatctgtcacccttatatgtacattttattggtcacaaactggaaaaatggaaccgtacttcaattaaacaaccgggaaaaactttttgcctttaaaaaaaggctttgattgctcacccactttttaaaaaaatagctttcgcaacggaagctggccattggagggcaccctaacctgggtgtccaaaaaaaactgtcctcgtccttaaaaaacctttgaggatgcccttt

SEQ ID NO: 16906 - DNA, 234 bp, Zea mays
  Clone ID: MRT4577_115415C.1
cgcactctattgtacggccataagcccccttagtgacgggggcgctgtgccagatctagcggaggcggaggcggtacctgtactcacgcccgccaagtgtttgatgagaggcctcaaccttacccactacaagatgtgcaaccatggctactactacggaccatactctttcaccactatccactcggtttttatgctgctcgacgacgctgtggccacccgactcgactggca

SEQ ID NO: 16907 - DNA, 187 bp, Zea mays
  unsure (1)..(187): unsure at all n locations
  Clone ID: MRT4577_115416C.1
gccgttccgaccagattgcgaggagccacgtgcaccacttcggggttcttacgggtttccaccaccaaaaaccncaccatgcacctagcatagcacggctcgttgtagaaaaacaaactgttagggaccaagtgcgaggactgttcgctctactgcaggacagaaccgaacccaaaaaaaaaggcac

SEQ ID NO: 16908 - DNA, 1759 bp, Zea mays
  Clone ID: MRT4577_115417C.1
gcgagttgcgcctctcgccctcacccccacccccagtcccccgcaggcgcaccaccgaaactgctccgcctccacgcccgctcgccctgaccacggcgatggccgccgccgccctccgctcttccgcgcgccggctcctgcgcctcgccccggcagcctcgtcggctctgtccgctggttcccggcccagcgccggggctgcgccgatcacgcgccccatacacacaaggtggcaacgatcctatctcatggaaactgaggcggttctacagttcaattgaataacacttgcccgcaatatctcgtcccgcgacaatccttaccattaaggattttgcgtcggcgccctccgcttctacgtacgccggttcctgcgtctcaccccggcagcctcgtcggctctgttcgccgctttccgcgcaccgccagggttgcaccgctctatcgggacctcgacgcgcccggggtgaggacgcattgggcctcgagcggccgggattcttctcgtacgcgatcgattgcgagttgcgcccctcgccctcgccccccactcgcccagtccctcgcaggcgcaccaccgaaactgctccgcctccacgcccgctcgcactgaccacggcgatggccgccgccgccctccgctcctccgcgcgccggctcctgcgcctcgccccggcagcctcgtcggctctgtccgctggttcccggcccaccgccggggctgcgccgctcacgcgccccatcgccgcgctctcaggtggcaacaatcctatctcatggaaactgagacggttctacagttcaaatgaaaaacacttgcccgcaatatctgatccagaaatagaatctgcatttaaggatttgttggctgctagttggaatgaacttccagattctcttgtagcggaagcaaagaaagcagcatctaaagccaccgatgatagtgctggtcaagaggctttgaaaaatgtatttcgtgcagctgaggcatgtgaagaatttagtggaactttggttaccctaagaatggctcttgatgatctttgtggcctgactggcgaaaatgtgggtcccttacctggttatattgaagatgctgttaaagctgcatataatcgctacatgacatatctggagtcctttggtcctgaggaaaactatctaagaaagaaggtggagactgagttggggacaaaaatgatacacctcaaaatgcgatgcagtggcataggttctgagtggggaaagatctccctgattggcacctcagggatctcaggttcctatgttgagctaagggcatgatgggacgtctgcaggtaaccatggaaatcatcgatgagctgaggaagtctgtagatcagaatatgccagtactgcattttcctttcccctttctagctagcatggcaataacaatgagatcatcaaacagcggcgcggtttaaggaacttcagatactcccggcccttgtgtctgtgtctttgtctgtaataagaacgtgtatatgcgtgaaacctatcagttctgttattttttggcatgcgcctgacttcttgttcaactggtgtgagttgtatgctttgttcatgaagcactgatcaatgatcatatgccttcgcccgcaaaaaaaaaaaaaaaagcactgcaaaaaaacagggacctgccctttttttaaaaaaaaaaaaaagaaaaaaaaaaaaaaaaaaaaaaaaaaaaaaaaaaaaaaaaaaaactcgaagagggggcgccggtacc

SEQ ID NO: 16909 - DNA, 1199 bp, Zea mays
  Clone ID: MRT4577_115418C.1
cattgggtacctcgaggccggccgggggctcggtttggccgttccattccgttccgctctcccgagtctcctcccctcgacccctcccattcctctacgcggctgggcgcgactctcggcccgcccaccccacacacacacacacacacacacacacacacggacacgcaccgaaactgccccgcctccgcagcacactcgtcctcccagcgccgcctcggggacgtcccggtccgcgacatccctgaccacggcgatggccgccgccgccctccgctcctccgcacgccggctcctgcgtctcaccccggcagcctcgtcggctctgttcgccgcttcccggcccaccgccagggttgcaccgctctcacgccccatcgccgctctgtcaggtggcaacaatcctatctcatggaaactgagacgcttcttcagttcaaatgaaaagcacttgcctgcaatatctgatccagagatcgaagctgcatttaaggatttgttggctgctagttggaatgaacttccagattctctcgtagcggaagcaaagaaagcagtatctaaagcgaccgatgataatgctggtcaagaggctttgaaaaatgtattttgtgcagctgaggcatgtgaagaattcagtggaaccttggttaccctaagaatggctcttgatgatctgtgtggcctgactggcgaaaatgtgggtcccttacctggttatattgaagatgctgttaaagctgcatataatcgctacatgacatatctggagtcctttggccctgaggaaaattatctaaaaaagaaggtggagactgagttgggcacaaaaatgatacacctcaaaatgagatgcagtggcataggttccgagtggggaaagatctccctgattggcacctcggggatctcaggctcctatgttgagctaagggcatgatgtgaagcctgcagatcagaaccatggaaattatcgatgagctgaggaagtctgtagatcagaatatgccgttctacattttcctttcccctttgtagctaccatggcaataacaatgagaccatcaaacagctgtgcattttaagtatggaaatactcccgtctgtgtctgtaataaggacgtttcatgtggctgaaacctgtcaattctgttaatttttgcatgacttcttgttcaaaaaaaaaaaaaaaaaaggcc

SEQ ID NO: 16910 - DNA, 1787 bp, Zea mays
  Clone ID: MRT4577_115419C.1
tcgctgggaatcccgctacccctgctactcgtaacatcactgttgatacggttgcaccggccgtcacgattgacagcatcagtgatgatactggcgcacaagctaatgacttcattaccaatgacgacacccttgtcttcaatggcactgcagaagcagatagcacagttgttgtcagcttagatggtattgaaatcggcactgtgactgctaatggtgctggtgagtggaccttggattacaccggcaccctcctggcagatggcgactatgagctgagtgtgactgccaccaatcccactggcaacagcgcaacagcaactcaaacaattgttgttgataccactgctccgactgtcaccatcaatgccattgcggttgatgacatcatcaatgccgtggaagcaggtagtcctgttgcagtcagtggcaccacgactggtgttgaagatggtcaagtcgtcactgtcaccattgatggcaatacctacaccgccaccgttactggtaatgcttggacattcaatatccctgtcgcagacattgccaactttgaagcgactgaagaagtcgtagccactgtcagtgacctagccgggaatcccgctacccccgctactcgcaacatcactgttgataccactgctccgactgtcaccatcaatgccattgcggttgatgacatcatcaatgccgtggaagcaggtagtcctgttgcagtcagtggcaccacgactggtgttgaagatggtcaagtcgtcactgtcaccattgatggcaatacctacaccgccaccgttactggtaatgcttggacattcaatatccctgtcgcagacattgccaactttgaagcgactgaagaagtcgtagctactgtcagtgatcccggtcgaaaaccactagattggcccccgtggtttgcactgccaaggccaactcttccacttttccttcccccactacggtttggggatggggtttactgcgattttgctgcatgacctggagcacctgggccccggcggaatccaccagtcgttctaactcggtcaaaccttccgcaaagctctggtcatccaactcactggttttaagtcccatcaccaagaccctttcctgccctgcttccacctgacgggcgatgaattcccgttcaaattccgcctctaggctttccaccaaatcgaggatggcttcttcggccaaatcttccaaggccaccgctggggaaaccacccaatcggctaccctatcccccatatcgtcactgctttggggcaataaatgggccaaataccccgtgtctatatagcctgtgacgccgccaccccgtttagcaaaaccctggccagtaacgcttagcaccactagggcatccaatctttgcagggccatggcaattaaactagattccctgggggcttcgccctttaaatccgtggtgaggcaacgaatgccggatagtcgtttttccccatagcggggcaattccaagggcggaatttgggtttgtcggggcgtacctacccccacccggataatttgcccccgtcggttcacatacactgaaaccggctgtttaatttcctgactgatggcccccaaacgctgggctaattccaccgttagcaggcgatcgccggggagacgctgttgatagaggcgctttagttgcttaatttgactggttttaagccgttgggtttggccgtagatggtatcgataggctttagtcctaattggtagattatggaggcaaaaaacagaagttgaatttatagcc

SEQ ID NO: 16911 - DNA, 265 bp, Zea mays
  Clone ID: MRT4577_11541C.1
ccggggcccgaaggctttaccagcccagcttctctcttcacatcgtcgagaatccagcttccccgatgcgatctggccgagggaagatggcgactccgccgccgccaatccgccccgccgccgcgctcctcctcctcgtcctcgctggcgtcctcgcctccgccgggagcgccgatctcgccatctccaaggcagatcggagggttgatctgacctcgcatagggtgcgcgacctagcttccctcaaggctgaaaatgttgaacc

SEQ ID NO: 16912 - DNA, 1704 bp, Zea mays
  Clone ID: MRT4577_115420C.1
ggccgcaaattttttttttttttttttgcaataactacacattaaatctcatgttcacatcatcttaagtacatgacacatttttaattgatgatttaacatgctacaatccactagttagtgaacactaatcacatagtgattgttaaaccctttcataaaaaaatggcaggtcactgtatttttgcagtgctgaaggaagttctgttgcgggcgaaggcatatgatcattgatcagtgcttcatgaacaaagcatacaactcacaccagttgaacaagaagtcaggcgcatgccaaaaaataacagaactgacaggtttcacgcacatacacgttcttattacagacaaagacacagacacaagggccgggagtatttccatacttaaaatgcacagctgtttgatggtctcattgttattgccatggtagctacaaaggggaaaggaaaatgtagaacggcatattctgatctacagacttcctcagctcatcgataatttccatggttctgatctgcaggcttcacatcatgcccttagctcaacataggagcctgagatccccgaggtgccaatcagggagatctttccccactcggaacctatgccactgcatctcattttgaggtgtatcatttttgtgcccaactcagtctcaccccggcaccctcgtcggctctgttcgccgcttcccggcccaccgccagggttgcaccgctctcacgccccatcggcgctctgtcaggtggcaacaatcctatctcatggaaactgagacgcttcttcagttcaaatgaaaagcacttgcctgcgttttctgatccagagatcgaagctgcatttaaggatttgttggctgctagttggaatgaacttccagattctctcgtagcggaagcaaagaaagcagtatctaaagcgaccgatgataatgctggtcaagaggctttgaaaaatgtattttgtgcagctgaggcatgtgaagatttcagtggaaccttggttaccctaagaatggctcttgatgatctgtgtggcctgactggcgaagtcagtagttgctatctctgatttctcatgtattttttggggtgcttatatcagtttgatcaaggcaaaacttttgcagaatgtgggtcctttacctggttatattgaagatgctgttaaagctgcatataatcgctacatgacatatctggagtcctttggccctgaggaaaattatctaagaaagaaggtggagactgagttgggcacaaaaatgatacacctcaaatgagatgcagtggcataggttccgagtggggaaaagatctccctgattggcactcgggggatctcaggccggacgcgtgggctaagggcatgatgggaagcctgcagatcagaaccatggaaattatggatgagctgaggaagtctgtagatcagaatatgccgttctacattttcctttcccctttgtagctaccatggcaataacaatgagaccatcaaacagctgtgcatttaagtatggaaatactcccgtctgtgtctgtaataaggacgtttcatgtggctgaaacctgccaattctgttaatttttgcatgacttcttgttcaactggtgtgaattgtatactttgttcacgaagcactgatcataaaaaaaaaaaaaaaacaaaaaaaaacaatagaacacaaataatatacct

SEQ ID NO: 16913 - DNA, 282 bp, Zea mays
  Clone ID: MRT4577_115421C.1
ctggctcaagatgaacgctggcggcatgcttcacacatgcacgtcaaacgggaagtggcgtttccagtggtgaacgtgtgactaacgcgttagaacctgcccttgggaggggaacaacaactggaaacggatgctaataccccgaaagctgatgaccaaaaggagaaattcgcctcaaggaggggctagcgtatgattagctaattggtgaggcaatagcttaccaacgcgatgatcagtagctggtacgagaggatgatcaggcacactgatactgacaca

SEQ ID NO: 16914 - DNA, 1656 bp, Zea mays
  Clone ID: MRT4577_115422C.1
atggatcggctggtcatacctgagccgtcgaacgaggtggtggtccgggtggagcccgggaggcaggcgaggggggagctgacgctgcggaacgcgatgcacaccatgccggtggcgttcaggctgcagccggcggtgcgcgggcgcttcgcggttcgcccgcacacggggatcctggcgccgctcgcggcggtcaccgtggacgtgctgtacctggcctccgcgcctccggaggggcccagcggctcaggaagccgtggcgaggacgcgttcctgctgcacagcgtggtcgcgcccggcgccgcggtgaaggagcccgtcacggcgctcgactcggtcaacccggagtggttctcggcgaggagcaagcaggtgttcgtggacagcgggatcagggcgagcttcgtgggagcgtccgtggccgcgcggctcgtcgaggccggcgcggtcgaggcgctcagggaggtgctcgaccgcagcgagcccgagtggcgcgctgcggacgccacggacgagtctggccgcacgctgctcgacctcgccgtcggcctggcccgcgccgacatcgtccaggtgctgctcgagtacggcgccgacgctgacaagccgagccgaggccggacgcccctcgagaccgccgccgccgctggcgagtgcctcatcgccgagctcctcctcgccaacggcgccacgcccgccggctccgacgccatccacgtggccgccgccgccggccacaacgacgtcctcaagctgctccttgccaggcccgcctccgcttctcccgcctcgtcctcgtccttctcgtcttctttgacatctatcgacgcggcggggagggacggcaagactcctctacggttagcggcggaggcggggcggcgagacgcggtcaaggcgcttctcgcggcgggcgcgagggccgacgcgaggtgcggcgcggacggtgccaccgcgctccacgccgcggcgaggcgcggcgacgaggcggtcgcgcgtctcctcctgtcgcacggcgtctccggcacggcctcggtgcgcgacgtggccgggaagaccgcattcgagatcgccgccgaggagggccacggcggccggatcctggacttcttgggactcggcgaggccatcctcgccgccgcgcgcaagggcgaagtgagatcggtcaggcgcgcggccgatggcggcgcgtccgtcgaggggcgggatgcgcatgggtggacgccgctcatacgagctgccttcaaagggcgggccgacacggtccgcgaccttatcgaccgcggtgcggacatcgacgcggccgatgccgacggttacacggcgctgcactgcgcagccgaggcgggccgcgccgacgtggtcgacctcctcttaaagaacggcgccaacgttaaggccatgaccgtgaagggaagaaccgctgccgatgccgccacagcctcggggaagtccaaggtggttcggcttcttgacaaggccaccatcatggggaggaagcaggatgttagcgagaaggtggcgccggcggtggcgaagggcggtagcatggacaggaaacggagagcgcggaaagggagcagtggcgccatacggtttggtggtgggaaggaggggttcgaagccgccgcggttaccgttgggtggtcacactag

SEQ ID NO: 16915 - DNA, 271 bp, Zea mays
  Clone ID: MRT4577_115423C.1
cggacgcgtgggtctcgtccactccgtcgccgtcgtcttcctctctcccctcccgccggccgatgcatccctacccctagccctccggcgcaaaaccctagatcccgcccccgcctgcatggatccctcatccggatccacgtcccgccatgggcgtctcctcatctcgccgtcgctatccaccccgaccttctccacccactccccgtccccctcatcggccgtgtcccccgtgccgtaccgtaactccacatcctctccgaagcccctc

SEQ ID NO: 16916 - DNA, 688 bp, Zea mays
  Clone ID: MRT4577_115424C.1
gccggccgggctgggagacctaagaaccctttagaaaccctactccgtcgaccatcccaaatacacacaaatccttgatattctatcaaccccacatccaccgcaaacctctaccgaccactcttcacccagaagttctttcacaacaccgccaaaatgagcgaagaccacaagggcgtacacaacctcaagaacaaggagcagttcgaggaggtcatggcagtcaaggacagcctcatggtcgtcgactgcttcgcgacatggtgcggcccttgtaaagtgatcgctccccaggtcgtcaagttctctgagaagtaccccaacgcgcgcttctacaagctcgatgtcgacgaagcctccgacgttgcaggtgacctcggtatccgcgccatgcctaccttcatccttttcaagaacggaaccaaggtcgccgaggtcgttggcgccaaccccaaggctctcgagaccgctatccagaacaacatcgatgcatagagcgcacaatcgaagccgccccgcaaatacagacgatcgcatccagcaccagactaggcttggacattgagtagagggatactgttttgttgagggtcaaatcatgggcagcaggtggccgaatggaattatgataacgtttttcaaataccaaccgctacattctcaaaaaaaaaaaaaaaaaaggccccta

SEQ ID NO: 16917 - DNA, 170 bp, Zea mays
  Clone ID: MRT4577_115425C.1
ggggggaaactacttatgattttaactgcaatcaagacaccgcagagagggccatcattacaagttcacgtgaaacaacagttataaaaacacatctggagggaccaacaacccaagaactacattgccatcttcagcaaccacaactagcacattgcatcactagaagg

SEQ ID NO: 16918 - DNA, 806 bp, Zea mays
  Clone ID: MRT4577_115426C.1
tctgcgctgccattgctcgcccgcatcctccttgattttcactcccaggaaggttagggttttctgatgcgctcatacatggggcagcaagaagatgggatgtctgatggcttgtacacttacaagcatcaccgcgagcgaggagctgatatccacaccatctttgtgaagaagagcaaattcaggattctgttgtcatttatcggcacaacgttccttcttgtgtctgtttgctgcgccctgttatcgaaggatggtttatgtctttgttccctttggagcatttcatttgccagtgtaattgcgaaatgcctgcgatgtgaccctgtgaagaaagagtcattggtgatcatgccgacttttggaattcaattagagcaacacttttggagtggaagagttcatcgaaaatttgtgcccattggcaagattctaagaccagtgctgaatgagcatgtgacccctgtctcatgctactggagcttggccttgcttgtacgcgaagaatatgagctcatgcttgttttcaagagcttgaatccaccagtcaagatgttggttccaatctggaaagcgttatgtgcattcgtagactccaatactctgggcaattctgcattgcctcaacccacatgaacatgcttaaacaagttggtacggaatgttaccgacactggggctcttacgtcaggtgtgaattgtgaatggatcgtgatgcttaagagtggatgaattgagattctctaaatactctttcgataattaagtcctggattggaagcgtaaaaaaaaaaaaaaaaggccct

SEQ ID NO: 16919 - DNA, 1000 bp, Zea mays
  Clone ID: MRT4577_115427C.1
cgtgtccgtcagttatttctcttcctcctccaaaccaccgatgtcgctaccggttctatccctgcgctgccattgctcgcccgcatcctccttgattttcactcccaggctgatgtgagctgtgcaggaaggttagggttttctgatgcgctcatacatggggcagcaagaagatgggatgtctgatggcttgtacacttacaagcatcaccgcgagcgaggagctgatatccacaccatctttgtgaagaagagcaaattcaggattctgttgtcatttatcggcacaacgttccttcttgtgtctgtttgctgcgccctgttatcgaaggatggtttatgtctttgttccctttggagcatttcatttgccagtgtaattgcgaaatgcctgcgatgtgaccctgtgaagaaagagtcattggtgatcatgccgacttttggaattcaattagagcaacacttttggagtggaagagttcatcgaaaatttgtgcccattggcaagattctaagaccagtgctgaatgagcatgtgacccctgtctcatgctactggagcttggccttgcttgtacgcgaagaatatgagctcatgcttgttttcaagagcttgaatccaccagtcaagatgttggttccaatctggaaagcgttatgtgcattcgtagactccaatacgctgggcaattctgcattgcctcaatccacatgattacatgaacatgcttaaacaagttggtggctgtgtgcagccctgatgataattcgaacatatggttcgctgaagactttgctgactgacaacataatgtttagtttcgatacaaatgatgatggaatgtacggaatgttaccgacactggggctattacgtctcacgtggagtgtgaattgtgaaaggatcgtgatgcttaagagtggatgaattgagattctctaaaaaactctttcgataattaagtcctaattgcaagcttaatcaaaagttttgcaccct

SEQ ID NO: 16920 - DNA, 402 bp, Zea mays
  Clone ID: MRT4577_115428C.1
cccacgcgtccgcttctcttcttcgcctcctcatttttcttttcctgcgaagcgtgcgcggttcttgctgaactatccggcctccttacgaatctatggccgccgatcatgatgagctgttttaccggactcttgatacagttctccatttcggtcgcttcatttttggccgcggccagggagcgggtagcaggccgtgattagctgctacacgcgtatcggttggagtagataagcggcgccatgggtatgaggagcaggcacccaaaggcgttgggtttccgctgccacccggcaagccaccggtccctaactctggcactatggagcctagcggcattggtcgccgttgtgaatttccttcttctcatcgttcataaggaggacgatgagagtatgagc

SEQ ID NO: 16921 - DNA, 281 bp, Zea mays
  Clone ID: MRT4577_115429C.1
catgtaatggaatagcattccatgaaccaaacttcggatcaaagagtggtgttaaaacaaataaatcaaagacagacgagtcttgatgtttgcacaaaccatatgtaaggaccgattgccccaaaacatgtgagaataacatatagggtagcatgcttgacatactattgcacaagaacgtagatcctatcttagaaaaaaaaacggatttttttgggcccaggggcttgattcccccaaaaacatgggggcgcaaaggttcataaaaactgattaaaagg

SEQ ID NO: 16922 - DNA, 354 bp, Zea mays
  Clone ID: MRT4577_11542C.1
ccgggtcgcccactgcgtcgttaagtttgtcgtgcaggcataaaaaaagcagccgatggcagcagcaccatggcccttcctcacggcttcgctgaaggccggaacgtgccgcgtctccgcttcggcgaggcccggtgacgatgcgcaagaggcggggaaggccaagccggcggcggcgtccgggagcccgggtcggcccgaccgctgctgacctgggcccatgccggcgagccgcctagctacctgctggcgagttcccgggctactcgggtggacaccgtgggctggcggtgacccggagacgttcgccagaaccgggagctggaggtgatccactcccgatgggccatgctt

SEQ ID NO: 16923 - DNA, 1048 bp, Zea mays
  Clone ID: MRT4577_115430C.1
cattgggtacctcgaggctacggccggggtgtcccgaagttatttctcttcctcctccaaccaccgatgtcgctaccggttctatccctgcgctgccattgctcgtccgcatcctccttggatttccctcccaggaaggttagggttttctgatgcgctcatacatggggcagcaagaagatgggatgtctgatggcttgtacacttacaagcatcaccgcgagcgaggagctgatatccacaccatctttgtgaagaagagcaaattcaggattctgctgtcatttatcggcacaacgttccttcttgtgtctgtttgctgcgccctgttatcgaaggatggtttatgtctttgttccctttggagcatttcatttgccagtgtaattgcgaaatgcctgcgatgtgaccctgtgaagaaagagtcattggtgatcatgccgacttttggaattcaattagagcaacacttttggagtggaagagttcatcgcaaatttgtgcccattggcaagattctaagaccagtgctgaatgagcatgtgacccctgtctcatgctactggagcttggccttgcttgtacgcgaagaatatgagctcatgcttgttttcaagagcttgaatccaccagtcaagatgttggttccaatctggaaagcgttatgtgcattcgtagactccaatactctgggcaattctgcattgcctcaatccacatgaacatgcttaaacaagttggtgggtggctgtgtgcagccctgatgataattcgaacatatggttcgctgaagactttgctgactgacaacataatgttgagtttcgatacaaatgatgatggaaggtacggaatgttaccgacactggggctcttacgtcgggtgtgaattgtgaaaggatcgtgatgcttaagagtgcactctgatcgctacccgatgccgatcacaaagagtaataaacacaaactctcgcttactctaagctcaatgacatcattggatgcacactaattactctcttataaaaaaaaaaaaaaaaaagcggcc

SEQ ID NO: 16924 - DNA, 403 bp, Zea mays
  Clone ID: MRT4577_115431C.1
gggaccattaacatttttggttaaactaaaaaccctgttcctggcaaaactacaagtttttggggaccccaaaaaatttctgggactaaaaaaaaaccccccccccaaaaaataaaaactttcttttaaccataaaaaatttaacagccccacaaaaaaacgccccccaccccctttgtttttttccccccccccccccgctggtaaagccccccatgaagggccccaccccccccttggggggggccaaaatttccccaccaccgggaacaccggaataagggggaacccccccgttttttcattgaaaaaagataaatttttgaaggggggggaggcaatgaagcatgcgcaatcgtgcttatttattttagggaaaacaaaaacccttattgggggaaaa

SEQ ID NO: 16925 - DNA, 499 bp, Zea mays
  Clone ID: MRT4577_115432C.1
ggggaaaattatttttttttatttttttaaaaagggggattaaaaatcaaacccgcccaaaaacattatagtagaaaccctgaaaacctttttgatttcgaaggcctttccccccttccgcccttggaaatttacgttttccctttttggaattccttcctccgcccgcgggggaaaaaaaaacctaacgattttggccgcgccccccaccgggttttcccgggggagggggtcccgggggggccccctgtaattgaaggggaagccgggggggtccaagaaccggggcccccccaaaaaaagggcgccgaaggggcaccggaaccccgtaagccccaccccctttcggaagttggagccccggtgggaaaaagtcctggccgaggcctccaaagggtggcccgcggccggggccggaggccccaattgaagcgcccggtcaagaagcgccggccttggttggggcaccgggggggccggcgcggaaactgagggaaag

SEQ ID NO: 16926 - DNA, 455 bp, Zea mays
  unsure (1)..(455): unsure at all n locations
  Clone ID: MRT4577_115433C.1
aggacgcctggtcggacgcgtgggccgacgcgtggccactcgcgcatagaaagacaatagtgtccatcagcggcatgtaaaatatgctagctccttatgctccatgatctttctgcaagggctgctaccgcgaacattttcccacaatgctcacaagctcctataactgcccttcttaccccgtacctatcaccaacggtgtctttagtatagtgaaaacccatttttctaccctacangatccaacaggcaatcggagctggcataatacctttatcaccctcgttcctccacaatcatcagccctatgacagcagctacctttggcgcatttattggcacacaacattaggggacaacaactacaacaacttgtgctatcaaaccctgctggctactctcaacaacaggggnttattacattcaacccactagctggcttgaactttggtttt

SEQ ID NO: 16927 - DNA, 144 bp, Zea mays
  Clone ID: MRT4577_115434C.1
gaccagatgtactgcgaggaggtcttgcacaacgagtactactaagcccacttgctccagctctctaccgagttcgaggagcgtaatatgacatttgcttatacatgcgccatgggcaataacgctacaaatatgacattccac

SEQ ID NO: 16928 - DNA, 284 bp, Zea mays
  Clone ID: MRT4577_115436C.1
tgtgataaactgtcatgtgtgaattgcatcattgggaattgggctgtgatggatttttctgcaggtacactaacttcgaactcgtatgtgtagctgacgactagcaatatatcgagagagacgtagttatgccaccgatatagaacgctattgccacattatgttggtgaaattcgtgaggacgaataggacgagcatgcatcctgattgttccattgtgtttgttatttgcgcaagaaatgcttccctcacctttattctaataataggtgattgcctttatt

SEQ ID NO: 16929 - DNA, 1175 bp, Zea mays
  Clone ID: MRT4577_115437C.1
gtctgtggcaatcattgagacccctccccttgtcatcgtcggactagtggcatgcgtatgtgaagactccccgtggggggcgaaccctcaactctgtctaggcccagcaccttagcgaggagaaggttctacaggaattggtgctagagcaagaagaaggccttcagcaagtatgtcctcaaatatgacattggcgcaggcaagaaagaaatccagttgcagcttgagaagatgaagaagtacgcttcagttatccgcgtcatcacccacactcagatcagaaagatgaagggtttgaggcagaagaaggctcacctcatggagatccagaggtcaatggtggcactatatagtggacaaggtggactggactacggctacaagttcttcgagaaggaggtccctgttgatgcgctgtgttccagaaggatgagatgattgacatcattggagtcaccaagggtaaggggtacgaaggcgtggtcactcgctggggtgttacccggcttcaccgaaagactcacaggggtctccgcaaggtggcctgtatcggtggtgcctggcgtcctgccagggtgtcctacacatttgccagtgccggtcagaaacggtaccatcaccgcactgagatggagaagaaggtttacaagatcggcaaggctggacaggaaagccacgatgcctcgactgagtttgacaggactgagaaggacatcactcccataatgggtggcttcccccactacggtatcgtcaaaggcgactacctgctgtgtcggccccaagaagagggtcgtgactctctgccagtccctgctgaagcagacctctcgactggccctggaggagatcaagctcaagttcatcgacacctcgtccaagtttgggcatgggcgcttccagaccacagacgagaaacagaggttatgtggcatgctcaaggcctgagctttctgctaggggtgattacaagtagtactacttgagaataatgtgcaggcgcatgtaaagtcaacggtgccaatcctctcgtatttgaaacctactccctagctagtagctactttgcagatactcgatcaaacagtgacggggccagtgcgacaacctgggcatctgcaacgacacgttttccccgttcgtcttttattattatttggtcccagtttgttctt

SEQ ID NO: 16930 - DNA, 438 bp, Zea mays
  Clone ID: MRT4577_115438C.1
catcggagggactagtcactaatcccttacaacgagacacgcccttaattgcttggctgctggaggcacatagcccgccgcgccggatgaatcgaacgtcaattccggtctcttacaaacggacgtcaggagcgtattcacgcatcgggttataccgtggccgggcaagaggcttgaggggggaccttctggcccggctcactgttggggcggatagagaaggggccctagagcgcctggggagcgaacatcctccacatggcgccccaagagagcttgatgggtttacactgaatcgacaacttgtcctgggattgcatcagaacgacgtagccaatagacgacgcaaacttcgccaccacgggcgggtcagtggggttgaaacctttagataggtggaacacaatagtttaggcagcggggtacatgggacccgcc

SEQ ID NO: 16931 - DNA, 267 bp, Zea mays
  Clone ID: MRT4577_115439C.1
gatggttcaatcccatccttatgcagtttttttgtatcttgactgctttccagatggattgttgagtttcccagctgctgtgaaaaaaaaaagattcctttatttccattaaattcgaggacaacggcctggcgacgtgggacatccagagccagtacaatgcggtagtttccgcgaggtctttgcaacaactaccatggctgcggtggaacacgtcaagcctgttagcatctatcggtggcccaaacatgtggtcggccccatgct

SEQ ID NO: 16932 - DNA, 347 bp, Zea mays
  Clone ID: MRT4577_11543C.1
tagctcactcatccttactaataatctcttcttgacctgactaacaccacctagcaactctttctcggctgcaataatttccaatggctcctgctcctcccatcctcatctattctcaacttcaactatcctcacaacttctctactacttctaactcctagtacctggacttcttcttcaacattcagctgcaactaggtgacatcttccttttctcctttcctaaattactctattttcatctcttcttctccctccacatcttactacatcaagttacgctctctcaacatcctctcatattcatctgcataccatcattccacctgcaactgcctcaaaatca

SEQ ID NO: 16933 - DNA, 609 bp, Zea mays
  unsure (1)..(609): unsure at all n locations
  Clone ID: MRT4577_115440C.1
cccggggttgantagcttctagatacaacgcctcccagcctacagctgtgttcaactcaggtgacaaaaacgtcatggcgcgacacatcggaccgccggcgtcgggcatgtgccctgatcgacacgtgggcgggctccggctggcgccgtataccgaccgggcgcgcgtgggcgcactggctggacacggatcctgagcaccaggtgggggggggtgttcttttcatattaacttctttctgctgagcatactaagaacggtcaactccttaattggtgagacctctacctgtgctggaaataacaggagaaaacgggattaaaagggggatattatcagaacatgctgaacaagtctcaacctgagtgaccaagcgctgaggatgacatggtcctaaaacaaggcaaggagcgtactggcttaaaacgcatggacagacttaactttgactcactggtgctcatagagctctaatacatccttagcacgttcactgactgtttcaaactcaaatatatcctggcaccaagccactgattctctctacaaacagacgagggcatggaaaagtcttacgttgctgcaaatgggcacacatatgaacacag

SEQ ID NO: 16934 - DNA, 703 bp, Zea mays
  Clone ID: MRT4577_115441C.1
ggatctttctctctctcgccttattcatacacccctcattgcatactcctcttttttattggtgtcttttcctgctcgagattccaggtcttatcactttccctttttatatctgcattagattcgctctgctcgtcgctgtcggctctcttctcaatcttcatccatgatgcaaccctccattgctttcctcctgacttgttgggtacccttatctctccaacttttagacaggtcctccgcccaaaccgatgtacatcggctggcgcgccgaacgcctgctgcaggaaggcagcacctgggcacggaagccagacgatcgatatcgggacggcaaaatgcggctgagacgtactcgagtgctgccgcgtcctcgagtgtggcggcctttgcgacagggtatggagaaggcatgagcgaaacgtacatcacagctagtgcggcgagtgtgccgaagacttcggctgtcgcatctcttgctgtcggcccggccccgctgcccgttccttccgcaccgccaacttgcgacaactctaacgccaaggccgagattaaccgcttccttgtcaaatgcgaggccgccctcaaacgctctactgctcccatcatcgccagagccagcactgtcgatgcatccaacgcttctcaactcgccactcaaatcgccgcctatctgaaggacattcttgcccagcttaaactc

SEQ ID NO: 16935 - DNA, 502 bp, Zea mays
  Clone ID: MRT4577_115442C.1
gggtaccccttcgtggccggccgggcactccgtatccaaacctcaaccaatcctgttgactgctctcgtcggaacccaatccctcccggtctccgaacaacgacacacagctgaaaccctacagctacgctcctggtgagagcgaggacgagagaaccgcccggaccatggggcggcacaccccaaggagccggctcgacctaccctggcctcctcgaggagcagcaccaccgtggccggatcatcggcaaaaacacagagaagtcgaaccacaccctaagacgttgcattgaccgacggcgagcgcctaagagcagaaggagtccagaaccagacgaaccaagaaccctaaaaacacagcttctgatgccacacgaggaagtgaagcgaggccaagcgatgcctctggccagagggaaattaagggggaggccttacaaggaacaatcctgggcgccggtgagtaagacaaggatagatgtaccaggacacgggggcagga

SEQ ID NO: 16936 - DNA, 375 bp, Zea mays
  Clone ID: MRT4577_115443C.1
acccatcccatctcatcttcgacaagcgaaccatagcactggcatcatccatcaccggatcgagggggattccaagtacttgatcctcactctgactctcctggccgccgcaacgtcgaccgactcatagctgtacgacaaggtcaccacggagggcaacatgcgcgcggactacaacgcgcagggacaacacgtgacctctctgatcctgacccaacactcctgctggagcttcagcatccaggagaactacctgtacggggagttcaccatccatatgaggctgatccccgacaactacgggggcaccgtgagctacttctacctgtcgtcaggcgacaggccccgacaccaccagatcgacatggaattcat

SEQ ID NO: 16937 - DNA, 852 bp, Zea mays
  unsure (1)..(852): unsure at all n locations
  Clone ID: MRT4577_115444C.1
gggaccctcgaggccggccgggaaagaagagaagaatggattggcattgggtaacattgttgctcttcctctctcaaacttgaaaccttctctaaagttatcttcttcttcatcctcttgttgtatcaccaaactcttccccatttcccgcatcaatgtctctcccacctcggtattagttcgagcctcttcctcatcctctttcgggtctcgcctcgaagacaccatcaagaagaccgtagctgagaacccagtcgtcgtttattccaaaacctggtgcacctattcttccgaggtcaaaatcctcttcaaaaaactcggcgtcgaccctctcgtcttcgaattagacgaaatgggtcctcaagggccacagttgcagaaggtattggaaaggatcacagggcaacacactgtgccaaatgtatttattggtggcaaacacattggcggctgtacagatacactgaagctgtaccggaaaggagaactagaacctttgctatcagaagcgaatgctaaaaaaactgagagctaagctgttgactggcattctaaagggaacctgatccccttaccaatttgttactttgtaggtcaatgcagttctctcaatgttattgttattcacaaatgctggttgaaagaaaccagagcgcactgataacttcaaacattggcgtttagtcaggaacttatggttacaaatatgcagttgaatggtttacagaactaaagttgcaacttaggattgtacctggaataattggattttatggatttctatttttcttcctagttgggtaatgattctacttggncatttgctttagatgcattggcacattgtcatgc

SEQ ID NO: 16938 - DNA, 289 bp, Zea mays
  Clone ID: MRT4577_115445C.1
cggccaaaaacaccggaacccacctcaagccaggaaaacccggggcgaaagacaacaaaagacaccccgccccaggcccaccaaagcaggacaaccaaaccccacaaatacccgggaaccggggggcccaacaacaaaggccccaaacaacacccaaaggggccgacccgggaagcccagacgggcaccaaccaacaaccccggggaaaggagccaaaaccacgagggcccggaacacgggcgaagaaggggcgacaagcccccggaagaagggcaccaagggggggaa

SEQ ID NO: 16939 - DNA, 187 bp, Zea mays
  unsure (1)..(187): unsure at all n locations
  Clone ID: MRT4577_115446C.1
ccggaccggaancccgggccgacccacacccacgcttcctataacactctcatctacacgatctaccacgcgatacaactacaaggtggggggaagaattaatttttccgagtaaatctaacttatgtactataataacgaaaattctgatacctgaatgtgtagttgcaaaatacctttttttgct

SEQ ID NO: 16940 - DNA, 383 bp, Zea mays
  Clone ID: MRT4577_115447C.1
gccaatccgacccgacacaatggcttccatgatcacccgccgtttcttctccacgactgtccgtcgtctgcagacttcctccaagcaggagctgcaggccgagtccaagcgaaaccccgagatctatatcctcggtggtgtcatgaccctcgctctgggcggtgccggcctctacttcggccgatcccccactggagccacctccgagtcccccgtcaacgtcgacaagatggcctgggagagcggctctggaggcaagtactcctaccaccccggcggcgaccccaacgctgctccccgcgatgcccccagcgctctcaacgttgtcatcatccccaacgtcaccgctcccaaggagtaccacgacaagttcaacaagtggg

SEQ ID NO: 16941 - DNA, 336 bp, Zea mays
  Clone ID: MRT4577_115448C.1
agaaaacaataaatttctttggtggtggatggctgaactcgcgggtaataaaattattcattcccattattatattgatccaggcttaatggggtcttttattataaaggattccttccttgggggggaagttagttattaatttacccgttaaagggcgtttggttggcccattcaaagtggtcgccgaacttaccccaaaccaagtaaaattttggttggagaaacccaatcccggtcggcaccccggttgtaaccccattggccgaattgaaggccgccgttattaattttgtgaacaacccctaaccccggaagcttgccggcggcctttta

SEQ ID NO: 16942 - DNA, 567 bp, Zea mays
  Clone ID: MRT4577_115449C.1
ccggccgggagcgatcgagatgtgcgaaattctgatgtgcgagatcgagggccaccacctcacgtcggcagccatcgtcgaccatgaaggcgccgcctgggctcagagcactgcattccccgaggtcaccgctaccttcatgcgaaccattcctctgccgtaaagtccgacggcagccacgtggtaccaggccacagctggcccacacgtcatccacccggctaccacaacgttcacggatgttacgggatagattttgctgtgacgtcatccacccaattcaagcctgagatggccaacatcatgaaggatttcgatgagcgggggcaccgtaccttgcctcgaccggcctgttcctgggagccaccaagtacactgtcatccaaggcaagcttggtgctgttattcgtggcaagaagggatccggtctgtgaggccaatagaatcctttatttatatttttcatgtgagatcctaaatgaaaattcactactggatttgactttgctgggttcacaaacctatacagtttgagacagtcatgccaagggttccttattcagttgg

SEQ ID NO: 16943 - DNA, 938 bp, Zea mays
  Clone ID: MRT4577_11544C.1
tacaccgcccaaactgtccgccaccgccgtcgtgtccatcctgcagggcgccgccgccgtgcctcgcctttctcccgcacctcggagttcctcgccggcgggctccggtcgtacgtccgcgaggaggacggcgccgtcatcctccgcatggtcggcgggctcggcgtcgccatcttctgcctcgagtgggtcgcgctcgcgctcgccttcgtgctcaggtactacgcctacgtcgacagggagtgcggcggcaacccgcagcgccgcagcgccaaggtcggcggcgaggacggcgccggcacctggcccttccaggtctgaggactggtcacaactggccttggctgcgggaaggtggaactgagaaccgtgtgctcttggaagggaaatcaagcgtcgagtgttgttctactggtagaactgtgtgtgtgggaatgagatgggatgctgtgattcgtttattggtttattatgtgtctcgtatttgtaaggctgttatatctatataattatttatgtgtcttgcgatcgagaaaaaaaaaaaaaaaaaagcggccgcgcggcgggtcgggcgccgcgatgacggcgcacccggccacggcggcggccacggtgagcgcgtggagcaggatgaggaggaagccgtccacggaggggaccaggcggagcgacagcgtgaggaagccgcacccggacgcgcaacccaggatgaggtagttggagacgaggaacgcccggcgcgcgcggcggtgctgcggcgacgccgtgtcccgcgcggggggcgcgatcaccgacaggccgcccatggagccgggacgcggagaggggaggagggacgggagttaccggcgcgacgagagtagaagagggcagtggtgtgcagaagagggcagtggtgtgcagaagagggcagtggtgtgcagaagagggcagggtgt

SEQ ID NO: 16944 - DNA, 372 bp, Zea mays
  unsure (1)..(372): unsure at all n locations
  Clone ID: MRT4577_115450C.1
cttnnnnnnaannaaggagcccaagggtgaaccgcatgagagnccggcggcagaccccangacagggacgcccacagcgcgccaaaaggnccagnaccanacangcagacagggacagggcccaccagccacaaagggggccagcagcagggccaacaaangaaacaanaaacnacaacanggcaggancancngcgncgacanannncacnaccgcagaanagaccccagcagcaccanncggaggnacggnagacaggagcgnacaagcagcncngagcanannccaccaggnccccagggggaggcagacgggncgccaaaccgagnncacaagcnnnggcagccacggcngcggcaaagcgcgcagag

SEQ ID NO: 16945 - DNA, 681 bp, Zea mays
  unsure (1)..(681): unsure at all n locations
  Clone ID: MRT4577_115451C.1
ccggccgggggctcattcttccccttttccaagattgctctcctgctacctccgatctcccttcttcgatcccaataatatctctgtcgttgacaccccatcgccacatggcctaggacaagctacaccccattgccacatctcgacgttggaaggccatcgattcgctagctccgtcgtgccgagggatagattttgctgtgacgtcatccacccaattcaagcctgagatggccaacatcatgaaggatttcgatgagcgggggcaccgtaccttgcctcgaccggcctgttcctgggagccaccaagtacactgtcatccaaggcaagcttggtgctgttattcgtggcaagaaggtatttaactgcccatcgaacgtcgcaacgcgactgctccatcctctttgatccgattcattcccaactgttgctgcctttgttgttcccagggattcggtctgtgaggccaatagtatcctttatttatatttttcatgtgagatcctaaaaaaaaattcactactggatttgactttgctggtttcacaaacctatacgttttgagacagtcatgccaaggtttcattatcagttccgtacccggcataatacatatgtttactttggtttttttgttgtatgcagatgaaaattctaaaaaaaaaaaaaaaaagcggncc

SEQ ID NO: 16946 - DNA, 599 bp, Zea mays
  Clone ID: MRT4577_115452C.1
cggacgcgtgggatttgctccacagccttctgggtgtgagaagtaatacatataatcaatatcctatcacttaacacctggtacactccttgttgatcatgagatggggttaacagtatcacacttatgcggttatgcctatgtgtttgaaaattttcagagcaagaacgagaccttgaagaattcttccaatcaacagcaggcaaatttcagacagacatgggaaaagcatgggcagcggagattgcatcgagaagaaaaactaagtgatcaaaatatcaaatgacactcattttggcacgttggtttgaagacaacttgctggcacagcatttctgttgaactttgcttttactagacgatacttcaaggtggcactgagacgtaggcttaccttgggaaaaatgaacttcaccacatttcttggttctgctctgatcctgaggcatattgggcttgcgataccactgtaccagggctccagataagccacttgggtaaggagttatattggttgtagcctgtaggtgctcctgtcacgagcaattagctggatccaacgtgaatcagcaccatctcgtggtgatgtaaaatcctac

SEQ ID NO: 16947 - DNA, 298 bp, Zea mays
  Clone ID: MRT4577_115453C.1
gggaagcgcgccataatttcggggggggaatgggggaatccatttttctggagttttacacacgtccgccaattgttttggttaaaaaatgttaacgactttaaaagaaacaagtttcccttttgccaaaccttggtaaatccaagggaaaaatgcttaaacccgaaaacctatgggtttctccaacatttgtcccaaagcaattaggccaaactgaattgttaaaaaaggaaaccattttcttacttttagtttggaagcgatttaacggggctgggtttttcaaaaattttttttt

SEQ ID NO: 16948 - DNA, 630 bp, Zea mays
  Clone ID: MRT4577_115454C.1
attgggtacctcgaggccggccgggacgcgatcctcgcttcactcggcgaccaccgggcaccgccgccggtacaccgcgcatcgaatcgccaccagtgccgattctgctgacccctcgccatcgccggcgggcgaatcgacaccatggccgccgcacgccggggccgcgccgacggtgccaacggcgtcgtccgtccccgcccccgcgaccgtgtcgtcggcgtcagcggaagcatggcggggcgcgtggccgtcctcgccttctgtgtcgccgggatctggtccgcctacatctaccagggcgtcctccaggagactctatccacgaagcggttcgggccggaggcgcggcggttcgagcaccttgcgttcctcaacttcgcgcagaatgtcgtatgcttcgtctggtccttcctaatgactaagttgtggtcgggcgggagcgggagcagctccgacggccgtgcgccgctatcgaagtactggggcatcagcgtaaccaataccatcgggccgaccatggggatcgaggcgctcaagtacattaactatccggctcagaccagctccaagacagttaagaagcttgtcaaccctaatgcacctcttggctatacattgtgcttcctc

SEQ ID NO: 16949 - DNA, 480 bp, Zea mays
  Clone ID: MRT4577_115455C.1
atgaggcaaagaagtacagagggaggaggcgggcaacagatacgcggcgtgacagacacccaggagggagggtgctgtttatccatgctgctccggctgaagatcgtcgtcggcgtccactcggtggtgctcccggttcctgttccaggcggctttggccatggcgcctactatgcggtagtagagccctgctggcaccgcagccggaggccactgctagcggcggcgggtggcctcgtcgcgaggcggccaaggagcaccacggtggtgatggcgctgaaggaggaggcggagggcagccgcgagagacactttcgccaagataaaaatgatcagaaggcttacccttatactgatatttcctccaatggtggggtattgatgaggttgaagtggctgaagagccaaaaggtgaagaggcaaagggttgatgaagcttcacttaagaggttgttagcaaatcatgggatttcttgttga

SEQ ID NO: 16950 - DNA, 1286 bp, Zea mays
  Clone ID: MRT4577_115456C.1
gggtacctcgaggccggccgggaactaccgccgcgatcccgcttccactcggcgaccaccgggcaccgccgccggtacaccgcgcatcgaatcgccaccagtgccgattctgctgacccctcgccatcgctggcgggcgaatcgacgccatggccgccgcgcgccggggccgcgccgacggtgccaacggcgtcgtccgtccccgcccccgcgaccgtgtcgtcggcgtcagcggaagcatggcggggcgcgtggcggtcctcgctttctgtgtcgccgggatctggtccgcctacatctaccagggcgtcctccaggagactctatccacgaagcggttcaggccggaggcgcggcggttcgaggcttcgagcaccttgcgttcctcaacttcgcgcagaatgtcgtatgcttcgtctggtccttcctaatgattaagttgtggtcgagcgggagcgggagtagctccgacggccgtgcgccgctatcgaagtactggggcgtcagcgtaaccaataccatcgggccgaccatggggatcgaggcgctcaagtacattaactatccggctcaggtttggttccgcctgctattgccgtctcaccttggttgttatatgcactgtcccggacattgtgtcatgttaatgttaggttcctgtcgcgggcacatgggtaatattgtcactgacgcttatggattgagatgttccgatagagttaattgactatatagggagctctttggaagtgcttcctcaagtgaacatttaggaagaacattgcattgattggattgtatgtgatatggcgactggcgatcgtgtgcggtatcgaccatcggcaatccatctctagctatcttattgcagagagcattgatccaagcatcgttcttgctcaacggatttgtttttttctcttgacaagctcgaagatatgtggcgcgaggtttctttacgcaatcccgactaatttctgttggtgtgaacaggtgttggcaaaatcttctaagatgatcccttaatgctgatgggaacccttctctatagtgtgaagtacacacttccagagtatttttgtaccttccttgttgctggcggtgtgtcctcctttgcgttgttgaagacaagctccaacacagttaagaagcttgccaaccctaatgcacctcttggctatacattgtgcttcctcaacttagcttttgatgggtatactaactcgacccaagatttaataaagtcaaggtacccaaagactaatccatgggatataatgcttggc

SEQ ID NO: 16951 - DNA, 441 bp, Zea mays
  Clone ID: MRT4577_115457C.1
gcgggtcgactcttgagagaatcatgcgtgtggttaagaaaattgttatgaactcaaagccatacatgcggaaaaatgggggttcttgaaaaatcgtctacctcaaattgccttcgctatcatgtatgatcgactatgaatcgtggttgccaattaatttaaaatctcttctagccttctatggctgctattacaattcatttaaattgtctttgcatatctctgttaaaaattaaatatttatccattcaaatcgcatttcgcatatttctgctaaaaatcaaactccttcttacatctaaattgacttttcatatttctacaatcacatgcggcatttccttagggtcccaccgtaaaaggatagaacaccccacgctgacctacacaaaaaccgcttgtgatactattccatcacacgcgttctgaaccgcctgggac

SEQ ID NO: 16952 - DNA, 703 bp, Zea mays
  Clone ID: MRT4577_115458C.1
ccggccgggctccgttccttcttcgcatgttgaaggactcgctgagcatgactgacgatgagggaatgctctcgggagctatggcacgatggcgatgttgaactatgatgtatcctgtgtctgagcgccaccccgttattgtcatggcgtgctatctggatattcgtgttcttgagtggtgtatctctcacattctcttggacagacaaacgtgaacattagggtcccaggctgttcaaacaacaaaaagaatccgagagatcctctatgtccagattataatccctcttagtgaagcgtacttgcttcgcttgccaaactcatgggcttaatggatgactgcgagaaaatgctatcccctcacaagtacactcacatgatacgcggaacctacaaagcaaagactaggggagacactggggagagcttgcatcacacttaatatatggatggtcactgaccatactaccctcataaatctgtacgtgccatgtgtaatgatggatcacacgactcgcatttcaaaccaagttgcacatcgtgcgtatctttcagatatatcgctgcctgactcaatgtgctttttgatccgagtgatcagagctgcttcgactacctcgaaggatacttcccttgcatccacatgatcgagtgatcacgcaagagaatacttgtgatcatttggtctattgtagggcacgaa

SEQ ID NO: 16953 - DNA, 2489 bp, Zea mays
  Clone ID: MRT4577_115459C.1
atacaaaaaaagacacgcgttgcgcaaaaggggaaacaggggatctccgcctctgtcgccgacccgtgggaagagaggagcgtgcgacggcacgcagacgcatctagtctcccgccgcctctactgtcctcgccatcgccagcaccccaaggctcggtacgattcggctgcgtgcccgcgcgtcggcactgcaccgcggcgcgcaggcggaccgtgctggggttttggtggggtgtagggaggggcgtcctgcgctctgcggcggcttgatcctgtgaaggcggcggcagcagcagcaggcttcttcgatgcagcggctagtgggggtgggcgagaggttattggcaatcggaacaaataggcgggcggccacttattcacattcgagccacagaagtgggtactacacagcagtgagggacaatggcttgtcaacaaggcgtaagattccagccatcttatctagaatgttctcacattacaaagtcattagcagaaagaacagagctgaggatcacaagtgtagaaccaggatgtcaagaggctaccacactctctctgtgccagtgacgaattcatctgcaacccagcaagcacatttggcatggaagcagcttggtcatatgtacacatatagaggtccacggttcccactgctgggccgagcagcttgtgctgtaagcctgtccttcacgaggttccatataatccctggggtcatggctctagctgttggcaagatggcgcttgcacctcctgtccttgcagactcacgacccttcatgccaagaatggatggcatcatcacaaaggcacaagatactcgccaatttctgtcatctcttttttgctcaatctgggagggcatcactttgcttgttagagctgtgcatttggcattcctattcttccctgcaactgcattagctccatttgctgataagtttagtattgcattcaggagaaggtggcttagtcttatgcgccggacccttgaaaaggctgggccagcattcattaagtggggccagtgggctgcaacacgccctgatctttttccaagtgatctctgtgtagagcttgcaaagctccatagtgctgctccagcgcatggctttgcttacagcaaggctgccattgagaaggcattcggtcgtcagctttctgaaatatttgagtcctttgaggagaaccctgtagcttctggaagcattgcacaaatacatcgagccacactaaaacatcaacatcctggaaagcatgttgcagttaaggtgaggcatcctaatgttggagaatcaatctcgagaggctttctactcataaatcttgtggcaaaggcttctgatatggtccctggattaagctggctgaggctggatgagagtgttcgccagttcgcagtattcatgatgtctcaagttgatctttctagggaagctgctcatttgagtcgttttatctacaacttccgcagatggagacatgtgtctttccctaagcccttatatccatttgtgcatccatctgtcctagttgagacttttgagaatggagaaagtgtttctcgttttatggaagaaatcgaagggaatgctcggatgaagaaagaccttgcacacattgggacatatgctttcctgaagatgcttctggaggacaattttattcatgcagatatgcaccctggcaacattcttgttcgtttaaatgagaacaagcttgcaaggagacggtttttcagagctaagccccatattgtgttccttgacgtgggcatgactgctgagctcacacgatctgaccgtgataacttacaacagttcttcaaggcggtggctactagagatggccgtactgctgccaagtgtacccttcagttatcaaagaatcagagctgtccaaatccagtggccttcaccgaggagctagacaagacgtttacattttggggaacacctgaaggggatgtttttcatcctgttgaatgcatgcatgagttgcttgatacagttcggcgccacaaagtcaacattgatggcaacatatgtactgtaatggttaccattttggtccttgaggggtggcaacgcaagctagacccaggctttgatatcatgcaaacgttgaagactttactgctagagaaggacataaagcaaccaattgattttttctcataaacaaacctgtcgatcgttcttatgtatagaagcagtggaagatgatgccctaccaatataatcagaaggcgaaacatctaatctaactcgaagcaacctggcattaattgagcagatatattatgcactatgttctatctgtcctttctgatagtagaagtagcagaaactgtctgcactaagtttcatttttgactacgtcagtatgaaaattttgccgaccacgaccacccaggcgggtccagccatggtgttctttaaaattcttgggaagttcctgtcaaaaaaaaaaaaaaaaaagcggcc

SEQ ID NO: 16954 - DNA, 265 bp, Zea mays
  Clone ID: MRT4577_11545C.1
cgcccaaggtaagagacgcggcgccgcgcgcagacggacgaaggcctgacgctcacgcccgaatacatgacggaggtcatctgcatcctcgtcggccaggtcgggacccccccggccaccccctgggagctctactgccccgccggctcattccctgcacctgcccggcactcgcgtccggtgtcgcactccctgccttcccacctcctttagcgagaccggttctgcaagcccgtgtccactgccaccctcctccaccttcagc

SEQ ID NO: 16955 - DNA, 281 bp, Zea mays
  unsure (1)..(281): unsure at all n locations
  Clone ID: MRT4577_115460C.1
ggatattattaacttcgaaacaaaanaatacgccctgatcncttttttttgtgtttcggacaccaccnncatngctaccaacctacatgctcatcaagtcggacaagctcgactaccagaggatacgaaggccggcctgacaaaccaacaaaagacttgcagggcaccgtaacaccaacgcccaattcatgcctcatttctcatcaagaatccgccaatcaagacgcaccttggtgttaaattgctctaggtatatacctacatgccaatattgccagaac

SEQ ID NO: 16956 - DNA, 299 bp, Zea mays
  Clone ID: MRT4577_115461C.1
attcatactctattcattttttaacattgaaaaacgcttctaattactgttctgcgacaagagttttaccgtatgctgagccaacttctaatttgccgattgcatgcccacataatcgagacaagacactccatacattttatctattggtgccatttaacatgccggacatactatggaacaccacgccgtaatgaaagggggtgtaagcgcctcagcggatcttaaatcactcttacattttatgtggtgacggtggtggcggagcggtcattgtactcttgcatttttgtagagct

SEQ ID NO: 16957 - DNA, 281 bp, Zea mays
  Clone ID: MRT4577_115462C.1
cttgtttctggaattttagggaataattaataactccagaattcaccaaactttttaggtaaactttaaatattatttagaaaccttgggtaaagtttggtatgatttggaccatgtttgatacttagaacccaaaaccctagcatgtgccctatgaacttcactatcgactccgcgaactctagtttctcggagatccgtgaaggaaagttatattcaagaccttaaataataaacttatattatcttagcattttcataagcattcatatgcataatgc

SEQ ID NO: 16958 - DNA, 381 bp, Zea mays
  Clone ID: MRT4577_115463C.1
gagaaaagaaaaatgaatacaaatgtttctgtttctgaagatgttggtaagaatgttggagttaagaaaggaggatccatggaaggggagcttgtagaaggagttaggaggagcagcaggttggagtctaatgatgaaatgaagattgcagataaggcagcagcaagagcaatggctaaagatgcattcattaacaaagatcatttctaacggctccttttaccattaaggagattaaaaaagtggttttcgagatgaaacataatagtgctcctggtccggatggttttcctgcggaattctttcaaaacttttgggatttgattcaaatggatgtttggaacttattcaaggatttttatgttggaaatcttgatattg

SEQ ID NO: 16959 - DNA, 384 bp, Zea mays
  unsure (1)..(384): unsure at all n locations
  Clone ID: MRT4577_115464C.1
gacgtctcgcctagctcactcccgtagcatgatagacacgctctatgcccggcgcntgttaggtatctatcgtccgtcacacatacatataccttgcgcgcacggtatgggggtgaccattcgcgggggaggcctcctgtaagtcccgggcgcggttctagaacatggtgaggctgagaggcccgcccctcgcgttcgtccagtaccactacgtggcgctcctcctgcatcacaaggagctgaggcctcctacaccgtggagacacctggatcgtcagctgtacattcggcgactactggcagtcgacgcccccgaccatccaccatatataaccgaaactgctaggcgttgtggcaaacaacgtgaaagcgcttgagctcatc

SEQ ID NO: 16960 - DNA, 200 bp, Zea mays
  Clone ID: MRT4577_115465C.1
gtctattcttctgctagagccgctaatagaggcggggttaaaatgctacggggtgcacccacagccaagtcaactgctgcaaatgttctctaacaaggagagataatcctttactttttccagtggctatggagagcagcttatttgattacagatcatctaactttgaatcttctttcgatcgatcttttaattaagtg

SEQ ID NO: 16961 - DNA, 911 bp, Zea mays
  Clone ID: MRT4577_115466C.1
ccggccgggccgcgattatcaaccattcctgagaaaaggagacccacttcctctgatcctcttcaacccacccaccgtgggttcgtccagccttccggccttcccccccggtggtcatcacatctcccccaattcgccgccccctccgacctcgccgtactcctctcgctccgggttaatcgctgctgtcttctgcagttgaagtagcctcttcatctgctcgccgcagttcgtccgttgcccatggcggatgaggaggtaactgatccaaaggcgttcctagaggaacgttcaaaggctaagtgtgtgtcgcagtggtatgaatatcagaaatgtgttaagaggattgagaatgacgagactgggcacaaacactgtaccggccagtactttgattactggaaatgtgttgacaagaatgttgcagaaaaactctttgagatgttaaaatgacaagaaaagttttccctacttcagttatccacccaaagttggtaataattgtatcacttgtgtggcctatagactattaaggcgctcaatatttgttagagaagttttgccacttgggtaacacaaattttccactgccagtttgcatttcatttctgctactagtattgaaccagcaggtttcctcctgcattgttggataaaaaatccatcgaatatttacaagattgtggctgattattaaatgctgtaatacaccttaattgcttttacggtgtattttgaggagcacatagcaaatcatttgggtcctaaacttggatgtgtcggaataacatttgtacatcacttctagctggtggaaatgattcatcatgagcagaagtttgtagtactgcattggaatgaaacattggcacaacatagttttttttcaaaaaaaaaaaaaaaaaaggggc

SEQ ID NO: 16962 - DNA, 213 bp, Zea mays
  Clone ID: MRT4577_115467C.1
tgctcatcccagatgtacttaccaatttctcactcatcaacactccacacaatacgacaccttcaaatcggagtacgtatccgtcatgaacacgctattcatcatccaattcatcctattccactacttgctcatcctcctcttgcaagacatcaataacccttacatcatcaaccaagaccccatcttcaatatctacagtctaccaactca

SEQ ID NO: 16963 - DNA, 429 bp, Zea mays
  Clone ID: MRT4577_115468C.1
aagtaatcaaatgtttgtttcattatggcaagtaatcggtgatggttgaacaagaccgttgtaatttgaaagcatgcagctgattctattgattgcagttttatattgtgatgttgtgcgaggcatatgagtaccattttttcttcttaatatagcactagtgttctgataggcgcaggaaatcaacagctcgtgcagatgggtttcttcgagcaccctctcttgtcgacaaccttgttatatttcagaggttatttgtttgacatccatccatccatcttctctccaaatttaggtcggatgtacgagctctatcgacgttatagttgtgcctccgcgagtccgagctgacccagcagcgagtcaggtaccagcagtagagttgtttgttttgtcgtcccatactgaaaaatttatcatctatgcaca

SEQ ID NO: 16964 - DNA, 509 bp, Zea mays
  Clone ID: MRT4577_115469C.1
tcgcccttaagcagtggtaacaacgcagagtacgcggggatactaataacaaaggtggtggcgtacatacagacaagacaagcagccagctagagccaggagaggtgaaatgaaggacaggaggagaggtatggcgggacagctagaatagttgttgggattggtattggattccttattttctttgggtgtattctcttttgtcggtgccgggttttttctcttttgtgctcctttctggttcttgggggctttgatttgaaggaaatatcaaagctggacttggtgggaagccaccaactagtctgcccctaaatactataatcagattttatttgtaatatagtagtgttaactcttttttttgggtcaaattgtatacacatgaactacaagatatgtgatcttgcaaagaaacatagcagtaatgggtacatactgcatattatttttcgccaaaaaaaaaaaaaaaaaaaaaaaaaaagtactctgcgttgttaccactgctt

SEQ ID NO: 16965 - DNA, 1245 bp, Zea mays
  Clone ID: MRT4577_11546C.1
ccctcgagctgccggccgggccttcaacacactccactgctctcctccgctccactgcctcccatccctgctgctcccctctcccatcccggttccatcatgggcggcctctcggtgatcgcaccgcccgcgcgggactcggcttccccgcagcaccggcgcgcgcgccgcgcgttcctcgtgtccaactatctcatcctgggctgcgcctccgggtgcggcttcctcacgctctcgctccgcctggccccctccgtcgacggcttcctcctcatcctgctgcacgcgctcacggtggccgccgccgtggccgggtgcgccgtcatcgcggcgccggaccctccgcgcggccgctgctacaccgtccacatgtccgccaccgtcgtcgtctccatcctgcagggcgccgccgccgtgctcgccttctcccgcacgtcggagttcctctccgacggcctcaagtcgtacgtccgcgaggaggacggtgccgtcatcctccgcatggtcggcggcctcggcgtcggcatcttctgcctcgagtgggtcgcgctcgcgctcgccttcgtgctcaggtactacgtctacgtcgacagggagtgcggcggcaaccccatgcgccgcagcgccaaggtcggcggcgaggacggcgccggcacctggccctggcccttccaggtctgaagtggaccatgagtttttggaagggaaatcaagcgtcgagtgttatagaactatgtggggggacgggatgcacaatgttgtgattcgtttatttgtttattatgtggttttgtaatgtcatatttgtaacgctgttatatttatataattatatatgtgaaatttgcactgtaaaaaaaaaaaaaaaaaaaaaagcggccgcgcggagggtccggcgccgcgatgacggcgcacccggccacggcggcggccaccgtgagcgcgtgcagcaggatgaggaggaagccgtcgacggagggggccaggcggagcgagagcgtgaggaagccgcacccggaggcgcagcccaggatgagatagttggacacgaggaacgcgcggcgcgcgcgccggtgctgcggggaagccgagtcccgcgcgggcggtgcgatcaccgagaggccgcccatgatggaaccgggatgggagagggagcagcagggatgggaggcagtggagtggaggagagcagtggagtgtggtgcggaggaacggcgtgggggagatgtttaaatgaggttgccg

SEQ ID NO: 16966 - DNA, 3106 bp, Zea mays
  Clone ID: MRT4577_115470C.1
tgattattgataggaagaggaactaacgcttcaaaagcacgaaaccagaagcgctcattagatgatgcagttttgggaataacgcacatcattgtggatgaaatccatgaaagggataggttttctgatttcatgctgactattctaagagacttgttgcctttgtatcctcatcttcgtatggtactcatgagtgcaacaattgatgctgagcgtttttcgcaatatttcaatggatgttcggtcatacaagtccctggttttacctatcctgtcaaatctttctatttggaggacgtgctttctattctgcagtctgcagagcagaacacagaagtctacaattaccagcattcagagactggtataactcctttaatggtttttgctatgaagggtcagcttggggacgtctgtatgcttttatcttttggtgtggattgttcagcacaggatcatgatggaaaatccgcattagattgggcacaacaagagaatcaacaagaggtctgtgaagtaataaagaaacatatggagtgtagttcagaaaaatcaactgaagataacgagctgcttaacaagtacttggcatctattaatccagagcacattgatactctgctaattgaacggctgcttcgaaaaatttgtgtggattccaatgaaggagccatcttggtattccttcctggctgggaagatatcagtcaaacacgtgaaagattatttgcttctccattctttcaggattcatcaagatttcttgtgttgtctcttcattctatgatcccgtcctcagagcagaaaaaggttttcaaacgtccaccagtgggggttcgtaaaattattctctcaactaatattgcagagactgctgtgacaattgatgatgttgtgtttgtcatagatagtgggagaatgaaagagaaaagttatgatccatacaataatgtgtccacacttcatgcttcttgggtttcaaaagccagtgcaagacaacgcgaagggcgtgctggccgatgtcagccaggaacttgctatcatctttactcaaggtttagagcttcatccttgccagactaccaaattcctgaaataaaaagaatgcccattgaggaactttgtttgcaggtcaaactgcttgattcaaactgcagaatagcagactttctgaagaaaaccttggaccctccaatcccagaaactgtaagaaatgctattgctgtgcttcaggatcttggtgctttaacacaagacgaacaactaacagaattaggagaaaagctgggttccctgccagtccatccatccaccaccaagatgctcctgtttgctatattaatgaactgcctggatccagcattgacattggcatgtgcagctgattatagagatccatttgtccttccagtagcgcctgatgagaggaaaagggcagctgcagcgaaagttgagcttgcttcgttgtatggtgggttcagcgaccaacttgctgttgtcgcggcatttgactgctggaggcatgccaaagatagaggccaagattctcaattttgtgcgaagtactttgtctcttcaaacatcatgaatatgctatcaagcatgaggaaacaacttcagaatgaactgtctcaaagagggtttgtccctgcagatgcatctgcctgcagcttaaactctaaagatccaggtatcatgcgtgctgttcttatggctggtgcttacccaatggtagggaaaatgctccctcctcgcaaaaatgctagaaaatcagttctggaaacagcgagtggtgccaaagttcgtctgcacccacactcctgcaactttaacctatctttcagtaaatcttctgggaatccactgctgatatacgatgagatcactcgaggtgatggtggaatgtatataaaaaattcttcagttgttgggtcatatcctttgcttctaatagctgcagaaatggttgttgctccacctgatgatgatagtgatgaagatgaggaagattctagtgaggatgaagctgaggaaagcacattggtacagcacaaagaagagattatgtcttcacctgacagcattgtttcagttgttgttgatcggtggctccggtttgacgctacggctctggatgttgctcaaatatactgcttaagagaacgtctagcatctgctattcttttcaaagtgaaacatccacaagatgttctacctcctgcgcttggagcgtcaatgtatgccatcacatgcatcctttcattcgatggtttgccttctatggttccacctaatgacctttcagcaaaccgaggttcaggccaggatttagcagaagctagcaagttctctcagggaagaagagcgggttatattccacctagtggttttctgatgtccttgttagctgataggacccataatgcaccttctttccagaactcatctaaccatccaggaggtggttcagcgcatactcggccatccagggctcctgttggtaggtttgatcgatctcggcgacctttccgcaattctggacctgggagttcagcaccacgttctttcaaaaggcagcgcgacgctccacggtgagcagggcataaaggcagccttttgcatgccagccatttcggatgtgctttgtcaacggtgcctagtctaagaaaaggacgtgctatagaatcacaagctttgctgtgttccgttgtagaaatgaagggaaaagaattatagcactgcatcggattcctttgtcgaagagtttttgtaggtatgcccctgagtgttttgtgtactttgctcagccgagctcatttgcaccgtagacctcagaggtgcctgtaatcttttggatggagttcggatgttaaaaagaagtgggatagaaaagcgaagacctgttatctgctcaaatgatgagccccataattgacggtatcactggaccatagatgaactttgtgctgtagtgccatagacaatatggtgtgacgggcgagtggaatttgccctgcatcgcaagcgttaaattttgtccttgtatgtacgtacttagtaaacttagtaataaccctttctttgaatttagttttatagtgagtcc

SEQ ID NO: 16967 - DNA, 266 bp, Zea mays
  Clone ID: MRT4577_115471C.1
tccaccttcaagaaaacgatactatttgcccttccaactctatgcagacacatataggctcgatactaataccaaaaggacatgccacgtaaatccaacctctaacaaatcgctacatgacaatattgtattccatgaccgacacttatctctatcgcacaaatctaaaattgacgactgaattacgcatcatacatattgaaccatatcatgctcaacctttgatcgctaccatttacatactaatacattactagataattgct

SEQ ID NO: 16968 - DNA, 122 bp, Zea mays
  Clone ID: MRT4577_115472C.1
ccaatacattaaaccatcttatgttgggttgcttcgcatggacggcatccgttcaaccaagtggtgaagccaacacacattaaatgggttgcatttgtagcctacttagggcactggtgctg

SEQ ID NO: 16969 - DNA, 244 bp, Zea mays
  Clone ID: MRT4577_115473C.1
attttgagcatcagaaacacacctttgctattcacattagcaacaacctaacaacaatggctaccaagatattatccctccttgcgcttcttgcgctttttgcgagcgcaacaaatgcgttcattattccacattgctcacttgctccaagttccattatttacacagttccttccaccaggtacttcaatgggcttctgaacacccatctgtgcaagcctatttgcttcatacaagcaaattg

SEQ ID NO: 16970 - DNA, 605 bp, Zea mays
  unsure (1)..(605): unsure at all n locations
  Clone ID: MRT4577_115474C.1
agcaccagaaaattcgcaagctagcttaaatatctaaaagatagaagcaccagaaaattcgcaagttagcccttgaaaagctgttcgtcgttagctggcctggggatcaaaatccttgtctgaagacacaaaaggcctcacactctgatgggactgcggatccgtaggtgccctgatctggagaggcgttgcgagacaggaaaaggggaggactcgcgcctcatccctcatctcccacatccctaagttgagtattggccggtgaaatcagctatcctgtcaggactcacgtgtatgatggggatcgatactccttggaggtttgaagctccccaggaatcttcatctccattggactgcagaatctctggggttgagatgactgatgagggcacagcgtggaggggccgatgttctgttggtctgcactgtggattttgtttagcttcccatttggaagaagtgccttgcgtgtgtgttttttaccgagccaactgtcattctaaagctgagccattgcagataaatccgtgtgctgcgtgaggcttgtgtgtggtgtaccagacatgtagcatcaatgcaccattattgcctccnnnnnaaaa

SEQ ID NO: 16971 - DNA, 533 bp, Zea mays
  Clone ID: MRT4577_115475C.1
gactgtacaaggacgagagcgagaacagcggattcatcaccgccaggcgtcaggtcaggtgcgtgcgcatacatccatccgccacccttcacccgctcttcttctgccggtggttccctccatccgctcttctgccggtggttgcgaggtttgttttggttagatcactctgcgtattgttcttctgtcgactggacatgtctcgcctattcgaattccgttctgcatatctctcctcttctaattcctgcgtttagggtacatgtttcgtccagatctgacccctacatatggttgccttgttttacttgtgcgctgctgattcatgcttatgccggccctgtaattgtgcctgagctccataacgtagatcagatacgtttaggacccgtaatggatcgtggctaaatactgggttagttgctccgtggagcaaaccggatgtgatccatagaaccaaatgagtactccagaagcaccggtctgtccatacatgtcagcctgcttcgacccagtgcttccatggatcgggt

SEQ ID NO: 16972 - DNA, 425 bp, Zea mays
  Clone ID: MRT4577_115476C.1
cgtcgtaagctcggaattcggctcgaggccaatcgtgcatgctgtttactgccttttccgttcatgagccataattggcataacctctgtgcagagggaaaatgacgaaatggtgcctatgtaggccactaaaatgggatgggtgccctatgtaccgcttgaggacctgctgagtacgatcgacaggactcaaacaaaaatgtgcactctctgatgcgcccagccaatgtctgcactgaaacatgccaggaatgagagagccaagaaggttgactactgcatgccttactatatgctcgatggatcctgttgagtgactagaatgacactgttatcaggtttgttatatactgtagagaccccgatagtaggtgtgtatagactggcataatggacgactaccaagattttgctgttcagaaagt

SEQ ID NO: 16973 - DNA, 514 bp, Zea mays
  unsure (1)..(514): unsure at all n locations
  Clone ID: MRT4577_115477C.1
ggcgggagggatccaacgacccgcgcagaatggcgtgcaacaanaccgcagccacccccgaccaccagcccctgcccatgagctgcggcgccgcgtgacacgcgccacgcgaaccaagcggacccaccgacagaatccagcaggcccgacgaggaacagtccggaggaggcccgacacggcacgcgcgatgtcgacaacatggggcacagcggaccaagcagccgccggagcacaagccacgacgacagcgaacagagcgcccagaaggcacccgcaaagaacgctgcacggccggagcaaccgagacggtgacgacgacctccaccggaacgcccgtttgttgtctgaccacccccccccccggccggggacaccgcgactacttggtggaggcaccacacgacaaaaagaaaaaggcggacctcctgagccagaacggaagacccggaagcccatccctcggctacagagcagagcgagagcccgctccgttccgcgtgaaccggcgacaac

SEQ ID NO: 16974 - DNA, 163 bp, Zea mays
  Clone ID: MRT4577_115478C.1
gccccgtactgcagtgcagtgcagcagtgtgctacccttctcagtcctcttactttatcacatacgcttgtcttcctcggggagatcttttcaacgaccgacagctcggaacgagtcttagaagccatggcgtcaaagaggctgctgcttgcggcgctgtgcg

SEQ ID NO: 16975 - DNA, 450 bp, Zea mays
  Clone ID: MRT4577_115479C.1
gggggggggaatttttttaccaaattttacaaaaaacaaaaatttttcttcgcacaagagcagaggggttactacattgattaaaaaaaaaaaactttgaaggggtaaaaaatatttaaaggtttaaaaaaaatgctagctaaagggaccatcctaaaaaaaaaaaaaaaggggggggttacttataaaaaaagggggagcccaccgggccttaaaaccattaaaagggggacaaaactataaccgggaaaaaaaactattttaggggggggtaaaaaacccccccttgaaaaaaatttttagggtggcccaaaaaaaaaatcctggggagaaacccgcgcttgggggcgacttggggcgttttttgcatcgggcgattaattaacggcccagtttaaaacgcgacccaatacttgtacaaaaggggaaaaatcctgggtcgagcttcct

SEQ ID NO: 16976 - DNA, 133 bp, Zea mays
  Clone ID: MRT4577_11547C.1
attcggctcgaggccagtgaacactaggcattttctcttgcttccacacgatctctagctggggaccttcgtaaagcgcatacttacagaactgtgaaccgatggcgccatgtacaggagctatggtgcatgt

SEQ ID NO: 16977 - DNA, 262 bp, Zea mays
  Clone ID: MRT4577_115480C.1
ggtactgctcaaggcgctgccgcaccatgtaaataaacaagggacggctcatgatatcccagcgaggctttgatcgtgtcatccctaatccatgaggattgatggggatgagagtggatcgagggagagagaacctgatggccaattcaatgcatctgaataatgatatattagatctagacaaacatgtccctacatactgcacagatacgccatgtcatcacacagaattggcagcatggcatgcataactagtgctacc

SEQ ID NO: 16978 - DNA, 459 bp, Zea mays
  Clone ID: MRT4577_115481C.1
gaaaccccagggaccccccccgggcgttattgggcctaaaaaaccaaaacggggggtttttaaggagcccccatggttgggggaaggaaaaggtctttaaaaaaatttaccccccccggggcagggccttttgttaggggcggccgggattttttaagggtttggccctgtttgggccccttggaaagcgaaaggccccccggaacctggaaagcgagcggaaccggccccttttggggctttggccccaacaacggttttggttttatccccccctttttgggggggaacggttaaaacttttacgggggttacaacccttgtttcccccaacttcaacaagttttcccggcctttggcgccccgggcctcgtttttgggaaatctaaaaagccgggcccttttaaattggctgggaaaggcggtggcccataatcccctaaagccttttttgggggg

SEQ ID NO: 16979 - DNA, 362 bp, Zea mays
  Clone ID: MRT4577_115482C.1
cgatcgacatattattgagagcatctagcaacacaccaagcgcagtgcagtaccaacaactgtaacaacaaaagagtttccgacgtacttatgcctcttctgtgcgctttctgtgcgcgtctgtgacgagcgcaacattatgcgcgccatgtattgcacagctgctcatattgtctcctatcttccattagttccatcatgaccactcggagcagtttacgtttagtgagaactcaaacattcaactgtgcaagactctacagtacaacaagcgagtgatgttagcgttataaaacatcgaactgcacaattgatacaacatatctcggcacatatatcagtacgaaccattggaacgaaac

SEQ ID NO: 16980 - DNA, 401 bp, Zea mays
  Clone ID: MRT4577_115483C.1
tcgaggccggccggggtaaggcttctctacgtgctcgtggcgaacgactgagcaagttcttgtagccagaagtttgctgacggtcgagaatgcctcgttcctctggattcgcacgccgcgtcgaggtcgatgcgcggtcctaacagcaaaggcactggtatctcgtcatcgaccaacgactcccctttgttctgcccctgtgcctggaacaagttctggatggcaatctacctcgaccaacgccgacgacacgacaccgaaaggcggcgcttccgccgacgacagctagcccttccggggggaaaacggcaacacccacgtcgagcacgaccacgaccttggagactacgtcgatatatggactctgatctctaggtgacgagagagctccgcggtcgtaa

SEQ ID NO: 16981 - DNA, 188 bp, Zea mays
  Clone ID: MRT4577_115484C.1
gttcatgacttgcgaaatgtagtcatcaactaatacatgtgctagtcatcgactctgactagggacatcatttaaaataaccatataagtaaagaatctcacaaacaattcacataattgctaatcaatacaaggggccttccatggatattcaattaagcaatatatatatcatggatacaaagaaa

SEQ ID NO: 16982 - DNA, 636 bp, Zea mays
  Clone ID: MRT4577_115485C.1
gtccactctggccttcgtgtcgttcttctccatcggcctcgggcccatgacggcggtgtacacctcggagatcttcccgttgcgggtgcgcgcgctgggctacgcggtcggcgtggcgtgcaaccgcgtgacgagcgtcgtcgtctccatgaccttcctgtcgctgtccagcgccatcaccatcggcggcagcttctttctctacgccggcatcgtcgctctcgtgggtgttcttcttcacgtgtctcccggagacgcgcggccggacgctggaggagatgggagagctgttcggcacgattgacgcgggcaccgaagcagatcgtgactccgccgcgagactcctttcgtcagagttgaccacatgatactccttttgcgctttggtttgtctgcagtaagcggtgcaatcatatgtgcaggggcgggtgccagagggagagaggggatgaggagggccaggcgcccaggcacacccccttgcttggtgtgtacgttattttctggctccccctaggtgtttgtgattatgaatgtactttactctttactatagatagcagtatgtctgtgttaaagttaggtggtattcagatatatagattaattaaaacaactaaaatatggtttctctgt

SEQ ID NO: 16983 - DNA, 1199 bp, Zea mays
  Clone ID: MRT4577_115486C.1
ggttattcattcgtccttctattatctttgcctttgtcttctttcctaagatttcactacttctgcggggtgtcacagtcttaagatcatgtcagggtaggaaatgatgtccgagagtgaagagcatggctcgctcctagacaagatcaacgacaagatcaacgagaagatccatgagtacaagcactcgtcgtcgtcctcctcctcttcggactcagacgatgacaagaagcccaagaagtctaagaagaagaagctttttggaagaaaacatccattgcatcatgtcctcggaggaggcaaagccgccgaccttgtgctgtggaggaacaaacaggcatctgggagcatcttggtaggggtgaccgtgatctggttactgttcgagggcatcggctaccacctccttaccttcctctgccacgcactaattgtgtttctcaccatctggttcatctggtccaatgctgcgtcctttgtcaacaggtctcctccaaagttcccagaggtcattctatctgaagcccagtgcctgaaggtagctcatgttgcaaggaaagaaatcaacgaggctttctatacattgcgcaatgttgcttctggaaaagatttgaaaacatatctgatgacagttacagtgctgtggttcatttccataattggaagctgcttcagtttcttgactctgtcttacactattttcctgatggcatacactctgcccatgttgtatgagaaatacgaagatcaagttgatatcgtaggcgagaaggccctcattgagataaaaaagcagtacaaagtgattgatgcaaagtttatctctaagatcccaatgttgtctgagaagaaacaacactgagagagggtgctccaaaggtctaattcagcacattaccaatatatgaaagtagttcctttggctttgctatatcatcatttagcaacctttaagatgataccatagatattatatggattcctaaggttggaaatttgtgtcttccgagtcccctagaatagttgcttcttcctgtctgacagtgaatttgattttgtatggatgtgacatatatatgcctgaccaattgtcattatttgctattcatatatgttactgggtgtatttaatagctctcaatttatgcagttatgtttgcagttgaaaaaaaaaaaaaaaaaaaaaaaaaaatataaaa

SEQ ID NO: 16984 - DNA, 267 bp, Zea mays
  Clone ID: MRT4577_115487C.1
ctcattcatacatgtcagttagctagaacactggtgatatagaaaaccatgcacatctttctgcttgggtgtgcaagatgcattggcaacaatgctacggttggcacatgcatgcatttacgtatgatgcgtgaagctttgatagatggatcaggatgtgcaaaggcagcgggatacaagggtgtgtttgggactattgccaggttccctagccacacgagacgctcgccagccagcctgggatttggctctctctctctctcgagg

SEQ ID NO: 16985 - DNA, 1619 bp, Zea mays
  Clone ID: MRT4577_115488C.1
cccacgcgtccgcccacgcgtccgcccacgcgtccgcccacgcgtccgcccacgcgtgcgcccacgcgtccgcccacgcgtccggttgagtggcaacccggtagcacaataggagttgtgattgttgattcaagttactacgtaagtacgtatattagagcatgactaataatgcgaatattgttaaaatggatacgcaggagggcaggaggtgagcttttgcatgtctagatattagcagagtaacgagggatcgattgctatttgtgattgtccccggcccgtgtttggctactcaccgttcaatttcggtttctatcccaatgatagaggcgaaggtgaaggcatgaagacccgaaactgaaaccaaaaataaactgcaggcagagggggaaggagagcggcaggagggtcattaaataaatctacttttctgtttcagggtaggaaatgatgtccgagagtgaagagcatggctcgctcctagacaagatcaacgacaagatcaacgagaagatccatgagtataagcactcgtcgtcgtcctcctcctcttcggactcagatgatgacaagaagcccaagaagtctaagaagaagaagctttttggaagaaaacatccattgcatcatgtcctcggaggaggcaaagccgccgaccttgtgctgtggaggaacaaacaggcatctgggagcatcttggtaggggtgaccgtgatctggctgctgtttgagggcatcggctaccacctcctcaccttcctctgccacgcactgattgtgtttctcaccgtctggttcgtctggtctaatgctgcgtcctttgtcaacaggtctcctccaaagtttccagaggtgattctatctgaagcccaatgcctgaaggtagctcatattgcaaggaaagaaatcaacgaggctttctatacattgcgcaatgtcgcttctggaaaagatttgaaaacgtatctgatgtcaattgcagtgctttggttcatttcgataattggaagctgcttcagcttcttgactgtgtcttacactattattttgcagttttcctgatggcatacactctgccaatgttatatgaaaaatacgaagatcaagttgatgttgtgggtgagaaggcccttattgagataaaaaagcagtacaaagtgattgatgcgaagcttatctctaagatcccaatgttgtctgagaagaaacaacattgaaactgcgctacagaggtctagttcagcacattaccaatatatggaaatagtttgattagctttgctatattaacacttcacattctttaagatgacaacatagatattgtatggattcttagtgttgactcttccgagtcctagaactgtgtcaaccatcatataaagtagttgcttcttcatgtcagatagtctatttgattttgtattgatgtggacatatatatgcttgacattgtgattatttgctaaaaaaaaataaaaaaaaaaaaaactataaaaaaaaaaagaaataaaatgaaaaaaaaataagaaaataataacaaaatggaaccaaaaaaaaaaacaaaaaacgaaaaagaccgggaaaataaaaaaagggggcgccccttttaaagg

SEQ ID NO: 16986 - DNA, 212 bp, Zea mays
  Clone ID: MRT4577_115489C.1
actttgcctacacacataagcccccgctacccccattaattaaacccacaaacccaaacggccgaaaaaccctccattaaagcacaaccatcccacgaaaaaaatgttcttcacaggatttaaattaagccgtcctggacacacctacctgggacacatacccaaaaagggcctccttcctcatttttaacatacccaacgcgcacttgggg

SEQ ID NO: 16987 - DNA, 264 bp, Zea mays
  unsure (1)..(264): unsure at all n locations
  Clone ID: MRT4577_11548C.1
acgcaacctctaaattcaactctagctcaactattcactcaaacanttaatgaagcaaaatgaactttttaagagttattggcnanacnnanctataaaccttaaaacaaagataattcacattgatctcaaatataaatagtacaagagaaccctctgccaaattccctcaacccgatggatccaattcttacataccgtcctcaaccactgtggaactccaacttttattccatttaataagggtcaattaacagctccaaa

SEQ ID NO: 16988 - DNA, 1314 bp, Zea mays
  unsure (1)..(1314): unsure at all n locations
  Clone ID: MRT4577_115490C.1
cctcgaggccggccgggaacggccccgtggtagcgaggagatcaggaattcaggagagcaaaaggggagagagaattttcgcgggagagcggggcggcaaggggagagagaatgaattgaaacgaaggcccgcgacgcgaggagcgagggaactaccaccggttctcggcgcctccgcgacgatagcctctccgacctcgagcgcggtccggttcctccctgcgtcagcacgcgagcccttggagcttcgagtcagatcccggcgggcgcccatggtggctctggtgccgttgagccgcgcgatgtagggttttcgcgcgccgcagagtaggagcgatggggcgccggaagatgtccgcggcggcaccgccgtctcggagctggtccaacgttggcggaagcgtcatcccggaacttcgagctaaacacaaaacagacttgcagaatttgacgctgaccaaacagccactcagaacattgcattttttcctgttagccatgttacaatacttgaaaagattagcaacatatatcctgagtaagggtggtttcttctttctcctaattgttttattggtagcttctggaatcttgctcgtcgtttcggatggtctgcataagaagcatgtgcaggaattccttaattatgctaaattcgtgttgtggtggatttcattaggtgtggcttcatcaattggactaggttctggtttgcatacatttgtgctgtatctgggtcctcatattgctctgttcactattaaagctgttcaatgtggccgaattgatctgaaaacggctccatatgataccatacagctaaaggttgggccatcatggctcgacaagaaatgttctgaatttggtccgcctgtgtatccagcatcagctcattctgttaggatccccgtctttgatttactacctcagatacagctggaagcagttctttggggcattgggactgcacttggcgagcttcccccttattttatatcacgagcagctcgcttatcaggaagcaagtcaaaagctgttaaggagcttgatgccgctacttccaaagaagatgggacagtagcatccactcttgatcgctccaagcgttggcttctttctcactctcaacatctcaacttcttctctatcttgatacttgcttcggttagtgccctgtctgccatttntttgttaccaatttcttcagtgtggaaatcttaatacccatattttgtttattaaagatttgactttgtgccttgaaaatttacttttggactgttgccagggtttaggttctcacattttaaagct

SEQ ID NO: 16989 - DNA, 422 bp, Zea mays
  Clone ID: MRT4577_115491C.1
cccacgcgtccgtttttttttttttttttttttttttttcatatcaaagcctgattgtcaggcacatgaaattgtactaaaattaagaaaatataatacagattagtctgactggctgcgattcagccgcagcaataaggtcgtgctagcttggcgccgtctcatcgtctaggcataactgtccgatcacagcgtcttcaacttcataaagtaaaaagcaaatttggatatcaatctcccatagtcctcttgtccataccgaacgccgggccgacccgatccccgattatctctctctctctctctttcttatgtttccaatatttattttcgtagactcagagtcaaatctcaggccttttcaagacaccactggtccatacctgcttattttcctggcggaggtcccgcaggagcttgga

SEQ ID NO: 16990 - DNA, 2311 bp, Zea mays
  Clone ID: MRT4577_115492C.1
ggccgcaaattttttttttttttttttgatccaccacactccccgatatggcggacccacttatcaatcgatttatgggccccgcgtggcagagtcaaaagactcggaagggagttggttggtttttgtttcctccccgcacccgcaacaacggaaacaacggccccgtggtagcgaggagatcgggaattcaggagagcaaaaggggagagagaatgaattgaaacgaaggcccgcgacgcgaggagcgagggaactaccaccggtgacgtctcggcgcctccgcgacgatagcctctccgacctcgagcgcggtccggttcctccctgcgtcagcacgcgagcccttggagcttcgagtcagatcccggcgggcgcccatggtggctctggtgccgttgagccgcgcgatgtagggttttcgcgcgccgcagagtaggagcgatggggcgccggaagatgtccgcggcggcaccgccgtctcggagctggtccaacgttggcggaagcgtcatcccggaacttcgagctaaacacaaaacagacttgcagaatttgacgctgaccaaacagccactcagaacattgcattttttcctattagccatgttacaatacttgaaaagattagcaacatatatcctgagtaagggtggtttcttctttctcctaattgttttattggtagcttctggaatcttgctcgtcgtttcggatggtctgcataacaaggtttgttgcatgttcttctcttgtctttgtcttaatcagcgggatacatgtgcaggaattccttaattatgctaaatttgtgtcgtggtgggtttcattaggtgtggcttcatcaattggactaggttctggtttgcatacatttgtgctgtatctgggtcctcatattgctctgttcactattaaggctgttcaatgtggtcgaattgatctaaaaattgctccatatgataccatacagctaaaggttgggccatcatggcttgacaagaaatgttcagaatttggaccacctgtgtatccagcatcagctcattcagttaggatcccagtcttcgacctactacctcagatacagctggaggcagttctttggggaattgggactgcgcttggtgagctccctccttattttatatcacgagcagctcgcttatcaggaagcgagtcaaaagctgttcaggagcttgatgcagctacttccaaagaagatgggccagtagcatcatcccttaatcgaaccaagcgttggcttctctctcactcccaacatctcaacttcttctctatcttgattcttgcttcggttccaaatccactctttgaccttgctggtattatgtgtgggcaatttggtgtgcctttctgggagttcttgtttgctactttgattgggaaagccatcatcaagactcatattcagacactatttatcgtgtccctgtgcaacaatcagctcttgtatcttattgaaaaggagttaatctggatatttggtcacgttcctgggttttctgccacccttccgtctgtgattgccagactccatgctgccaaggacaagtatctatcaccaccagccccagtctcaccgtcatcacaaatgggggagaaacagtggaatttctcttttacatctgtctggaactctatagtgtggcttgtgcttttgaacttcttcattaagatagtcacgtcaacagcacaggattatctcaaaaagcagcaggatacggagatggaacttatttcggattccccgatccaggaccattctaaaactaactagtggcgcagctagtggtgtttatacacagctgctagcagcaaagattctcctctgtagcttaagcccctgcagatgatttcaagttccaacaattagtattagtagttattcatctgcgcagtggacaaaaacatggacacatggtcttggttaacttgtcagttgacgaccttttgtcattgagcctgtacctgtactggcagctcctgttggagtcattctgtttattttcggacatctacacggataaacagtaggaattgtttatggagcacggttggctttttttgaagtgaagagcacggttggctttgtgagatgtatcattcatacctgttcctatgtattctgggaacttgaaatgcaatagaaacctgggaggatttaacaaggatacatcattgtgtcaagtttactatgtgcatgtggtttgcaatttgcaccggttaaaaaaaaaaaaaaaaaaaaaaaaaaaaaaaaaaaaactcgagactagcctcgtgccgaatt

SEQ ID NO: 16991 - DNA, 292 bp, Zea mays
  Clone ID: MRT4577_115493C.1
gaccatgcacctcacctaacagtcaccgcccaggctacagaatgcacgccagctacgtgaccgaaacaacccagatccgtgaagcctgcactcgtgctctgggcttggacacacagtttgttgaagcagacttaaaccatggacgtctcctggcctacatgggccagatcctgaccacagagatgaaatgagtggaaaaggaagctaagcctattggcgctgagggaattaattaaaaaggaactcagtagccccacgtgttcgacgtatgtgccgtaaataagcggggcat

SEQ ID NO: 16992 - DNA, 209 bp, Zea mays
  Clone ID: MRT4577_115494C.1
atttatttaattttttttgggaaggggaaattatagctgtccttaaaacttttagggcagacccacaaattatttttggcaaccctccctaaaatttgataccaaaaacggtttctattgggaaacaggggccctttagttttggtttttggccccacaaatcgaacaaatccttaaaacttgggggatataaagggctgggaatctaa

SEQ ID NO: 16993 - DNA, 690 bp, Zea mays
  unsure (1)..(690): unsure at all n locations
  Clone ID: MRT4577_115495C.1
cattgggtacctcgaggccggccggggttccgctccactccgatcggattcggtgggacggtggcatctatgcgcccgtcgcaccgtcgctcaaactgtataaacctgcgcccgaacacttcgagctcacccgcaacctcctccgggaagcgcgatcgccgtctcgaaggagctgaaatccaagattccaagctcttctgtcagttgagggaagttgaagcaaaagtctaacaaaaaatgttttacgggggatatgcttaccatggcaactcgtttgagcaaacataccgttgttatccagcatcgttttttgataagccacacctggaaggcggcgataaagtaataatgccaccttctgcccttgatcgtcttgcttccttgcacatcgagtaccctatgctatttgagctgcacaatgatgcaacccagcggatttcacactgtggtgttttggagtttgttgcagaagaaggcatgatcatcatgccctattggatgatgcaaacatgctgcttcaagagggtgacactgtccatgtcaaaaatgcgactcttcccaagggcacatatgtgaaattgcaacctcacacaactgattttctggatatttcaaaacccgaaagcatctttggaaaaaacttaagaaatntttcctgcttaacccgggagacagcatcatggtagccta

SEQ ID NO: 16994 - DNA, 1672 bp, Zea mays
  Clone ID: MRT4577_115496C.1
ctcgaggccggccgggcgaagaggagtgctccaggtttataccggcggctctctgtttctcgaatccccgatcctatctcatcgaatagaaactgttccgctcccactccgatcggattcggtgggacggtggcatctatgcgcccgcggcaccgtcgctcaaactgtataaacctgcgctcgaacacttcgagctcacccgcaacctcctccgggaagcgcgatcgccatctcgaaggagctgagatccaagattccaagctcttctgtcagttgagggaagttgaagcaaaaatgttttacgggggatatgcttaccatggcaactcgtttgagcaaacataccgttgttatccagcatcgttttttgataagccacacctggaaggcggtgataaagtaataatgccaccttctgcccttgatcgtcttgcttccttgcacatcgagtaccctatgctatttgagctgcacaatgatgcaacccaacggatttcacactgtggtgttttggagtttgttgcagaagaaggcatgatcatcatgccctattggatgatgcaaaacatgctgcttcaagagggtgacactgtccatgtcaaaaatgcgactcttcccaagggcacatatgtgaaattgcaacctcacacaactgattttctggatatttcaaacccgaaagccatcttggaaaagactttaagaaatttctcctgcttaaccacgggagacagcatcatggtagcctacaacaacaaacaatattatattgatattgttgaaacaaagcctgcttcagcagttagcattattgagacagactgtgaagtggactttgcacctcctcttgattataaagaacctgagaaactacgacaaccaacagttcttgcaagcaaggcacctgctgaagatggcaacactgcagcagaggatgaaccaaaattcaaaccatttactggttttggaaagcggttggatggaaaagcctcaaaactgcaagcatcagaggttccttccactgcactttctgcaccttcagattcaaacaaaagagcaaatcagcaaatctcagcaccggcagcttcaggagctagtagttacagtcgacagaaaactgggaaacttgtttttggttcaagtgcaagcaacaataaggaaccacaaaaggctcctgctaaagaggagcaacccgcaaagaaggacgacgagccgaggttccaagcgttcagcgggaagagctattcattgaaacgttagctgcttcagttaaccttgaaattcgccgctactctttcgtttgttgcatggtgggtgttctggcacctggtcaccaccatgtagatatgaattgaagtatgttatatgcttatcttgatggaaacatgacagtctgtttatttaagcccaaaagtttaaaacagcgacattgttcttacccagtgtgtgttttggaatctgctcctgttaattttcgggccatggtttcggattagtagaccgaagcaagatactgaacgtgtcaacaatcagtcttagcggcagacgagatgtgatgattgttgggccctgggagtttggtcatgtaccaatattatagaccgtactccaagtctccaatactgattgctgaatactgaacgaggagcaagtaaacaagctccttcatgtc

SEQ ID NO: 16995 - DNA, 508 bp, Zea mays
  Clone ID: MRT4577_115497C.1
aatggtctattctccttattgatcagtcgaatcgcagtggttccatggaatttgttgtttcccccagctgatccgtcatcatttttccccatctctgttggattttctgcatcgagtactttcagtgatctgaaggttactggaatccttcctctgaaggaaggcaaccctccgaagttttcccagcgggctcgtttgctcacagctaactatcaagttgtttaatggttgtaccgttgtccgagtgttgatccacttaaatatattcgaatagcatatttttgtgacatggtatgctactggcatgaacttttgcaagtcatgggatggaagatcattttgggttttgaaaatctttactatgtgcttctcattgttagcatgttgcacaaatgttctgatgtgttgctaccagagaaataagtaatgttcttgcctttcgtttgcctgcattttgtacccgttctttccccttgaggataatcttttaaggacggtgttatcgtcc

SEQ ID NO: 16996 - DNA, 1767 bp, Zea mays
  Clone ID: MRT4577_115498C.1
cattgggacctcgagccggccgggaaatccagcacgaggcaagatcattttagacccaagaatactgatcctggcctcatgggcccatggatgctccgtgcgatcgtgcattcgtgctcgtgtcgagaacccaatccggtccactgagcccaaccataccggcggctctctgtttctcgaatacccgatcctatcgcatcgaatcgaaactgttccgctcccactccgatcggattcggtgggacggtggcatctatgcgcccgtcgcaccgtcgctcaaactgtataaacctgcgcccgaacacttcgagctcacccgcaacctcctccgggaagcgcgatcgccgtctcgaaggagctgaaatccaagattccaagctcttctgtcacaggttgagggaagttgaagcaaaagtctaagcaaaaatgttttacgggggatatgcttaccatggcaactcgtttgagcaaacataccgttgttatccagcatcgttttttgataagccacacctggaaggcggtgataaagtaataatgccaccttctgcccttgatcgtcttgcttccttgcacatcgagtaccctatgctatttgagctgcacaatgatgcaacccagcggatttcacactgtggtgttttggagtttgttgcagaagaaggcatgatcatcatgccctattggatgatgcaaaacatgctgcttcaagagggtgacactgtccatgtaaaaaatgcgactcttcccaagggcacatatgtgaaattgcaacctcacacaactgattttctggatatttcaaacccgaaagccatcttggaaaaaactttaagaaatttctcctgcttaaccacgggagacagcatcatggtagcctacaacaacaaacaatattatattgatattgttgaaacaaagcctgcttctgcagttagcattattgagacagactgtgaagtggactttgcgcctcctcttgattataaagaacctgagaaaccacgacaaccaacagttcctgcaagcaaggcacctgctgaagatggcaacactgcagtggaggatgaaccaaaattcaaaccatttactggttttggaaagcggttggatggaaaagcctcaaaactgcaagcatcagaggttccttccactgcactttctgcaccttcagattcaaacaaaagagcaaatcagcaaatctcagcacccgcagcttcaggagctagcaattacagtcgacagaaaactgggaaacttgtttttggttcaagtgcaagcaacaataaggaaccacaaaaggctcctgctaaagaggagcaacccgcaaagaaggacgacgagctgaggttccaagcgttcagcgggaagagctactcattgaaacgttagctgcttcagttaaccttcaaattcgccgctactctttcgtttcgtgcatggtgggtgttctggcacctggtcaccaccatgtagatatgaattgaagtatgtatatgcttatcttgatggaaacatgacagtctgtttatttaagcccaaaagtttaaaacagcgctattgttcttagttcttacccggtgtgtgttttggaatctgctcctgttaattttggggccatggtttcggattagtagaccaaagcaggatactgaacgtgtcagcaatcagtcttagcggcagacgagatgtgatgattgttgggccctgggagtttggtcatgtaccaatattatagaccgtaaaaaaaaaaaaaaaaaagcggcc

SEQ ID NO: 16997 - DNA, 368 bp, Zea mays
  Clone ID: MRT4577_115499C.1
ccagggcccaagggcatgtttttggccaaaatgggctccagatgtttaggacccacattgtctgggatgggctccgggttcaaacccaagcaaaagagggcttcatcatgcagggccataaatgatgcagccaagggaagattgatccaatcccccaaaaaaaacaaaaaacaaggggaaaatggttaaccccgggggggaagggagccataatttcctcctcccaaaaacagaagaaggggcccgttgggctccaggtgggccctgccctgaagcttcctttggtatgtgggaagttgccgtaacagctttcatgacaataagaccaaggggaatgatgtccatccaatttttagcccaaaaggatt

SEQ ID NO: 16998 - DNA, 383 bp, Zea mays
  Clone ID: MRT4577_11549C.1
tttccctcagtaagtattttattgagattgaaagcacaaaataggtgaacaaatcgggaggaaggtggtaacacaggaatgggaacgtaaaagtcaaagtaggcaggactcaaactggccataaaggcactacggcatgttcataaacaccatcaagtaaaagaaaggggaatcaagatgttctcacttcttttctgctccaccttaatactccatctagccactggtatggagcatgtcatcaactcattcttctcacaagctagcaagggaattaaacattttatcagtcaaccctatgctcaccaagtgagccaatgttacacagtgattttgtgcatccagtgactgagaactacaggcaaggataggccctgactgtt

SEQ ID NO: 16999 - DNA, 1060 bp, Zea mays
  Clone ID: MRT4577_1154C.1
cattgggtacctcgaggccggccgggagctcgcactcactcactcacaagtcacacagccacacttgaaccgctgcccgcagcggagggagcttgcacgggccaacgcacacataacacaagctcgtcgtcgatggcgcggtgggctgcggtgctggcgctggccgcggccacggccatcgccgtggcgtccgtggcgggcggcgacatgaacgcggacaagacggagtgcgcggaccagctggtgggcctggcgccgtgcctgcagtacgtgcaggggcaggcccgcgcgccgccgcccgactgctgcggcggcctgcgccaggtgctggggaagagccccaagtgcctgtgcgtgctcgtcaaggacaaggacgaccccaacctgggcatcaagatcaacgccaccctcgcgctcgcgctccccaacgcctgcggcgccacccgcgccaacgtctcccactgcgctcagctcctgcatattcccccgggctccaaagacgccgccgtcttcagtcccggcagcgacaagggctccactgccgctccagccaaggacaactcgacggcgacgaccgactcccgcgcgctgcaggcgaccaccggacgcggcgtgtcctcctcggcggcgaccgccggtgctgcactcacggtgctgctcgccggctacctcctcctgctcgtgccagagctgtcgcctagctcgttctagaccctctgtcaagttgtgccaccagtaggatttgatatgttgttgttctttctagtacgtgacgtgacagacaatttgctgctggtgtccttgttgttgtagtagttgcactgtgtgttcctgttatgctatgggtacgagatgttagggcatgggttaagctaagctaaggcgatgggggatcagtaccttacctctcatctctggctgctgatcctttttgttcttggcactgctgttttatctgaacatttgatcagccaagaaaacttccactcgtgacacggttaatgggatagagactaggttaatacaaaaaaaaaaaaaaaaaaaggtgacaaaaccgatt

SEQ ID NO: 17000 - DNA, 711 bp, Zea mays
  Clone ID: MRT4577_115500C.1
atggccatgctggttcgccccgatcattaccagaccgaggaggcgctcgactcggtgcgtcgcctactcagatggggcacgcctgcgtttgccggaaggatccgggccgacactactccccttggcgatcttgctgccggggagtttgtgcccttcgtctcctatctcttctgcgggttggcgctgccgatttcgccgttcttcctgctgctgctgctggaggagttcggacttcaactccagcatctcacgccccactccatcctccaggtggccatctttgtccaattctgtgagatgtttgtgggagtggtagcttgcacttcccttttctaccaattttttgtgctagtgaggtctagtaagggcaaagaccaccttggggcctactacttccagacaaggtcagatccaacagtgacctacatcgcctcccttggcggcgcgaggtgggagaactggcgaaacgactggggggtcccccgggccgggcgggccgagcttgagcatgaggacttcaaggaggacattcagaaggtgtctaaccgagaggaggacgtgacccggaaggagagaagcttggtcaagaagaaggaacacttagaccaaagggaggaggccgtcatagtgctccatgataagctcaaagcttataatacggtgttggagaaacagcgggacaagcaggctacggctgtggcgaagctgtag

SEQ ID NO: 17001 - DNA, 1804 bp, Zea mays
  Clone ID: MRT4577_115501C.1
aggcgaaactgttccgctccccctcccggcggctcccgggggcgcgtggccccgatccgcccgccgcgccgtcgctctgtcccgctccccctccgcccggactcggcgggcccgcggcatctatgcgcccgcggcaccgtcgctcaaactgtataaacctgcgctcgaacacttcgagctcatccgcaacctcctccgggaagcgcgatccggatcggattcggtgggacggtggcatctatgcgcccgcggcaccgtcgctcaaactgtataaacctgcgctcgaacacttcgagctcacccgcaacctcctccgggaagcgcgatcgccatctcgaaggagctgagatccaagattccaagctcttctgtcacagctgtgctcacgcaacttcgtgttatttgttcgtagcaggttgagggaagttgaagcaaaagtctaacaaaaaatgttttacgggggatatgcttaccatggcaactcgtttgagcaaacataccgttgttatccagcatcgttttttgataagccacacctggaaggcggcgataaagtaataatgccaccttctgcccttgatcgtcttgcttccttgcacatcgagtaccctatgctatttgagctgcacaatgatgcaacccagcggatttcacactgtggtgttttggagtttgttgcagaagaaggcatgatcatcatgccctattggatgatgcaaaacatgctgcttcaagagggtgacactgtccatgtcaaaaatgcgactcttcccaagggcacatatgtgaaattgcaacctcacacaactgattttctggatatttcaaacccgaaagccatcttggaaaaaactttaagaaatttttcctgcttaaccacgggagacagcatcatggtagcctacaacaacaaacaatattatattgatattgttgaaacaaagcctgcttcagcagttagcattattgagacagactgtgaagtggactttgcacctcctcttgattataaagaacctgagaaaccacgacaaccaacagttcttgcaagcaagacacctgctgaagatggcaacactgcagcggaggatgaaccaaaattcaaaccatttactggttttggaaagcggttggatggaaaagcctcaaaactgcaagcatcagaggttccttccactgcactttctgcaccttcagattcaaacaaaagagcaaatcagcaaatctcagcaccggcagcttcaggagctagcagttacagtcgacagaaaactggaaaacttgtttttggttcaagcgcaagcaataataaggaaccacaaaaggctcctgctaaagaggaacaacccgcaaagaaggacgacgagctgaggttccaagcgttcagcgggaagagctactcattgaaacgttagctgcttcagttaaccttcaaattcgccgctactctttcgtttcgtgcatggtgggtgttctggcacctggtcaccaccatgtagatatgaattgaagtatgtatatgcttatcttgatggaaacatgacagtctgtttatttaagcccaaaagtttaaaacagcgctattgttcttaaaaaaaaaaaaaaaaaaaaaaaaaaaaaaaaggcccccagtgtgtgttttggaatctgctcctgttttgggggccatggtttcggattagtagacccaagcaggatagtgaacgtgtcagcaatcagtcttagcggcagacgagatgtgatgattgttgggccctgggagtttggtcatgttccaatattatagaccgtactccaagtctcc

SEQ ID NO: 17002 - DNA, 428 bp, Zea mays
  Clone ID: MRT4577_115502C.1
attcatgatcacctattaggaagaggtatgtaggaacgaataacaattattagggattcaagatctagtcattagaagtacttaaatttgtttattacatcgggctagtttatcttcatgtaccatcatgacttaatccctgctaatttattggtttcctaattttttatatgtgcgagctgcaatgttaagtttgtggtttatgagaccttttattctattgttcaaccatgatctaccatggagtctcattaccatccatttataactttgggtgggggttgtagccgtgtagggtcatgaatgttggtatcaccaaggagggtttttgatcttatgttaggcatgtgatctgtatacatgcttttttttgcaagtttatggcttgcttgtgaaattgcctatctttatgcttatgctctatggct

SEQ ID NO: 17003 - DNA, 488 bp, Zea mays
  Clone ID: MRT4577_115503C.1
gtggacttttttttttttttttttaacacgggaagtatatccccacctgacctccaaaacaaataataaaagaacaccgtacacgattatacaaaacgacgatgtacaatgtactggatacggctgggttgccaatttgccatgcgttagccgcttctgcaaaagactgcaagtctgcaaccatcacgagctagcatccgttgttagggtccgaagtcgaacccttacacgagggacctgggcacctggcccgcttagctgttgccgatacagctgccggatgagcctgacgatggagtcgccgacggcggcggcggcctccccgggcagtcgatcatcctctcctagcagtggccgcgcggcggccgatccaagcaccatcgacaacaccatgacgacgaccagcatgatcaccgccggaagcacgaggttcttgttcatgatcagcacggccatggtgtcaagacagactctttacaatgtgcaag

SEQ ID NO: 17004 - DNA, 395 bp, Zea mays
  Clone ID: MRT4577_115504C.1
tcaggccggccgggccggggtatccattttctatttttctcctctcgagtagcgtgtcgttcgtggacgcggcggcgatgctgcggtcggcgctgcggcggataggggcgttcgcgaggtagctcgcgtgggcgggagaagcctcgccgagagacctcctccggatgctcgtgtcgtagcgggagcgcgcgaggaggctatgcttccgctcggagctttatgcaattgtattccctgactgttgtcttgtgtgaatgcgctttgttgactacttgtttggatgttgtcacgactgagattgcgcttcttgtcgctagtgaagtgtgtgggtcatataagatacagacatgtatgtttattcaatggagactggtgagattggtatgttccttgaa

SEQ ID NO: 17005 - DNA, 603 bp, Zea mays
  Clone ID: MRT4577_115505C.1
agtccaaattcgtccaggataggggctgtatcgtagggagtagtcgaagcggactggacaggagccgagcaaactatctgcagaagaggttaaagggttgccgtgcggactccagagctgtgagaatctaccccgaggtaagctcttagagtcgtagtcaaagaggagaagccaggacgggaacaaacagaaaagtgaggagatttgttggtgcattagctactcacgcgtcccctgaaattctgcttgttaactccatcctaaaatttcttgtgtggacccaggagaagagcaacaaggagtacaggactcagtgcaccaagaataggatttatttaagaccagaacaattaacttcaagatgcttgaagtgaggactgcaagaaggtcggttctcgacgacatctctggtggtgggatctttatcaggacagtacaatcgccaggagctgtgctgacgaatggtgctgataagagtacgaatcgtaagtatctgtacccttcaacaacaaggtagaatgtgacaccagtggaagatttgagggctcaacaaagaggaggacccccttgactgactggtacccgaggacacccctccgtgac

SEQ ID NO: 17006 - DNA, 445 bp, Zea mays
  Clone ID: MRT4577_115506C.1
acagaaaggggaaaaagcgaaaagggttataaaaaaccccacaacaaaatatccgggggggggcttggaaaaatacgggataaaaaaccagggggcaaaaaaaaggaggtttattaaaaaaaacaagcgggtggggaaagggggttttagtaaaatattggccccaaccccccaggggggggggttttttaccacgttaaaaaaaagctttttttaacccccaggtaaaaaaaagaaaaggccaaggggttttttgggacccgggggtgcacccggaaaaatcggaccgggacctgggggggtaccagtttttcctaaagggggggatataaaaagttgggggaaacaagggaaaaagtggtccccggggaaaaatggaatccgaaaaaatgcaacagaaaaaagggccggaaaaaaaaaggaaaaggcgggggggcccataggg

SEQ ID NO: 17007 - DNA, 459 bp, Zea mays
  Clone ID: MRT4577_115507C.1
gttgatcacaaaatactagcactagaaaactaactggaaacatgatggaagtgcattcacatgccagctccagccggacttataggttgtcattcacagaaatgaactaattacagacattcatttttccttcatatgtggactagttatatgggtgtgtagctagatatacaaaattatggcgtgactaaacatgcgtctttatgtaatacgttatacgcataatcatacgcctgctgggttgctcagcaggcaggcagagcattcagcatccgggacaaccatacaagctcaatcagaatcagtgccgtttacacggatcatggccgacgatgaggacagacgccgggtaggcctgtgtctgcatgagacccgacctcctggccgacgtatccaccaccatcatgtcgtcccgctacggttcaacgagctcagctcccagtacggaatcaccctcct

SEQ ID NO: 17008 - DNA, 349 bp, Zea mays
  Clone ID: MRT4577_115508C.1
gtccacaaccgggcctttaaagaggcacaggtacacatttttttatccaaacccccatggggcccggcccaacatttataaattcatttactctggcacgctaatccccggagaggggaaaaccacttattttagcctgccaccattaaggcccctggggtaccacaaaccccaagagtccacccccggttggggcccccaacaaaccgggaactcaaaattctaggtgttccccagcgctccaaatggagacagggtgcattacgtcctttccccaacccaaaaaaaaagcgtgcaaagatatgggctaaacaaatgcccgacttttcccccaaaaaagcccaccccc

SEQ ID NO: 17009 - DNA, 276 bp, Zea mays
  Clone ID: MRT4577_115509C.1
cgcttcgagcgcgtcgaggcctccgccaccgacacgggagcttccactgagatgggtgatgccccgctggactgggctggaaggtcgttggaggagtagcacaacttgtccgaacaaggacacgttctgcctgatcgcgctctacccgctgtacggtcaagaccaccgctttgttaaaaagctgatgcctttattcagagacttcggcctaatcaaatacagggttctaatgaaaatcaattgattattgaaacttactcaaattcctgaaatcac

SEQ ID NO: 17010 - DNA, 931 bp, Zea mays
  Clone ID: MRT4577_11550C.1
cccacgcgtccggaacatagtattccatttgttcaccatcggaccccttttagtagtaggagttatttggattcgtgacgtgcaacaaaccaggctatatttaggactcctagttagttgctggtagttaacctctacgtgctaggtataatttgcaagggtgtcgctatggtactctcaaataactgtggaccatcctttttaaatattatcctatttccagacaggcagcatgcagggagtaccctatttccaatctaaccatccttgtccccggcccctctgttcagaacgtctgaatttgctaagaattcgagtattaaaaaaatccagagcaactccttcaacaaaattttattcaaacgttctttcacatgagccctagtccccagatggtctcgtgcctctcgcctcgccagcctgctgcactcgccgtctgaaaacgaacaaccagagtggcactcgaattgaatgcccaactaattccaaagacagcattcattaccgatagatagatgcagttgcatatccttttcagatctttgaatgcatgtcatactgccatcacacaggttttattgtcaaaaacatatacgagtagtatatacttggttaacagttaacagaagcttaataattagtattataattgtcgattggactggtctctgactttgacatgtaatacatacacgcggttgaatttcgaagatgcgtgagggaatctttcatcttcagaacaaaggaaaaaaaacacaggacgctggcttcctccaatatacctcaaagcacaagacttgtagttttgaaaatttcttagaagaactgttgatgtaaagcatgccctagtatcattaagaaacttttttactggacataatgattttaaaactagtataagcaagtatacacacgaactgttttttttatt

SEQ ID NO: 17011 - DNA, 880 bp, Zea mays
  Clone ID: MRT4577_115510C.1
ttcagacctggactcgctccctagtatgtgcagtctctgggttgacaaaagctgcccagagaaacatttcctccgttaatggtgattcctactcaaagtattcaacggcatggaatcttctatgagaagtcgatccagattcatcaacatcaggacaaaggccagagaggtgttgcagagggaagacgatcttaatgaaattgtccagcttgtaggaaaagatgcgctagcagaaggtgacaaaattaccttggaaacagctaagctattgagggaagactaccttgctcaaaatgcgttacaccatatgacaaattttgccccttctacaagtccgtgtggatgatgcgtaacattatccatttctacaacttagccaatcaggcggttgagagagcagctggaatggacggtcaaaagataacttacacgctcatcaagcatcgcttgggaratctattctaccggctagtgtctcagaagttcgaagacccagcagaaggggaggatacgctggtggcaaaattcaagaaattgtacgacgatctcacagctggattccgtgccttggaggatgaaactcggtaaggctgtcagtctcctccataagtctaaaaatcctctgaattgggttgtttttggagaaagagaggttctttcttgtgtttttgaaccaacaactatcatagtggtcggtattttatttatccgtttgttggatcgattgagtttagcgctctgagctgagcctcatgattctccggctgtgctgtgctggcgtgcgctgtgtaatatgtttgattcgttgtttttatgttttttatttcgatggtaataaggtacagccagtgtgagtcatatatttgatgtaccctctcta

SEQ ID NO: 17012 - DNA, 166 bp, Zea mays
  Clone ID: MRT4577_115511C.1
ctcttctttaaaattttctcatcttccttcaccattctggcagcttgtctgttcaagacgctgacaattcttttcctttttgcccctttggcacccttgctaagccgctcataatcagggtattcaaatttagagcacccatcacccggtttaaccttcgttttgg

SEQ ID NO: 17013 - DNA, 432 bp, Zea mays
  Clone ID: MRT4577_115512C.1
tgtaggtgcctacaatttgtgtatgctgtggaatcaaggcacattggcggaggacctggcctcgatctccgcgcaggatctgagcagccttgagcagcagatcgagttctcgctgtacaaagtttgcctcaggaagcaagagctacttgaccagcagctgcttgagatccgccctcggtacttaggacccaaacgattttgatggcttacttactcctcgcaagttcggatggcgccgtgaaaagaaaaccatgtgcttaattctattcaattgaacatccagcgcaagtgctgcaattccaggacccaagcctaaaaggcgcacaataccaatttgaccaatgctgactctagcaaaagttttgatgctgcaccgaagctttagccctctcttagggatggaagaaccgtgagcaaaagcagacgtgcaca

SEQ ID NO: 17014 - DNA, 479 bp, Zea mays
  Clone ID: MRT4577_115513C.1
cgaatcccactcattcacgggggcccaggggggggctttagttcccacaaatccccggggaatcagttccgggccccgggatccatgcaaaacggggtcctgggcctttacatggcgcgggaaaatttaaaaccctgggaaaaaaggaccggggctccatacgggtagatctccatgattgggaggggagcagtccggggggggggaaccctaatctaaataaataaagcggtttccaaaagaatcagatcccataccatacccccacaggccgtaacggtttccatggaccccgcggcggcggaggcaaagggaacatgggcggtcctgcaaagaacatggggtttttggcccccccgccggggccggaacccgacaaagctcccaatgggggaactagaccagcgttgcccgccagcgttgcttcaggggaattggagttcccgggggcatctttgaacccgttatggggggggggg

SEQ ID NO: 17015 - DNA, 168 bp, Zea mays
  Clone ID: MRT4577_115514C.1
ggcagcatcaggaggaggaggaggaggggagctggcgagccgggggaaggcgggggcgcacgcgtgagcgtgctgagacagctccggtgcctacaccaggtcggagccacaggctgtgccggtgcctggacacggcgccccgtgggtgccacccggactgcagggact

SEQ ID NO: 17016 - DNA, 337 bp, Zea mays
  Clone ID: MRT4577_115515C.1
tcgtccacgcgttcggaccgagtgccccttccacacccgggggagaaagcgcggcggcgcgacccgcgcaagtaccactactcgggcgccgcctgcccggactttcgcaaaggcgggtgcaagcgcggagacacctgttttctttcttgcacggagtgttcgagtgctggctccacccggcgcgctaccgcacccaaccctgtaaggacgaggacagcctgcccgcgccgcgtctgtttcttttcgcacaccccggaccagctgcgggtgctcccgcccacgccgcaacagtctagcgccacccccaagggcgccggcgccctgcccgagtactaca

SEQ ID NO: 17017 - DNA, 426 bp, Zea mays
  Clone ID: MRT4577_115516C.1
acgtttcgtgggttgacgcgtggatcctaaggtccggcctatggctgtccccaccggacatatctcaggccaagcgcttcctggaccacatggttcacgactaagttccattagtggtgtcacgtcaattgctccagacttatgcagcgggacctatggaagctggagtcggacgcgcacaatgaggttgcccattacgcgctcaccagatccagccgagtgaggtttgctacaggagcaggcggtgatgttatagagaatcttgcacaggtatatgagtatgagcaacattggtaaaacgctgtacaaaggcttagagggattgacttggattcaggaatcaggatgcttgatgacacctacaaattatataagtgaggtgcaattgctcgactatatttataggctgatgatgcagcgtatgct

SEQ ID NO: 17018 - DNA, 356 bp, Zea mays
  Clone ID: MRT4577_115517C.1
attgacttacttccctgatcttcgctttccagacggccatatcaggcaaaaggcgtaacggggggcggctattcagagccgcccctaaaccctcacgtgctccaactccactggaaaccattcaactggaagaaatctctgatttacgggatggacagaaccaaaccagtagcggccgcaaagcacgacctgtaagaggcactacttcttatcgtgcagcaacaacaccaccagcccctctgtcaacgacaacaaatcgagcgtgcaaagaaagactccttaaagagcgcggcgcgggtttccgatctctctcatggacacacataacagcggggtgcgggagctcttcttcaact

SEQ ID NO: 17019 - DNA, 325 bp, Zea mays
  Clone ID: MRT4577_115518C.1
ctcacgcgtccgtccacgcgtacggtcaaattgtagttgtctggcacgtgtcgcactgagggaggagcagtctaccacgctaaacatgaagccggagaaagcgtgtacagtaccggaatccatcaccatggcgggatcagcgttgctcaacgctctcgtcctccgcgcgccatccgcgtcgatctcgtgctcgtctaaggtccgcaacgccggcgcctttgtgttctcgaacccaccgcgcttcccatccctgcgttctgagcgccgcgtcgcccttccgcgggcggaggcggtcggtgaccctgaggacgagtgggtgccggag

SEQ ID NO: 17020 - DNA, 150 bp, Zea mays
  Clone ID: MRT4577_115519C.1
ggtggcaggaggtaggtaactgccactgggtghgccctgcktgtakccagcaacamgtactagtgaaacakttcctcvktttaactctgcttckatgggcaggrgattggattataagcttgcggtgtgacgctgagtgtgattgcggca

SEQ ID NO: 17021 - DNA, 576 bp, Zea mays
  Clone ID: MRT4577_11551C.1
gaagctcggaccacgcatgctgcagacgcgttacgtatcggatccagaattcgtgatggcttaatctgcgcaacagcaatggctggccttgtaggtgctggcgggctaggggatttagcataccgcttcggacatttacgctacgagcctgaagtaatgtatgcaaccgtctttattttaattatcctcgttcaaggattacaatctttagggaatggtgttgcacgaagattgaagaaagattaaaaaagaaggcatctcaccctggtgagatgccttcttttttatcttttaaatccaccttctgaatgaataacttgcccagtaatccactcggcctcttcacttactaaaaatttaatgagtctagctgcatcccttggctgaccaattctgccaaaaggaaacatcggctttaacccttgttttatctcttcagtcatccatcctgtatcggctggtcctggattaattgcattcactgttattgctaaatgagctacctctgctgacaacgtactagtaagagcatcaatagctcccttcggtgtcgcataagctagtttttctgccata

SEQ ID NO: 17022 - DNA, 490 bp, Zea mays
  Clone ID: MRT4577_115520C.1
tcaaagataactattgatagtcttatgcattatattttgcctccagagaggggggagggagcttaatcccttctctatgctagctaggtagatacatttgcccggtttcccatttcatgaatcaatagatttatattattatacgaagaacctccctctaccaaagccttccttgctttaacaccaaattctcttgctctcatcctcatctcctctgcagcctcaccttcatccatcaacctggacacagctgcctccacatcatcctttgtcactgtaacctcctcttgttcatgcccccattgtgtcacccctttgactccaacctccaccccagttttcagcacgtccaccaccagcctttcgttcacaaactgctctgcaaagtgtggccatgtgatcatgggcacgcctgcacagacaccctctaatgttgagttccagccacagtgtgtcatgacacctccaacagatctgtgccacaggatca

SEQ ID NO: 17023 - DNA, 359 bp, Zea mays
  Clone ID: MRT4577_115521C.1
gaataatccttgtttttccgccctccggaggtttccccccctgaaatttttcatccctaccccaggggggtgacctaatcgtttaattggggggccctataaaaggggccaaaaaaaggtccatgcgtaattgcacggaaaaatgattttccttccaaaatccccacccacaaagggggtgagggttttaagggtaaaccccggggggcccaaagggggggggcaccaacaattatggggggggggctcccggccgggtttcacgggggaaaaccctgtcgccccccactttttataaaaaaccccccaacccggggggggggtcctttccctatatgtggccccggggtgtttttttt

SEQ ID NO: 17024 - DNA, 289 bp, Zea mays
  Clone ID: MRT4577_115522C.1
ttagagcggccacccttcttccttttttttttttttttttttttttttttttaagggacgcgaaaagcattgagttgaagtacacccttacaaaataaaatttgaaataaaatatgatagctgcttgggacaagcaaacaaccttttttaattaacacccccaaaaccccccatgacaatacccagcttatctattactatgttggctcatccatccaacacctttttttcgtcgacgacctcataatctatatgatagctgctttggacaagcaaacccgacccctgg

SEQ ID NO: 17025 - DNA, 768 bp, Zea mays
  Clone ID: MRT4577_115523C.1
attcttcctcctcctcccctccgtataataagatccatccgtccatcccctaatcccgtagcagccagcgtagcctagccgcccccacctgctcccctctgctccgggatccatccgtccacccaggccgtcgtcgacctagggttttgtgcagaccatggcgcggaagatgctcaaggacggggaggcgcccgccgtcgccgacggcggcggcggcgagggcgaggggagctacgactacgacctcttcgtcatcggcgccggcagcggcggcgtccgcggctcccgcaccgccgcgggattcggggccaaggttgcgatctgcgagctcccgttccaccccatcagctccgagtggctgggaggacacggcggaacgtgcgtcatacgtggctgtgtcccgaagaagattctcgtctacggggcatctttccggggggaattcgatgacgccaagcaattcgggtgggagatcaacggggacatcaactacaactggaaaaagttgctggaaaacaagactcaagaaattgtgagattaaacggagtgtacaagagaatccttggtggttctggcgtgacgatgatcgaaggggcagggagtatagttgatgctcataccgttgaagttacccagccagatggttcaaagcaaaggcacacgaccaagcacatattgattgcaactggtagccgggcaactctggtcgacattcctggaaaggagctggctattacttcagatgaggctttaagtttggaggagct

SEQ ID NO: 17026 - DNA, 408 bp, Zea mays
  unsure (1)..(408): unsure at all n locations
  Clone ID: MRT4577_115524C.1
cnctcnctttnnnnnnaaccaaaancngcaagggggaaaatggaaagcaccaccgggccgcccacancgggacgaaccggcagcccggcaggcgagacancaaacaccacngcgacnggcaccaaagaccnnaaaccaagcacaacgccgnncaacnggaacagccnancaaagcaagcnccaacancaggagaagnnnaggnanccnaccccngnccgnnccnncnnnnancaagcaancgnncccncnnnaancaagcaaagagaaccncgaggaanaccngaaccaaaggcgccggcccacaacaagagcagccggcacccacagaagaacaagggcgnncggccacaacaagggcagccggcacccacagaagaaaaggcaccagagccgcnaagnccccccaa

SEQ ID NO: 17027 - DNA, 1142 bp, Zea mays
  unsure (1)..(1142): unsure at all n locations
  Clone ID: MRT4577_115525C.1
cattgggtacctcgaggccggccaggttgggtctttatattaagttctcaccttcttgtgagaaaactcgtgctccattcacgtgggaagcttttcaagggattggcagtttcatgcggttggctgtaccttcggctcttatggtttgtcttgaatggtggtcatatgagctgcttgttctgctttctgggatgttaccaaatgcagcacttgaaacttctgtgctctctatatgtatctctacagtaatactggtgtacaatctcccatatggcatcggaacagctgcaagcgtgcgtgtgtcaaatgaactaggcgcggggaacccagatagtgcccgcttagtagtagttgtcgccttatccattataatcttcacggcagttctggtgagcgtaactcttctatcgttgcgccatttcatcggaattgctttcagcaatgaggaggaggttgtaaattatgtcaccagaatggtaccgttgctttcgatttcagttattactgacaacctccaaggagtcctttcaggtatttctagaggctgtggttggcagcatttaggcgcctatgttaacttgggcgcgttctatcttgttggcattcctgtggcgctcgttgccggttttgctttgcatctaggaggagctgggttctggattggtatgatagctggtggagccacacaggtcactctcctaacaatcattactgcaatgacaaactggcggaagatggctgacaaagctagagatagagtatatgagggaagtctgcctatacaagcaaattgattattacgaacttgaagtcatatccgattatctccaaatttcgctgcatcctagttgtttgttgaaagagctatccatgccacggacaccctaccccccacccaaaaaaaagttggcaatgaaagtcgtaaaagatgggctatttttatacctactttgaactaggtgatgatgagaaccgtcttatcttatagggacctgtttggttcagtcccagtaagacctgtctggcctangcagcgtcccaggccattgattttggacgcttgagggctacnatggaatggctgcatgcatatctgcctggtaggctggcatccagacgtgcccatagtctacggtgcaagc

SEQ ID NO: 17028 - DNA, 799 bp, Zea mays
  Clone ID: MRT4577_115526C.1
cctgccgggttaacttgggcgcgttctatcttgttggcattcctgtggcgctcgttgccggttttgctttgcatctaggaggagctgggttctggattggtatgatagctggtggagccacacaggtcactctcctaacaatcattactgcaatgacaaactggcggaagatggctgacaaagctagagatagagtatatgagggaagtctgcctatacaagcaaattgattattacgaacttgaagtcatatccgattatctccaaatttcgctgcatcctagttgtttgttgaaagagctatccatgccacggacaccctaccccccacccaaaaaaaagttggcaatgaaagtcgtaaaagatgggctatttttatacctactttgaactaggtgatgatgagaaccgtcttatcttataggtgatgatgctgtgtctagcttatagcttagactatctctaggctcaagcaatttatttatcttcatctcattttaaactctattttgtaaacatataggacctgtttggttcagtcccagtagacctgtctggcctaggcagcgtcccaggccattgattttggacgcttgagggctacaatggaatggctgcatgcatatctgcctggtaggctgcaatccagacgtgcccatagtctacggtgcaagcaaacagctatactatacgatctattgattatccccttagggattaatgcacaagtaggatgaaatttgatatgacagtcatgttaatgagaagagaatgagtataccaacatatgaattggggc

SEQ ID NO: 17029 - DNA, 612 bp, Zea mays
  Clone ID: MRT4577_115527C.1
ttgggtacctcgaggccggccgggatcgcagatgcagaagaatagactgggcttcccttccccacccgtccgtctttctcttctgtctgtttcttttctccgactcgcctccacctcatatctaaaagcaagagccaccaaatgacgcctctacgacaccgcggagctgctgccgtgcagctgatatgcaatactggtgcacgcagtatctcacgagatgatcgtatcaacttgcactctccgacgtgtgcgaactgccgctgacctagtctgccgagttcgtctatgtgtcctcgtaaggcgcgacgcgctccgtcgactgcgtcatcaactagctcgtgggattctccgccttcatacaccaaacctatgcgaccaacatagttcaaaatgcatgacatgtgcacttgccttaatgcaacaacatatcacggttacaggaagctgaatgacaaatacgatttactattgctgtacttcgtagtccctcacatacgacggagaggacgatctcatgctctacggaaacccaaccgactgaatggattctgaaagatgcgtagcttgagcttcccctgaagaaactgcgcaatgatatccactacaagttca

SEQ ID NO: 17030 - DNA, 225 bp, Zea mays
  Clone ID: MRT4577_115528C.1
tgattactactagctacccacccatcgccggacttcgatttcaagggagcggaatcacctgataaggtgatatttgtctttgccgtgctccgtttaggctgtacgagagaaacatttatgtacccagcccacatcccagtcccagcttgtattgagtacttacaagcaatagcggtaccttctgtattaaccggcagcttgcttattttgctgcattttaattcc

SEQ ID NO: 17031 - DNA, 761 bp, Zea mays
  Clone ID: MRT4577_115529C.1
caggtcgactacttgctcggcaagcaggcctacggcggcaagaccgactccgagggcgggttcgagaccgacgccgtggccaccgccaacgtgctggagagctccacccccgtggtggacggcaagcagtattacagcatccccgtgctgaccaggacggcggacggcgacaagggcggcaagcaccagttcatcaccgccaccgtttccgacggcaagctttacatctgtaaggcgcaggccggcgacaagcggtggttcaagggcgccaggaagggcgtcgaaaaggccgccgcctccttcagcgtcgcgtgaccgacgtaactattgtttctttgatgcttttcatcagggatgcacatgcacgcaccgtgtgtacgtagagagctaggcatggcctggctcgccatgcttgttgtgtgtttctttgattgtacatgagaggacccgtttctgctgccaaaaaaaaaaaaaaaaaaaaaaaaaaaaaaaaaaaaaaaaaaaaaaaaaaaaaaaaaaaaaaaaaaaaaaaaaaaaaaaaaaaaaaaaaaaaaaaaaaaaaaaaaaaaaaaaaaaaaaaaaaaaaaaaaaaaggggggccccccaaaaggataaaaattaaattacccttgaaggaaacttaaaaccccttcaaaagggcaaccaaaattaaattcacgggccgtcttttaaaaacttcttaacgggaaaaaccctggggtaaccaaattaaacccccttgaaaaaaaaccccctttccc

SEQ ID NO: 17032 - DNA, 612 bp, Zea mays
  Clone ID: MRT4577_11552C.1
cattgggtacctcgaggccggccgggaatgtctcccaccccattcttatctcctcgtcaccgcttgctatccgtaacctcgccgcgcgcgcggacgataggttctcggacactgatcacctctcgctgcagcgatggccctggaagccccgcaactaatgcgagcgccggaagcacatcgggccgcaccgccacggacctccttctccgccccgtggtcgctgcgggtgccggggcctgcatcggatccgggtggccactggacgcacggatcaccatgcgagtcgcgtccaaggaggactacatctgccgcgactgcgggtgagcacatctacaacgacaggacaacaaacgacaagctggctgacaactactactgacctgtaatgtggagctccgaagagaaggcacagaccctacaagacggcagactcgaagaacacgaaggaaaccgatgtcacaaaagcgaggaaagagaacctgaataatgaggagatgatgcgaaaaaccttgactattgccatcgactccgctatcatcggcatgggtgacctgaacttctacctcaacaatggccacagggaaacaacgaaaacaaccgcttggtgcgcgg

SEQ ID NO: 17033 - DNA, 259 bp, Zea mays
  unsure (1)..(259): unsure at all n locations
  Clone ID: MRT4577_115530C.1
gtacaagctttttttttttttttagacaagcatttgatcctgataagagaatttgaaatatttacatgcctgacaggaaaagttttgtttgggccatcatagacatggggggggggttacatgccttaaaagaaaaactttattatgaccatggaaagaataaaggggcccttggacgcaataaaaccaaagccttattacgactatccaaaaagtattggccacctggtcccggnaccaccccaagggccaattnctc

SEQ ID NO: 17034 - DNA, 1243 bp, Zea mays
  unsure (1)..(1243): unsure at all n locations
  Clone ID: MRT4577_115531C.1
actagttctagatcgcgtacaacggcgacgggttcaagctgctgatcccgtccaagtggaaccccagcaaggagcgggagttcccggggcaggtgctccgctacgaggacaacttcgacgccaacagcaacgtctccgtcatcatccagcctacctccaagaagaccatcaccgagtacggatcccccgaggagttcctctcccaggtcgacttcctcctcggcaagcaggccttcggcggcagcaccgactccgagggtggattcgagaccggcgcggtggccacggccaacgtgctggagagctccacgcccgtggtggacgggaagcagtactacagcgtctccgtgctgacaaggacggcggacggcgacgagggcggcaagcaccagctcatcacggccaccgtctccgacggcaagctctacatctgcaaggcgcaggccggcgacaagaggtggttcaagggcgccaggaagggcgtcgagaaggccgccgcctccttcagcgtcgcataataatgaaattgtgctgcatcggccgggattattatttctttgatggtttggcttcatcaggggatgcacaacgtagagagcatgcttgtgtatgtgttcctttgattgtacatgagaacaacaaagactaaggagagctccatttccatgcatgcaaggatccaccgattttcttcagtcatgcaagctgtttaagaaatcttaattagcactaataatatttttctagataagggaacgaacgaagttcagcctctaccatccggagatggtacacaagcttagttcttttcttttttgttccctgccatatctctgtttgttttagccaaagaataggcactgcatcacaatgatgggcaggacggcggacggcgacgagggcggcaagcaccagctcatcaccgccaccgtctccgacggcaagctctacatctgtaaggcgcaggccggcgacaagcggtggttcaagggcgccaggagggggggggagtaattcttcgcctccttcagcgtcgcgtgaccgacgtaactattgtttctttgatgcttttcatcagggatgcacatgcacgcaccgtgtgtacgtagagagctaggcatggcctggctcgccatgcttgttgtgtgtttctttgattgtacatgagaggacccgtttctgctgccatccaagttgtttgagaaatcttggtcctnaaaaaaaaaaagggaataacggcccg

SEQ ID NO: 17035 - DNA, 246 bp, Zea mays
  Clone ID: MRT4577_115532C.1
gagcggtggcgttctttttttttattttttggaagcaacaccttaaccagccatcatttttctcaatgacccggatgacacgcgggggaattaaacactcttacaacattaagggtggtaaaccacccattctttctgaacagtggcgcattcacccgtcggatgggcaactgtccgccaatcacgggataagggcacaaaaccggccatgcgctgggtctttacgaaacttttcttgtactggtc

SEQ ID NO: 17036 - DNA, 367 bp, Zea mays
  Clone ID: MRT4577_115533C.1
aggggaggaaaactcattcaagatcccctggtgaaaattatgacacttgttcaaaacggggtttcatgttttaagacggggttttttttgtttacaaaggacggactgataaaagttgttgaacaaaagtgcacaaggtccagtacatcttaggacatccagatttaatgggccattcacttttttttttgttaacggggctagcaaattaaggcagggcccatcaccttaaaactcattagggcggtttggttttttttttccggccaaaaatggaagccttttgaagttttatccgacctggtggcgttttttggaaaccagtcatcgtttttttggcagattcaaacacccgggtttttttttt

SEQ ID NO: 17037 - DNA, 299 bp, Zea mays
  Clone ID: MRT4577_115534C.1
ggcaagatcaatgatgaagacaaacagaagattcttgacaagtgcaacgaaatcatcagctggctggataagaaccagactgcggagaaggaagaatttgagcatcagcagaaagaactggagaaggtctgcaaccctatcatcaccaagctgtaccagagtgctggtggcatgcctggaggaatgcctggtggcttccctggtggaggagctcctccatctggtggtgcttcttcaggccccaccattgaagaggtcgattaagtcaaagtagagggtatagcattgttccacaggga

SEQ ID NO: 17038 - DNA, 291 bp, Zea mays
  Clone ID: MRT4577_115535C.1
ccacaaacccaagcccaagcttcagcctttcaccttggagaacaattatctcaaaaaacagatcccgcgtccaccgcatgatttatccacgcccttcctttctcaggcagagcccctttcagaggggccctataccttttgtattgggcacaaacaccctgctcgggagatctatttcaaaacagaggaccaggggattcgttcccttccaaccatttttctgggaatttcgaatggtctctaaaaaccctgttatcccagcgctatgaagatctggattcacaacacccg

SEQ ID NO: 17039 - DNA, 238 bp, Zea mays
  Clone ID: MRT4577_115536C.1
tgcacgcctacgcttcactctggcgttctggatgcggaactggcaggacgagatgtgttgctccttcacaacacgcgtctgactgtctaaacataagagcaacctgcatgcagcgtccggagccactactatggattttttacagaggcgtgccattgtcctgaagatatacacaacgcttttcacatgtgtataagacaggcgcaccgttgactttctgagatgaagatcgatctac

SEQ ID NO: 17040 - DNA, 367 bp, Zea mays
  Clone ID: MRT4577_115537C.1
aaaaatataaacggtcttttaaaataactttttgggtcccaagggccccttcaaaagggggcaaaataaaaacaaaaagttggccacacataatcatttaaatcgacggttggataatacagttttgatttgggaccaacctttaactaaaaatcacaagggtagtttggggtaaatccagaaccaccgggaaggatcagcaggggggggggaaacacttcaacataaggttttaaatcggcctcgccgggctgttcctatttgaattccgccttttttatcgcacggatcaaatgggtcatgcggaactggaccttttcgttctccatggacagttttttgttctgcagggttaatgacccgacct

SEQ ID NO: 17041 - DNA, 393 bp, Zea mays
  Clone ID: MRT4577_115538C.1
cttgaacactttctctttctttttttttcttttttggtttttcggtaaaggccacaacaccgtctttctcataaacaaaggggggaacagacacgttaaaaccaacccccccctaccctggggtgaacccgcgtgcccccccaaggggggccaatacccttacacacaccccaccatccggggaaccccccggattgtccccccctcaaaaaccccaacctttcccccccagggtggggctgggcgccttcgcaactaacccgccaaaccccccaatttgcccgtattattcaaaaaaccctcaggaacccgtccgcccggaaaaccccctttattatgaaacaaacaccggccccaggttgaaggccttaccccttccccgcaaaacaaaaa

SEQ ID NO: 17042 - DNA, 260 bp, Zea mays
  Clone ID: MRT4577_115539C.1
ggggaaaaaaacaggggaacaaggaacataccggggcccaaaaaacaaaaaataaccgggggcaggggcataccgcatcagaggctaggaaaacgggccaaggggcccaaatcaagcctcggcgaaggaccaaggggccaacaacagcccaaggggccaacaacggcaaaattattacgagaaaaacaaaacgacaaacggggggggcaaaatgaccccaaaagcaaaaaaacaccccacgcggccccccaaccgtccgg

SEQ ID NO: 17043 - DNA, 630 bp, Zea mays
  Clone ID: MRT4577_11553C.1
ctgaaaaactgttggttgttcacagcaccaaatcagagtgtgcctacttgtgttcgtgtgtgtgcgtgagtcttttctgtgaccagcagggtgagctcgccggcaactggaggttgcttctccggcgaggtctgacaaccactacacgggcgatcgagggcggggcgacatcaactgcaggcgcaccgcgcgcggcggctaccaggccttcagcggcgagtccgttgaggtcatggccatctccgtgcgccgcggccaggcgcgcgtctgcaacgacatccagacctggtgcttcaaccccacctagctcacggttcattggcaaagtacaacagcctgtgggggatcgacctctccgactcgtagttccggatctccgacgaggccaacctcttcgtcgtcgtgggctgcaactcgctggcgtatgtgcagtccgtcaacgccggcaccgagtacatgaccggctgcatggccacgtgcccggacgcgagtgaacggctcctgcgccgccatgggctgctgccaggcggccatcccgcccagggcatcaacacgtacggcatgcagttcgacgaccgcttcaacaccgccgcggccgtcacgggcttgagcccctgcagctacgccggc

SEQ ID NO: 17044 - DNA, 424 bp, Zea mays
  Clone ID: MRT4577_115540C.1
gtccagcgccgtgacgcggtcggccgtgtcgcactgcaccccgtgccactcgcacggcgacgcgtcggactcctgccacgcgtcgtaggcgccgcggttcaccttgttgttgtcctgcaggaagtgcttgagctccaccagcacctccttgtcatcgtcgccaccgccgctgttctgcgcaccggtgggcaccaccaccaactcaccttcaggagggagaggacacgcgatcgccacagttagacgcgcaattcgagtcccacgcgaggaacacggcggcagaagagagaaaagaacttggggcgagtgccgagtggtggcatgggagcgccgaatcctaacctgcgacgaggagtaagccgaggaatccgaggagcaggggagacatggctttgcttctcgaatcatggaagacacagaggcg

SEQ ID NO: 17045 - DNA, 179 bp, Zea mays
  Clone ID: MRT4577_115541C.1
cggacgcatgggcgcgtagcgtcgcgttccgtacagtccaatcctcgaagcctgagaggggctgaccttcgtgagctactaccaatctcccatgccctgccctgacctgcctgcgggcttagcttcggatctttccctccttctactccttctatctcggccaagcgaggagcgaggca

SEQ ID NO: 17046 - DNA, 316 bp, Zea mays
  Clone ID: MRT4577_115542C.1
ccttatgagcgtcccggcgaccacttgtacaaacttttttgttatcagggtagaattttaagagtctttagaattgtcgcgccaccataaggattccctgcgtttcactgcttgggtagacactcaaacctgtacaaacatcctatgtggtggatgcggttgattacttaaacttatgctagatgtggtgtctctggtgcaaatcagacattctgtcttaagcgtatgcttgaacagtctaatactgaggacctctttcttagttataaacggttgtgcttttagctcaatggaataaccaacgcgttggagtggt

SEQ ID NO: 17047 - DNA, 327 bp, Zea mays
  unsure (1)..(327): unsure at all n locations
  Clone ID: MRT4577_115543C.1
gcncctggaagcatatcttcagtgtgccttgaactctatgagtctgatgggaagaactctgccaaagaggaaaccaagtttgcacaggttgtactccaggatttagataaaaaaagaaaatggattacgtgatatattagctgttcttactatgaaaagggatggatctttacatgtgacatgcacagatcaagaaactggaaaatgtgaagcaatctctattgagatagcatcttagtgttttagagaaatcaagaatttttaaaaacaagaatatcaacatttggttttgtgtataagtggtgtttgtattaaaatactttttca

SEQ ID NO: 17048 - DNA, 309 bp, Zea mays
  Clone ID: MRT4577_115544C.1
ggggtatctccaacccaagcttacttaggtgcggcggcaagacgccgatagtttggtccacctcttccaatcgcaagaagcgactttgcacatttctcctaagaataggacgccgcatctaaagcttatattacggcaattaattccgcaatctaatctggcacactttttgttccatgttcccggtcctatacggcctgctatgtcatgctcgcagcagctagagatcgccttggtcgacctgcgctgttgttgactgtaataactgatacacggacctaccactctaatatcttctggtctccaact

SEQ ID NO: 17049 - DNA, 506 bp, Zea mays
  Clone ID: MRT4577_115545C.1
ggccgcttttttttttttttttttaggagaggagctcgttatgtgttggacattactctgggcgtgcgtgtcacgatgcaggtgccaccagtacacgagacatcatgggccgtcatagaccgcacatgcttagtggctatatgttttcttgcactagttagttaatccaccggggggcacacgaagatccgggcaccccggtcgtggcggactgtcatacaagctatatgtccgtgccagtcgatgagctatctgaaccttgctagagacggaggcaccccttgtttgacggctgctggtgggtgatggaccgctgcggcaacatgttgctggcctgctaccgggagactcgcgtgcgccaggatgggccactgccaggacttccagttgagcgacggggcctgattccagccatgcttggtagcggtcagcatgaactgaacagtgagcagcacctcgcactggccccggctcgtggtgctcgcaaacacgaaggttaccttgac

SEQ ID NO: 17050 - DNA, 194 bp, Zea mays
  Clone ID: MRT4577_115546C.1
aagggaaccaagcaggaaaattaaagttaaccaaaattccaaacgataacatatagttgagactgcataccaaagaatatggctagattacgatcaagaataaaccaacatagttaacctctggcaccctgacaagaagaaaaggataactaataagaagtctgcgagttctaactaccaaaagctttttgccc

SEQ ID NO: 17051 - DNA, 513 bp, Zea mays
  Clone ID: MRT4577_115547C.1
aacaaaaccgtatcctgtagctgcatccgttgcgcggttcccgggtgcatagcggagcggaatttaacatgggaggagccggaggtggtggtcgacggcgtggtcttccagccggtggccctgcccgccgggctccgacggctcgactatcactggacgcagcgagcgtgcgagcgcctccagatctggagagcaacgttcatgcaaatcacgggcatcgtcgacgcacctggaggacgcggacgtgcccgcgctgtccatataagtggagaggtaagacggcagaggagctggcctccgaaaccgcatttttaagtgacgtagcgacgggcgacatggaaaagttcaggagggtgacgatgatgctcccggtgatgggcgactgaaacgcggagaaagtgacggagaactgcgaggcgttctggaaggtcggcgtgctgtacacgaacaccgagggcgtcaccagggagaagttcaacatggtgatgaagccacagactgtcatgtggggcg

SEQ ID NO: 17052 - DNA, 265 bp, Zea mays
  Clone ID: MRT4577_115548C.1
ctgacctgcaagtttatatgcttgatggtatgaagggataaatctcctcttcttcatctgcacaagaggagatttatcccttcataccatcaagcatatcccacgcgtccggctcggtatctacgggctcatcatcgccgtcatcatcagcacggggatcaaccccaaggccaagccctacaacctctttgatggctacgcccacctttcgtccgggcttgcctgtggtctcgctgggcttgcagctggcatggccatcggcatt

SEQ ID NO: 17053 - DNA, 113 bp, Zea mays
  Clone ID: MRT4577_115549C.1
gaaggtattggctaaaggctaaccttttaaccaattatttaacgagccaggaggttccgggcttggttaaggaggggcgcctcctaaataactaaaggaggaatccgggggga

SEQ ID NO: 17054 - DNA, 380 bp, Zea mays
  Clone ID: MRT4577_11554C.1
ttgggttcctcgaggccggccgggctatcacttttccttccgatcagatcctctcagttatcatggcgggcggcgccttcaccgagaagggcaagaatatccggggaagatgacggtgttcgtcttcctcgcctgcctcgtcgcctcctccggcggcctcatcttcggatacgacattggcatctcaggcggcgtgacgtccatggacccgttcttgaagcgcttcttcccgtcggtgtacgccaaggagcaggaggtggtggacaccaaccagtactgcaagttcgacagcgtgctgctgacgctcttcacctcctcgctctacctcgcggcgctcgtcgcctccctcttcgccggctacatcaccaagaggtgcggcc

SEQ ID NO: 17055 - DNA, 351 bp, Zea mays
  Clone ID: MRT4577_115550C.1
ttttgttttaaacaatatttttgggggccaacaattacaaccctgcacaagggcttattttcttgtttgcggatcagttcatcggtaacacatttgccaatgcaggcatactagacagccagactgacaccaggaaggctagggcttattggacacgaccaggaataagccttatcgggaactaaatcttacactgagagaaattcggagatgagggtactttagctgccgattggaccctcaagctgacaacatccaggtcaaggtgggtcttgggcagatcaaacagctcatagactgccatggtgatgtccgcaccaggtgaacaataaccctgttcactaccatgag

SEQ ID NO: 17056 - DNA, 853 bp, Zea mays
  Clone ID: MRT4577_115551C.1
cactcctaagggcgattgggttcctcgaggccggccggggtcctcgtcccttggctgccacactgcagaaacgacgacaggtagtggcagcactcagaccgcgccttatccaactgactgacacctcgctcgctctgtcgctcagccctcacccacccagcatggtgctccagctccactgcgccacaccgaccatcaccatctccccgcctcccgcccgccctcgtcactacccccaccacctctacggcgccagcggagcgctccaggccccagctcgcggcctcgggcaccttccccgcctcctcctcgtcggcgtcagagacccgcgcgcggacggagcggtctgccacgtgaggaggcaggtgcggtacgacgaggacgacgaggaggatgacgacggcgaggagtggggccacaacgaggacgtcgcgaggatggaacggtacagcgaggacgcccgcgaccaggcgctcctggtgaaggcccgagtggacgacgaggtcgaagtcgtgctcgtcttcaggggcttctcgtcgagcttgagcgggggaacggccgcggatccggcgaggagcgtcctgccggagagggcgatcatacagtcggtcgacgtggtgaaggggccgtttgaccccaacaacatcgagtacctggagaagggagtgggatgggaggacttcaggagccgcctgcgatagtaacagcactagcacattgtgctgttgttctttaagggggcgtttggatcccttcatttttaaaggaattggaatttcctcaataaagtaacttatttagtttgggatttggcaaaaaaaaactttctctagttcagatataagtctatctc

SEQ ID NO: 17057 - DNA, 360 bp, Zea mays
  Clone ID: MRT4577_115552C.1
ccgacgacagccgaaccagaggagaccaacctacaccccctttccattcacaaaaaaacaaaaaaaaaaaaaaaggcaaagggcaaggcacaccccgccagagcgacccaagccaacacacgcaaaaccccgacgacaccacaaccaaaacagcagagacccaaaaccaacgcacggcaccacgcgaaacaacgacgagacccgcacaacccggccgacccaaaacgcaaacagccagaaacacaaaccccacacgccacaaagcggaacaccaaacacgcccgaaccgagcgccccgcccaacaagaccccaacacgaacgaccaacggaacgccccctgcacccgcccactaaccgcc

SEQ ID NO: 17058 - DNA, 318 bp, Zea mays
  Clone ID: MRT4577_115553C.1
cggacgcgtgggcggacgcgtgggcggactcgtgggcggacgcgtgaatcgaggcactggtacagttctagatcgagctggcgtgcattagacgtttcaaacttacctacttaacaattttacacaatagctagtctataaagacatgtctgattcatatatttgacgaatctttcaatacttatatttaatgaatggacttcttaaatgacttctattgtgtaacatcttatttgtttaattttagttactttttttacatctacttattttattatctcttttgtcttcattttttgcacatacaatgccttttat

SEQ ID NO: 17059 - DNA, 1673 bp, Zea mays
  Clone ID: MRT4577_115554C.1
ctccgatcgcggcggcagcttccgcgaaggccttcgctaaaaaaccgagctcgccacgccaggtatctcctatttttttctcctccgcctcgagttccgccacctccgagcctcccccgccgcgtcccagggaccgggagccccagtcccctagttcgctcgccttccgccggcgcaagagaagcccctatctcctcccatcctatgggcgccgtggcgtcgacggtggcggcgcgcttcgcgttcttcccgccgaccccgccgtcgtacggggtagagccaccgccgtcgccggccgcggctgcggcggacacggaggtggtggagctcagcggggtgccggtgtcacggggccgcggcgtggaggcgcgccggctgccaacgaagcgcggcaccgaggtggtgtccatgtacgtccgccagcccggggcgcgcctcacgctgctctactcccacggcaacgccgccgacctgggacagatgtacgagctcttcgtcgagctcagcgcccacctcaatgtcaacctcatgggttatgactattctgggtacgggcaatcatctgggaagccaagtgaacaaaatacttatgctgatatagaagctgtgtataggtgtcttctagaatcatatggagcctctgaagaaaacatcattctatatggtcaatcagtggggagtggccctactttggatttagcatcccgtttgcctcatttacgagctgttgttctacatagcccaatttcatctggtttaagagtgatgtatcctgtaaagcatacatattggtttgacatatataagaacattgacaaaattcctctggtcaggtgtcctgtattagttatacatggtacagctgatgaggttgttgactgttctcatgggagggcactatgggaactatccaaagtgaaatacgagcctctgtggatcaagggagggaaccactgtaatttggaactgtacccagaatacattaagcacctgaaaaaatttgttactgccatagagaaatcacaaccagttaaagacgaatctccagagagttcaggtccttcagatcctagtgaaattggatccgaaagtgcagagaactcaaggagaagcaccgatgtccgggacaaaccaagatcaagcattgatcatagacctagcattgatcgacgggagaaacctaggggaagtatagacaagagagataaaaacagaaagagtattgatcagcttgacaaaccacgggctagtgtggatcaacctgacagggcacgtaagagcattgatcgctttggggggatgatgaggtcagtcaaattgtgcaatattgattgtttcacttcagcttccgggagctgataatatcgggaggttagtacttcgtagtgtctcttagtcatctgtatgtattccatcttttataatttattattcaattgggtgttttagtgtggctgtggaaaaggtgtattggtctgaatgagggcttgtatttgtttcccatgaattgtttgtttctggaaaggaaactcccatagtttccaaacaacatcattttttttcttgaagtttttcacttgatacctgatgaaatccgaagaaaatgcaaagcaacgagaagcattgtctttgcagaactgtaaaaaaaaaactaaaaaaaaaaaggggcggcc

SEQ ID NO: 17060 - DNA, 709 bp, Zea mays
  Clone ID: MRT4577_115555C.1
cgggtcgacccacacgtccaatttgtttatactgttattttttttggttggaggatatctcatgtgcatgaaactgatataggctagtaatttactattatttgtagtgtctgattttattcttttgtgccaggagcttagattgctgataattgtcagtagcttttctagtattaattactgaaagaattgttaaagttgcttgacaaagcactttattctgagtttggtaaacaacttattttctagacactacacgttatgacttattagaatcggatttaaaagagaattctcactattactaattggttggtgtatttgagataaggcggttgtcagacattgatctatttgatagggttctaggggctgtgtgcaaatactccactgcttaactagttttaagaggaaattttgaaagtgtatgtattatgtagtctatcaatgaattgacaggtgaccttaaatgggtaatgctttgagtttttcataggtccttttttataaattttacatgtgataaaggtatcattcctaaaagtaacttgagtcatgctttaagcgtttatctaaataatttttttaaggtgtaaaatttaaatgtgttccatttgcgattatattgggttatcaatattgcttaatttactgatcgagctgctttgtgtattgctcgaacatggtgggaattttacatgtcatattg

SEQ ID NO: 17061 - DNA, 647 bp, Zea mays
  unsure (1)..(647): unsure at all n locations
  Clone ID: MRT4577_115556C.1
gagttgctcctcgcctcgcccgacagaggagggaggaggcagctctgacagatacccaagaggtcggatggggtgacgatggcgggggaggccaacgtgaacgagctgcaggcccgcccgcgtgcactgcaagagtatcagctcgggcgtcttgcccctgtgtatcaaggacggcggtcgcaagatgctctggcgtaataaatgtgcatgcagggagctcctgctcatccagctatatggtgttgcagaccctggaccgtatgtttgtttcccttccagctacatgctgagagatatccgggcgaaaatatgagaacagagtatagccaataaggtgtataaaagaacaaatgaacggatctcagtggagcgacaggactagtattatggattccgccgtggtgcaggaattcaatcccatggtaatagataccgacgacctcgagaggggtaccgcatctgcccaactcccaatatggagtcgcatgacgcttgtacactggatgacctatgacnacgtgccgcatcgggctccgagtgcttttccacaatataatcgccttgtggtggatcccccttttgacactcggagctaatagaaaagagggccgatactaatcaggcttacagacagttgtctataccga

SEQ ID NO: 17062 - DNA, 227 bp, Zea mays
  Clone ID: MRT4577_115557C.1
tggtagccggaggtataaaggccatatattatggcgtccacctttccgtctgcgttgaggctgttgggcgccttcgccagtccgttcgtccacctcgccgttgtggccctgcgcctcataatgggtgccctactatcgcagccttgaggaccggggcaacaatatcgagcttctgttgttcacacaacccctttcacaaactcgtgtccgttcgcctccacggcgac

SEQ ID NO: 17063 - DNA, 307 bp, Zea mays
  unsure (1)..(307): unsure at all n locations
  Clone ID: MRT4577_115558C.1
gtgnacacgtcgggacaacgcaacaacctgtcaccggggcgcttttctgggggtcatcgagcggtggccccgcggcatcttcaccgagcgccgtggcggcgagctctcctccgatgacggtgaccgccctgttggctgccgtggcggctcccctgctcgcctactactgctgctaccttttctgagggttaccttctgctgctgctgccgtctaggctgagcgacctatttctatgtatgtgactactcaagtttactagtggtagccggctgcccgtgcgtttgtgcttgaggaactcaccacctg

SEQ ID NO: 17064 - DNA, 379 bp, Zea mays
  Clone ID: MRT4577_115559C.1
cccacgcgtccgcccacgcgtgtctcgactcatgacgatagctccgtcgttgacctaactaacaccgcgtgacagctagctctctcgcgcaataatagccgagaagctgagtgcttgtgacagccgcagatggtcgcggcggcggcggacctggcagccgcgctgctgctgctggcggaggtggccgagacggcgtcagaggcggtgagctgcggcgaggtgacgtcgacagtggcgccgtgcctcgggtacgcgatgggcagcgcggcgtcgccctccgcggcgtgctgcagcggagtgcgctcgctcaacagccgcgcgtcgtcggcggcggacacggatgccacctgcaactgcctcaagagcatgacgggccagc

SEQ ID NO: 17065 - DNA, 553 bp, Zea mays
  Clone ID: MRT4577_11555C.1
cattgggtacctcgaggccggccgggaccacccatcctccgatcaccaaaccgggctctagtaccgttcaattagaagtcattgcaagtcgagagagggcacaatgtgagggtcaactcacgcagtcgaatccttggctgaagcgtcagagtactcgctggatcactctacatggttgggggcttattggcgcacgaaggaaggatcaagcagggcgagggacgctcgtcggagtctttggtctgtgccgaactgcatcgcaccgtgggcaaggctcccgtcgctccgaacgatgcgaggtcacgagtcacttgaagagcaagttggtacctggtatctcaagtcccaggtcaagaacaggtaccacaggatgaggcgcataaaggatgctgtgacgagttcgtgagaggtctaggtcgtcgtctcccagtcaacttcgggttgctggaccattgtctccatataatgtaattatttatttattttgtacagaactccgattatatagtaaagatgtgacattcgatccaaaaaaaaaaaaaaaaaagcggac

SEQ ID NO: 17066 - DNA, 246 bp, Zea mays
  Clone ID: MRT4577_115560C.1
ctgcaactgcttgcccaagtcacacagctagtgaagaccagagcagtttcatctggttgtgactctaagctcagtgctctctccactaccccacaccagccttggtgccaccaaaagtgctccccaaaaggaaggagaatgggatttttcttttgaggcatgcacatctggaattaaggtcaaactaattctcacatccctctaaaagtaaactactgttaggaacagcagtgttctcacagtgtg

SEQ ID NO: 17067 - DNA, 566 bp, Zea mays
  Clone ID: MRT4577_115561C.1
tgacgtggccgtcgccgagcaggaggcgtccgggtcgaagccgtcggccgtggccgacgtcgaggcgacaatggtggagagccacgccaacctgcgggtgctgtcccggcgccggccgaggcagctgctgcgcctggtgctggggctccagggccaccgcctcaccgtgctccacctcaacatgagcagcggcgcccacatggtgctctactcgtttagcctcaaggtggaggatgattgccagcttacctccgtgggtgagattgcggctgcggctcatcacatcgtcgagaagattaatgaagagcaaaacaaggctgcagcttagaaattagaatagaatcaagagtgctttcctgcacgcaacctttttagctcctgtagcaagtgaagtgattcctttttgtgagaacgacgaataatgtatactaatcagcttacctcgtcttcgaaacagtaatatgtatgtgtaaccaacctatctttgtgcatagataatgtccatggccaggcatgcatgaacgagagctctggctacagaacaactccagttccaggccattcga

SEQ ID NO: 17068 - DNA, 203 bp, Zea mays
  Clone ID: MRT4577_115562C.1
gaacgtggacaacgcttgcgcctttttgtcaggcctcgagtactaggggcgctggctgtccggcacgccgcgcgcgctctgcaagtcggtggagacgtacatcgacgccatgtactaagaggacctcaagcccggcaaggcgtgagagcagtacttcaggctgatccagaccagcctaacctagacgtactcgacggggttgc

SEQ ID NO: 17069 - DNA, 612 bp, Zea mays
  unsure (1)..(612): unsure at all n locations
  Clone ID: MRT4577_115563C.1
ccggccgggatgctgcacagaccgatcacatcgtcactcactgcttcgttcgttcatccatcaactactggaaattagagagccggatctctcggtcggagaagctagaattaaaaagtacctgcgaggaaggactaaggagtcgaagatggctgcggcggtgctgtccgtgcgcacgacgacgacgtcgctgctagcagcagtcgtcctgtgcctctgcgtcgtctccctctcctcccgtggcgccgccgccgcgcgggtctcccccggcgcagccccgatcgtggccacctgcactcnggngacacgcaggtggccaggacgctcgcgatgcgctctgccgccgacgtctcgtcctgcaccgtcagctgcagggagctcaacggcgacgtgcgcctcatcgtcgtgcagagcctcaccgagttcaccaagatgctccagatcgccgtcagcttcatcagcaagatgaagccgcttccaccgtcagctccagcgcgaactgccacgccatgatcacctacttgnccgcaggcgtggttcttctaacttaagagagcgggatcggagaagaaattgaagccgctaataattagccatcgntctctagagtct

SEQ ID NO: 17070 - DNA, 1340 bp, Zea mays
  Clone ID: MRT4577_115564C.1
cggacgcgtggtcggacgcccaccacgcgtccgcgtcactcactgcttcgttcgttcatccatcaactactggaaattagagagccggatctcttggtcggagaagctagaattaaaaagtacctgcgaggaaggactaaggagtcgaagatggctgcggcggtgctgtccgtgcgcacgacgacgacgtcgctgctagcagcagtcatcctgtgcctctgcatcgtctccctctccccccgcggcgccgctgccgcgcgggtctcccccggcgccagcccgatcgtggccacctgcatgacgggcccgtacccggagctgtgcgtgggggagctgggacagcggctgctggacgtgcagacgtcgatcgcgtccgcggcgcccgaccagcgcgcggccaggatcgcgggcgccccggggcaggtggacgtcagggcgctggtggccgtggcgctggaggcggcctcggaagccggcgccgtcgcggtgtccatcttcgagggcaagctccccgggttcaacaccggcgtgcccgacttccgccgctgcctcggcaactgcaccgtcaccatgcgcagcgccatgcagaagctccacggcgccaccgccgcgctgcactcgggcgacacgcaggtggccaggacgctcgcgatgcgctctgccgccgacgtctcgtcctgcaccgtcagctgcagggagctcaacggcgacgtgcgcctcatcgtcgtgcagagcctcaccgagttcaccaagatgctccagatcgccgtcagcttcatcagcaagatgaagccgcttccaccgtcagctccagcgcgaactgccacgccatgatcacctacatatgcgcagcgtggttcttctaactaagagagcgggatcgagaagaaattgaagccgctaataattagccatcgttctctagagttcctttcttcgtttgttttggtgtgtgttccttttccccgtttttttttttgttttagtgtgagttctctcttctgtaaataagatgcaggtttcatggccattgtgcctggctctggttgtgaacctgagaatgagattacatgttttctttctgattcaagaaaaaattgtgaaaaaaatggaataaaaaaccggaagggctatgtctcaacctgtacaagccaatagttatgcaataacttgcacccaatggcatgctcatgtaatttagttgtagctgttttacgagttccacatttaatgtttttattgggtgttccttttctcttgtgcactgtatttattcctagggtatatttacaacatattaaattgtggtcactgaccaaatacaaatggatttattccac

SEQ ID NO: 17071 - DNA, 431 bp, Zea mays
  Clone ID: MRT4577_115565C.1
accggtctagaaccgggtcgacggacgcgtccggagcaaggagagcgccggcgacccggggcatacatcagctactggaaattagagagccgggtcggttggtcggagaacctgcgaggaaggactaaggagtcgaagatgactgcggcggtgctgtccgtgcgcacgacgacgacgtcgctgctagcagcagtcatcctgtgcctctgcatcgtctccctctccccccgcggcgccgctgccgcgcgggtctcccccggcgccagcccgatcgtggccacctgcatgacgggcccgtacccggagctgtgcgtgggggagctgggacagcggctgctggacgtgcagacgtcgatcgcgtccgcggcgcccgaccagcgcgcggccaggatcgcgggcgccccggtgcaggtggacgtcaagggcgctgt

SEQ ID NO: 17072 - DNA, 589 bp, Zea mays
  Clone ID: MRT4577_115566C.1
agccaaggcgcatcggtttacgaaatgactgatctacaaatctttgcaaatccaaaaaggaaagatcagaggcaacaaatctctgtgttctctagctacgactgcgagcaggcacaggcaccttagcctgaactactgcagcaccacgaacaatgaggaagtaaaccctagaaacagcatcgatccatcttctccacagcacccgtacgtcctttctgtagtagtttgattggacggcgaagtcaatacccgaaccatcccccttgcatagtggtgacgccttctttttcctttcagtatgagcaccacacggcaaggagtctgaggtgcgttcttgactccccactaacatttccacaaaaccttgctgcatgtcccccttctccctcctacaaaacattcaaacggttcaaattcgacgtgtaattgtatttaatttcgactcaaattactgaagctagctgtgtatggatggctacatgtatgtaaggtatacctctatatcgcatggatggctactgcgggttgccggcttccgcacagacggcggccttgatgcgctcgacggtgcaggcgatgaggctgttca

SEQ ID NO: 17073 - DNA, 279 bp, Zea mays
  Clone ID: MRT4577_115567C.1
gcattctttaacatccaaaaggagagcacccttcgccttgtgctccgactccgtggtggtcaatcagccatgggtcgttcaagctcccgatgtgcctgcgtcctctggtgccctctctgcatatggaggccgtcaaactatctgctgttcgcgtcatgaatcctgtcaacgttggcttacataatggaccgtgtgtgtcgcgtgtgcctactacccagaactatgacaaatgatgaatacgctcgatgcttgaaatcaaagcctgtgctctaaataaac

SEQ ID NO: 17074 - DNA, 1448 bp, Zea mays
  Clone ID: MRT4577_115568C.1
gccggccgggctgcgactgcccagctcgcaataactccttcctccccatctccccgttctcccatccgccgttcccctccgcttcctcctaccatggcgtcttcttcctccccgagatctcgccatgctagctctcccgccttctgctagccagctgcgagcacggagcgctcgttttcgggcttcctgcatgcgatatcaccgacgaaacgtgtctctggaagaaggcatcacaggccgggatcggagaatgaaagctgacgatatagatgagctagggtttgcgaggcactagctgggaccgtacgtaccgtgctgccattgttcatgactccggcaaggcgcatgccggcgatgatcggccggaataatggcgtcgcgttcgggtcctcgtcagcgctatctttaagccaggtgattattccggctgacttcctagacagccatcatctgcagcaagcgttcgagcagcaactctttgaacagatcccatccaccgcagtggatagcagcgacaacattatccacggtcgctccgacgcgctggtggacgagtttgagagcaagtcgtgcagcgagaatcccgatggcaccgcctccggcgatgatggccagggggacgaagaccctaaccagcggccaaacaagaagaagcggtatcaccgccacacccagcaccagatcgaagagatggaggccttcttcaaggagtgtccacacccggatgacaagcagcgaaaggagctgagccgggagctcggtctcgagccgctgcaggtcaagttctgttcccagaacaagcgcacacagatgaagaaccagcacgagcggcaggagaacgcgcagctgcgcgcggagaacgacaagctgcgagccgagaacatgcggtacaaggaggcgctgggcacggcctcgtgccccagctgcggcggcccggctgccctcggcgagatgtccttcgacgagcaccacctccgcctcgagaacgctcgcctccgtgacgagatcgaccggatctcgggcatcgccgccaagcacgtgggaaagcccatggtgtccttccccgtgctctccagcccgctcgccgccgccgccgccgccgcccggtccccactcgacctcgccggcgcctacggcgtccagtcagctgctgcgggcctcggcgccgaccacgtgctgttcggcgccggtgccggcgatctgctgaggagcgtgtcggccgggcagctcgacgcggacaagcccatgatcgtggagctggccgtcgcggccatggacgagctcctccggatggcgcggcctgacgcgctgctgtggggtggcggcgcgtcggcaggggcgcagcagcagcagctggacgaggaggagtacgtccggacgttccccgctgggctcgggccgaggcagtacgggctccgtccggaggcgtctcgggacagcgccgtcgt

SEQ ID NO: 17075 - DNA, 401 bp, Zea mays
  Clone ID: MRT4577_115569C.1
tagtcggacgggggtcttagcatttttagcagtggtctgcgtgatctttactgccgggagccttgtgccggtctgagaaattcgtcctggatgatcggtacgttctataggctgtcactgttagtaagaatttccaaactgctgtaaattggggggggggggacacggaccgtctaggcgccactgaggtgtatgatggtgcccgcttgcggctcgatacacggtatggcgatcaccttgagatggcatctctctggcttgacatagcacctaactgctccgcgcgatcggcgctagagctggtctgtcgtcgccgactgctagccagctttgctcggttgctctcagcggtttccttcgctttgtggaccacccaccttgcttccttgaatgcgagttct

SEQ ID NO: 17076 - DNA, 367 bp, Zea mays
  Clone ID: MRT4577_11556C.1
cccactcttctcatttaactccttcactctcatcttttttcttacctcttcaacctatccctcagacaggctttcttctactcacggactcctctactactactactcatatattcattctcatacataatccattctcacaactaatctccataattaaccctaacttttcaccatgatctatacctattaatactacctattcatatctcactttacactcacataatcatacatactcctatctatcatattcatctacataatacatctaactattcttacctcaaagacactttatatcataactcctaattatataccatacctaatcaactcccattaacaatacatttaaactaaaatt

SEQ ID NO: 17077 - DNA, 3212 bp, Zea mays
  Clone ID: MRT4577_115570C.1
gatccgccctcgaggcgctctcttttccgcccatgccggaggtcttcttcctcccggagctctcgccatgcccgctctcccgcctcctgctagctagcctagcctagccagctgcgtgcgtgcgtgcatggggacgcggatcgtttcctgcatgcgatatcaccaacgcttcgctggaagaaggcgtcgtcacaggcagggattgaagaacgaaagctgatcgatggtagagagcaagagccagctagggtttgggagctgaggctaggaccgtacgtcgtacgtacgtgctgccattgttcatgacgccggcaaggcgcgtgccgccggcggcgatgatcggccggaatggcttcgcgtttgggtcctcgtccgcgctgtctttaagccaggctgacctcctagacagccatcagctgcagcaagcgttccagcagcagctcttcgatcagatcccgaccaccaccacagtggacgatagcagcgacaacctcatccatggccgctctgacacgctggtagatgagttcgagagcaagtcctgcagcgagaatcccgacggaacctctggtgacgatggcctggaggaagaccccaaccagcggccgaacaagaagaagcgataccaccgccacacccagcaccagatccaagagatggaggcgttcttcaaggagtgcccgcacccggacgacaagcagcggaaggagctgagccgggagctcggcctcgagccgctgcaggtcaagttttggttccagaacaagcgcacacagatgaagaaccagcacgagcggcacgagaacgcgcagctgcgcgcggagaacgacaagctgcgagccgagaacatgcggtacaaggaggcgctgggcacggcctcgtgccccagctgcggcggcccggctgccctcggcgagatgtccttcgacgagcaccacctccgcctcgagaacgctcgcctccgtgacgagatcgaccggatctcgggcatcgccgccaagcacgtgggaaagcccatggtctccttccccgtgctctggggatcggaggatatttatcagtggggagtcaagaacgcacctctcgacctcgccggcgcctacggcgtccagtcagctgctgcgggcctcggcgccgaccacctgttcggcgccggtgccggcgatctgctgaggagcgtgtcggccgggcagctcgacgcggacaagcccatgatcgtggagctggccgtcgcggccatggacgagctcctccggatggcgcggcctgacgcgctgcgtcgtgttgttgttgcttcggcagggacgtagcagcagctgctcgtggacgaggaggagtacgtccggacgttccccgctgggctcgggccgaggcagtacgggctccgtccggaggcttctcgggacagcgccgtcgtgatcatgacctgcgacagcctcatcgagatactcatggacgcgaaccgattcgcggcagtgttctcgagcatcgtgtcgagggcttccacgcacgaagtgctgtcaactggtgtggcagggagctacaatggtgcattacaagtgatgtcgatggagtttcaggtgccgtcgccgctggtgccgacgcgcgagagctacttcgtgaggtactgcaagaacaacccggacgggacatgggccgtcgtcgacgtctcgctcgacagcctccgccctagcccggtcatcaagtgccggcgcaggccgtcaggttgcctcatccaagagatgcccaatggctactcaaaggtgacctgggtggagcatgttgaggtcgacgacagatcagtgcacaacctctacaggcctttggtcaattcaggcctcgcgtttggcgcgaagaggtgggttggcacactggaccggcagtgcgagcggctcgccagcgccatggccagcaacatccccaacggcgacctcggtgtgatcacaagcatagaggggaggaagagcatgctgaagctggcggagaggatggtggcgagcttctgcggcggcgtgacggcgtctgcggcgcaccagtggacgacgctgtcgggaagcggcgcggaggacgtccgtgttatgaccaggaagagcgtggacgacccgggcaggccgccgggcatcgtcctcaatgctgccacctccttctggctgcccgtcccacccaagagggtcttcgacttcctccgcgatgagacctctcgcagcgagtgggacatcctctcgaacggtggtgctgtccaagaaatggctcacattgccaacggccgggaccatggcaactgtgtctccctccttcgtgtcaatagtgcaaactcgaaccagagcaacatgctgatcctccaggagagctgcaccgacgcctcgggctcgtacgtggtgtacgcgccggtggacgtggtggcgatgaacgtggtgctcaacggcggcgacccggactacgtggccctgctgccgtcgggcttcgccatcctccccgacggaccaccgccggccggtgcggctccgtcccacggagagggtttggacgctggcggcggcgggtccctcctgacggtggcgttccagatcttggtggactccgtccccaccgccaagctctccctcggctccgtagccaccgtgaacagcctcatcgcctgcaccgtcgagcgcatcaaggccgccgtctgcgcggaagccggcaacccgcagtagacatccatccatgcaatatcgaggagggagaaggggggcatgcagcaaggttttgtggaaatgttagtggggagtcaagaacgcacctcagactctccttgccgtgtggtgctcataaaggaaaaagaaggcgtcaccactatgcaaggggggatggttcgggtattgacttcgccgtccaatcaaactactacagaaaggacgtacgggtgctgtggagaagatggatcgatgctgtttctagggtttacttcctcattgttcgtggtgctgccgtagttcaggctaaggtgcctgtgcctgctcgcagtcgtagctagagaacacagagatttgttgcctctgatctttcctttttggatttgcaaagatttgtagatcagtcatttcgtaaaccgatgcgccttggctaaaacgcgcccgttcgttgttgttcgatcgtagctgccttttgctattcataaaacgatgcaatttcaaccactgagtttcttctagaaaaaaaaaaaaaaaaaa

SEQ ID NO: 17078 - DNA, 153 bp, Zea mays
  Clone ID: MRT4577_115571C.1
attcggctcgaggaaaagcaaaactttttcgccgcggcgccgcccgacgacctggcgggccctctgctgagtgccaaccgacgtgcgcccgctgtccgatagacattgctgggctccatggacaccgctagcaggtgggcgcatatgagggac

SEQ ID NO: 17079 - DNA, 352 bp, Zea mays
  unsure (1)..(352): unsure at all n locations
  Clone ID: MRT4577_115572C.1
cttcccccattatgatgnttttttaacacgcacaccaacngagatctattgaactcctgcaccgtatcncaccccattacccaaagaatgaatatgcatgcatgattcatgttatcatctgcatggctgcttgcgggcatgcagtttgaataataggagggaaagtgtgctacttaaaagttcttggacgcctggtacttgacgccgaacttccagtcatcatggataacgttccatgaggtagtcttgcggtggtctctgttcataacccggaacttcattgacttccattgtatgttctccccggtcttccacactttcccccaattgcacttcatctacgtccacttaa

SEQ ID NO: 17080 - DNA, 331 bp, Zea mays
  Clone ID: MRT4577_115573C.1
cggactagcaacatacatagagaatttcactagcaacatcttaccaccaatgggacgcacaattatggccatcggtgccctccttgctctttcatcaagcaccactaccccaactatcattccacattgcatacatcacttcctttctccgttcacatcaccatagattggaatacccaactatacacccatacatactacactacaccatcccacatggcatcttacgttctatattaccgacctcacaataaccatatgcccaatcacaacacctattctatctgaatccataggtgcatacattctcacaacacatcctacaacaaca

SEQ ID NO: 17081 - DNA, 439 bp, Zea mays
  Clone ID: MRT4577_115574C.1
gcggccgggccgacgggcccaaggtgtctcaggagcataccctgtcatccctacctatcaattctatggttcagtatggccggttggggggagaccgattcaagagggcttaactcgattttgtggatactagtccagacgagagacacgtgttgaatagagaaggattttatctctcctcttttgtttggaaagcagctcatagttaatgtcggcagaacacgggactacaaaacccggtagtagaggtccaaatcctacgaaacgcgaatccatagatcttatggataaactattttggctggatattctcatagtgacgctgcacctgcaatttgacctcctacagaccaccatggatagtcaatggaatatgattggtactcatatcaaagatccaactgatccccacgcctgtattgcggatactcagtcacga

SEQ ID NO: 17082 - DNA, 265 bp, Zea mays
  Clone ID: MRT4577_115575C.1
cgcctcggacatcaccaccaccgtacgtgccaccctacgtgcccccgacgcctgggtcatcaccaccctacgtgccagcgtacgttcacgccgacgccgccggcgacgcgaactttcccagtcgacacgctgaagctgaacgcgtgcgtatgcgagctgagcaggctgatccacctggggatcgatcaggaggccaggccaagagctgccctctgctgcattgggtgtcggacctggacgcggcgctgtgcctctgcaccaccat

SEQ ID NO: 17083 - DNA, 163 bp, Zea mays
  Clone ID: MRT4577_115576C.1
gtgaaggcagctgctgtcctcgccggcactgatgtcaaggccaccatcttcttttcacaggaaggtcaagggccgaccaccgtgactgtaaacatctctgggctcaagccagggctatcatgggttccatgtgccacgcgcttggcgataccacaaacgggtc

SEQ ID NO: 17084 - DNA, 342 bp, Zea mays
  Clone ID: MRT4577_115577C.1
ttgggtttttttttttttttttttgggaaaaaaaaactttggaacaaaaagctgtaaaacaaaccgtggggaaccaaccaaggcgggggcaacccctggacacgaaacaaaggaccaataaatggcggcaggattaatgacagacacttaagtaaaaaacactaggggcaaaccactagggatcagcctccgagagcatccaggccttttgttttcacgtctaaagcctctttagctacctacaggtagccaacccgcactgggaccctaaagcctggcacgaccccgcttgaccaatggccctcaatcggagcgggctcaatctggggcggcaatccctgg

SEQ ID NO: 17085 - DNA, 157 bp, Zea mays
  Clone ID: MRT4577_115578C.1
tttttatcaaaatgcaaaggcctgtattagacaacgatttgtgtacatacagacactacaaccaacaaacatataataccatttattgtacatatcacatatataagacctacatcatccatattttctatactcatacctatgacattaattttac

SEQ ID NO: 17086 - DNA, 1182 bp, Zea mays
  Clone ID: MRT4577_115579C.1
agttctcttcgttccgtctcgcagtggtagcaccgcagcagagagaagagagatcttctagcctagtagtagcatctacttactagtgagtgagtaggagtacttggctaggacgggggggccgtgacgacggtagcagcatgagctgcaacgggtgccgggtgctgcgcaaaggctgcagcgaggcctgcgtgctgcgcccctgcctccagtggatcgacgccgccgaggcgcagggccacgccaccgtgttcgtcgccaagttcttcggccgcgcgggcctgctctccttcatctccgctgtcccggacgcgcagcgcgcccgccctgttccagtcgctgctgtacgaggcggcggggcggaccatcaacccggtgcacggcgcggtggggctgctgggcacggggaactggcacctctgccaggccgccgtcgacaccgtgctgcggggcggcgccatcggcccgctgccggagcttggcgccgggacgggccacctgtacgggccccccgccgccaccgacaagcgcgccggcggctggtccaccttctccacggcgaagcgggcgcggaaggccgccgccggtgccggggcgccgcccgcggcggcggcggcgtgctgcgacctagggctgtgcctcagcagcagccccgggtccccgccggcggcggcggacaggagggatcccctcctgcggcccggcacgccgtccatgagctcggacgagtccgtcacgaccacggccggcggcgacagggagcccgtgctgctcaacctttttgcctgacgaagccgccggtcgacgacgcaggccaaaccaaaccaaaccacacgcgcagcggctctcttgattggcagccgtgcgatgtgatgtgatgtcttgtctggacgatctgtcccggcggccaggcgttttctctcgtcgccggcgacggcaaggccgtttttcattcgtttctggctgcggccttagattttatttttttggttgcgtagtagcggtagtagaaaagaaactaccagtagcagccggcctcgaagccccgtttgcgtgtgggcgaagatgagagcgccggtggccaccccaccaaagtataactatttttccccctgtttttttttttcttctctcctttattgaacaattactataatataaataaaatactatagcaccacc

SEQ ID NO: 17087 - DNA, 283 bp, Zea mays
  Clone ID: MRT4577_11557C.1
cccacaaaaaaaacggatcgagtaaaagctcatggcaacccaaacaacttggggccatccatgtttttttcaaacctttcacaaacaattaagtcccccccctgccacagcgaatgcaaagtttcagtctttcaaaccccatttgcaaatctagaaacactatgggttgcctaaagaaaactttccgatcagtcaattaaaaggggtggaggctgcctacacatctggttttttaccatacacaattcgggggtgaggttctcatgttggttgctaaaataaa

SEQ ID NO: 17088 - DNA, 294 bp, Zea mays
  Clone ID: MRT4577_115580C.1
accaaatgggaagctgcagccaggcttcctggagattctacacgccaggtggtggtgcgctcaggggttgtgctgggccgtgggggtggtgccatgggccacatgctgctgccctttcgcctgggcctggggggccccatcggctcaggccaccaattcttcccctggatacacatcggggacctggcaggaatcctgacccatgcccttgaagcaaaccacgtgcacggggtcctgaatggagtggctccatcctccgccactaatgctgagtttgcccagaccttcggtgct

SEQ ID NO: 17089 - DNA, 254 bp, Zea mays
  unsure (1)..(254): unsure at all n locations
  Clone ID: MRT4577_115581C.1
ccagggccgcccgccggcgcaaagaccgcgaagcgaggcggcagggcgacgaacgggggcaggaccaagacggggaaggagaggaaccccaggaacagagaacaggacgaagccgngaggaagcagcggagagcggacgagcaacaaggggccgcacgggggcgcaaagcggcccaagggcgggcgaggacagcgacagcgcaacacacgcaaggaggggcacagggcacgaaggggaggacagccagagcacc

SEQ ID NO: 17090 - DNA, 518 bp, Zea mays
  Clone ID: MRT4577_115582C.1
ggagggcaaaagcttgcatgcctttccagaaattccaaaaccctacagcggggttaagggggggcaaaaaaacccggccccataacaggttactttaaatttcaccttcacaggaataaaaagggactagggggaaagtaaaacaaatttaccccccaaccccccttaaaacagggaaatgggggggaaaacgggagaacccaaacaaacccttagggggggaaaaggaaaaaaacaacaccccgaacctataggaggggaaaacccaaaaaagggtttcaggttgatttcacagcagtggcaaacgacttaaaacaagcgggggacggccttttaaaaggggaaaccaaaaggatcgtaggggacagtaaagccacccccccagctgggggccctgaccccaacgaggggggaacgcacgtcaatagcgtaaatatgcccaaggaaccctgaagagcagccatcccaagcgggcttccagaaaaggacttgactggggggggcatgtctattttcct

SEQ ID NO: 17091 - DNA, 1710 bp, Zea mays
  Clone ID: MRT4577_115583C.1
atggtctctcgcccaccgagcgcatttctcggtcttcacctcgctcctgttgtagagttctcgtggcaggggaattccaagcggaaaaggggggaattctggaataaaagtgtgcatagtatagaatctctggctgctggggatgctcaacataaacttttccaaacccttggaccaacgctcttgatttcgatggcatatattgaccttggaaagtggttggtagcagtggatgctggatctcggttcggctatgatcttgtgctactggtgctgttcttcaatttctcagccattttattccaatatctgtcaacgtgtatcggcatggtcactgggaagaatcttgcagagtcttttggagatatcaaccttattctgtacttctacatgactgatagatctgctgcctggaatacagcatggctatccttattgacctctgaattgacaatgattgcaggcatggcagtggggttcaaccttgtgtttgaacatgacaatcttatcacagccatatgttttgcaagtgttgttgttaatctactaccatacacactctcccgactggtaaagtgttcagatggcatgtacaagcacgttctcttatcaatcctgaatgaatgtgtcttgcatgttgaaagtgatccaacaacaacaaacctcagggtgctgaatgtccagagaagatcatctcatacccttggttccctgtttcatgaccaccttttctctatattatttatatttactgggatttaccttgtgaattatattctcctgagttcagccgcagatgaatccagtgagacagtggtcatgaactttcaagatgctacagagctaatgcaccagatattcacaaatcctgcaggaccaattgtgctattagtgatccttctcttttcaagccatatcatctcattgacatgcattgttagtggtgaagtaatttcagagaacttctttggtgttaaactgccgctttcggcacatcatctgctacctaagggtctggccatggttcttaatatctattttgcgaaggttgctggtcctgaagggatatatcagttacttattatgtgcccagttatccaggctatgcttcttccttcatcgattatacccattttacgtgtttcctcgtcaagattattgatgggaagatacaggatagctttatgtattgaaatctttgccttcctcgcattccttcttgtggtgttcacaaatataattttcacagcagaaattatgtttggtactagcacttggacaaacaacctgaaaggagatactggaagccctgctatacttccatattctgttgtagtcctaatttcatgtgcatcgattggatttacactgttacttgctgttactccactaaaatcagcaagtaatgaagctcagactcatttatcgtccatgcactcacaaagaggagctttaggcactactcagagagaagcaacatctctgaaaaaatttgagcatgaagaagttcagagctgttctgttggagctgttcttatgggttcatcggaagatgaagaaattaaggggtcctctgttgatgctgttccaagggattcattggagggtcttcagaagtcaacttttgagattaagtatgattcggacgcctctgatggtggcgccgagcaatttgtggatagattgaagctgaaccatcaccatctataa

SEQ ID NO: 17092 - DNA, 257 bp, Zea mays
  Clone ID: MRT4577_115584C.1
agcggaaagggactttattacatcaagatgtccaagacatccaaagagtttataacatagttattaacataatcaaagtacggaatacaaaacatagcagataaggcattcacaggtagctgactaggggtttgccactaagataactataactcgtcgtagtcctgaaactcctcaaagtcctccatgttgccagcatcctctcctgagcactgaatacaatagggacaacctggggtggtgtggcggacgcgtgg

SEQ ID NO: 17093 - DNA, 334 bp, Zea mays
  Clone ID: MRT4577_115585C.1
cctccaccattgagcgtcccctcgcctttgtccacctcaccgccgggctgttacgccattccttgcgccctgctccgaccaggctcgcctaggttgcgacctcgccaaaccgcgcccctgctcgacaccggtgatggccaccgttggtccctgcgtccttccctggtcgtctcacctcccctcgacgcccctgttttttccccagctccggtgtccgtcgcgccctgctccttccattcgtacagcactgctctggtggtcgtccaccccagcgccctgtaaaccttgaatctagcttctaaaaccctagtcagtcaaaaaaataagaatttat

SEQ ID NO: 17094 - DNA, 421 bp, Zea mays
  Clone ID: MRT4577_115586C.1
gcgtgtcgccatgcacgatcgactatgtctgctcgccacaaggcctgcaactgtctgttgaaatgccgtgtccagcgggagcgagaggctctgcgcgacaacatgaaggcattgcgaatcctgatatccggaggctgcttaagatgggcggtcttaacctcatttgggggctcatgtacgaggagaaccgagagaggctcatgatcttcctcctgaacttaatgcgaaacggcaagacctactcggagcacagcccgctaaagagcgttagcgcatgaacgcagctacagaatgaagcgccaaggtcataccctgtacagattcagcagctgacaggcgctaccgtcaatagtattcgtggcaaaaggcttagatcgccgtcaagaaattgtgagtcatctggatgacgtgcttaatttcc

SEQ ID NO: 17095 - DNA, 146 bp, Zea mays
  Clone ID: MRT4577_115587C.1
gcgccgactaacaacctcgccgatggcgggtaccacatgtatacagacatgctggagtggatcggtcgaccggcgaagaatgttccccagcagccgacacaaccgctgtcgggtgtccatctccaagaagctatagtggtacgtgg

SEQ ID NO: 17096 - DNA, 171 bp, Zea mays
  Clone ID: MRT4577_115588C.1
cattcgggcaactttactagacacaaaaggtatgcgaagcaggcacctatggttggtaacctttgggccaacatcaaccggcaatattattacaatatgttagattcaggccatgtggagataaaaaacatttgggcaaaacagcgacaactgcttgtgttagttcacctt

SEQ ID NO: 17097 - DNA, 603 bp, Zea mays
  Clone ID: MRT4577_115589C.1
cctccatcttccatactctatgcaggctagcctcttacacgtccggcggctcactgtctatgcccagagggcaggactcacgaggatactggataagatacacagagctcatgctgggggtcccggtagcatgagatgctgtagctgatgatccatggactggcacccttgtttgaacaagcattgctggaatgtaccaaaaccttccctgcatcagggttcgcatatcccgcacaaggagaacagtgtgaacgcgaactgtgctgcactcaacccgggggtcctaatgggcagagctgcacgagttgctaaaaacaggtgatccggctccaattctgcatccactggtatttgaagtcgacgtacgggcaccttatcaaccacttaatcctacgtctttaaaaaatggatcaactagtgctttactgattactcgttcatttccttgcgaaatgataacacaaagactttcgtctatatatatactagccgttgtgcgattcgccctgggatgtatctaatatcaccctgtaaggtatccacccaacttcctttcatgtactacgtgcactctatcttactaatacaaatcatgttaaggaa

SEQ ID NO: 17098 - DNA, 291 bp, Zea mays
  Clone ID: MRT4577_11558C.1
gtccatgaggacgccgtgccgggtcagtgttagcctccagccctggttgtggaaggcgacagtagtcatggcgatgtttgagcagatgagagccaacgtgggcaagttgctcaagggtatcgacaggtacaatcctgagaacctggccaccctggagcgctatgtagagacgcatgccaatgaaaatgcctatgatctggaagccaacctggctgtcctgaactgtaccagttcaacccagccttctttcagaccacggtcaccgcccagatcctgctgaagggcctcacc

SEQ ID NO: 17099 - DNA, 305 bp, Zea mays
  Clone ID: MRT4577_115590C.1
cccaccttttccttttttcattataagacccttgacactcacaaggggcggctgtcacatattcaactcaggctactgcccacactaagacacaaaaattttttttttcatgagcacactgatcatactatgctccacagaagcgaacctcacatttatcaacgcatctataaacactatgacaaaaaagctgtttgtccatattgataacataagcaaaggcacgaaggaccttttcaaatagaagagaacactcgattcaatcacccttcaaaactgcactgcatggtgtcacgtgcatgcgc

SEQ ID NO: 17100 - DNA, 216 bp, Zea mays
  Clone ID: MRT4577_115591C.1
gagttcatctagtcggcggccgccctctgttttttatttttttactggaagagatgtcatggcacaatccaaactgctttacaccggttaaaacgccatgtaacgttctctcgctacgatctgtgggctgttgagagaaaagacctgcgtcacacagagctggaatgtgtgcatctaacatttacactgatctggcgtgcaagtttacattgcaga

SEQ ID NO: 17101 - DNA, 245 bp, Zea mays
  Clone ID: MRT4577_115592C.1
gtcaacgcctgctttaaagcaattgccctacctctagttactccagtcatgcaagacactgatgctcatccactgtgaatgtggtgccgatcaggattttagtgttaatactatacttgcgtcttagtccccctgaattgttgaaccagggaatttactcaccaacgaagacgcccgacacaattaaataaaaaataaaactactttaattttgaatataacttaattttttatatttaattagg

SEQ ID NO: 17102 - DNA, 175 bp, Zea mays
  Clone ID: MRT4577_115593C.1
gtttctctagcctccaagtcagctttgtccagttcatgaagttgccactccattgcctggtgaccacagcaatcatcctttcaccttgctgtggccagagtctctcgtgaagtttgttacccatcaccgtagccgtgatgagtctctacgttgatcgaacaactcacgctttctc

SEQ ID NO: 17103 - DNA, 388 bp, Zea mays
  Clone ID: MRT4577_115594C.1
ggggtggagcaccaccgagcattgtactcctgtgggagcctggccgccggatcgttgcttcgtacttccatatccccgaatgatacctgcgaccgtgatttatccaaaaaggatgttgttcgtttcatggcgcgtaccctgcataccgatcacagggccactgatggaaaaggttctaggaagcaactcagatcgaatgcaaccaaggatgtctagaccggcatactggagcaatgaataaaccacaccagtaccacccagagactgtggtttttctttagactcgtctgtacctaattactactgaatggataaataagaaactgccgcatgctagtattgtacctgacatggatagacatattgagactgttgctggcttgcagag

SEQ ID NO: 17104 - DNA, 1749 bp, Zea mays
  unsure (1)..(1749): unsure at all n locations
  Clone ID: MRT4577_115595C.1
agttcttgatgacagtggaagcacctcactcgctctcgctaatccacatccaccctcgagtgctcgctcactcgaacagtggcggcgagatgcggagacagatccctcccgtctcctgcctcgtacccatcgcggtggcgttcgcgctgctcgctgcggcgtctgcagcttcgccggcgccggtcaacgtcacgggcgtgctctcggcgttcccggacctcaacgacttcacgcggctgctggcgtccagccccgtgctgcgngagctccgcagggcggtcgtcgctgacgcttctcgccgtgccgaacggaaacctcccgcagtcgccggtcgggcgttcgcgggcccgcgtcgggcgccgacctcgccgacgtcctccgctaccacgtcctcctcgagtacctctcccacgccgacctacgccgtctgcccgcctccgggaagctggtgaccacgctgttccagacgaccggccgcgccaccgcggacctaggcgccgtcaacgtcaccacagcgggcgcctcccgcctcaccgtcatccggtcgccggcaccgttcccgggctcgaacgccaccgtcctcggcgccatcaccgcggtgccgtacaacctgagcgtgctggcggtgagcggcctcatcgcgccctccgggttcgacctcgcggcgtccgagtcccagccgcccgcggccgtgaacatcacccgcgtcctcgccgacgcgcgcgccttcaacgtggcggcgtccatgctggaggcgtcgggcgtggcggccgagttcgaggacgacgagcgcggggccgggatcacggtgttcgcgccgaccgacgacgccttcgcgggcctcccggcgggggaccggctccagtcgctccccgccgaccgcaaggccgtggtgctccgcttccacgtgctccactcctactacccgctggggtcgctggagtcgatcgtgaaccccgtccagcccacgctggccaccgagttcagcaacgccggccgcttcaccctcaacatcacccgcgccaacggctccgtggccatcgacaccggcgtcgtgcaggccaccatcacgcggaccgtgttcgaccagaaccctgtcgccgtcttcgccgtatccaaggttctcctccccaaggagatgttcacccgcacagccgccgcctccatcgtggccaccaccgcctccgcgtcctcccccccaccagccgcgacagccccggaggcctccgagagcgcgcggacgccgccgacaaagctgtcctccccacccgcgctccgcggcggcgggcaggactacgccacggcgccggcgccggcgcgagggatcgagtggtggtgtatagcattggtgtatctactcccacatctggtatgagatccgggactccgtcagtccaccgctgttctcaatttttgccttctgttttctcttctctcttctttttcttatgtgggttttgcaagaatctgtacaatgttgactctgtgaggtgaggtgaggcctgagggaggtgaagaaggagaagaagaagattcagctgcgaaaacaaagaaaatgcagcgaccttttaagcaagaagaaacagaattggttattgttggccatcatcaaaggggaaataacagtaccgccctgtaaaaatccaatcaaatccattgcatccgacaattgctttaccatactcgtgtctcgtgtgtgctacattgcagttgcttcagccagctccatttttgccctgtcgatttgct

SEQ ID NO: 17105 - DNA, 210 bp, Zea mays
  Clone ID: MRT4577_115596C.1
ccgtcctcttggaaagctcacgatcgatgtctagcgcgccaatagagcggtcatcatcgggcaccttatccgtgtagatatcgattccctatttgactggaccgatttctcgcatcctcttactcgtgccagctttgatgagcctaacaaccacctatttctcaagaccatgtaccctttcaagaaggtcatgaacgatgctgtccttga

SEQ ID NO: 17106 - DNA, 1276 bp, Zea mays
  Clone ID: MRT4577_115597C.1
cctcgcccccggccgggaagtgttgtagagcagacgaagctagctaacaattaagcagctcgatcgagcacacacacacttgatcactactagacagtaaacacattgcgcaaaggccgccatggcttaccgcgcctttgctacgctgcttgcagtgctagcatttgtgggcttcgcttcagttccccgtggtctggcaactgacccgacccagctccaggacttctgcgttgctgataacaagaaccctgtgctggtgaacggggtggtgtgcaagaacccgaacatggtgaaggcaaccgacttcttctccacgatagtgccggtggcgccaaacgggcagggctccgctgtgacgccggtggcggtgaacgagatcccggggctgaacacgctgggcatctcgctggcgcgcatcgacttcgtccccggcgggcagaacccgccgcacacgcacccgcgcgggtccgagatcctgacggtcatccagggcacgctcctcgtcggcttcgtcacctccaaccagctgctcaacaacacgctcttcaccatgcagctgaacatgggcgacgtcttcgtgttcccgcaggggctcatccacttccagctcaacaacggcaagacccccgccgtggccatcgccgcgctcagcagccagaaccccggcaccgtcaccatcgccaacgccgtgttcggggccaagccgcccatcctggacgacatcctcgccagggcgttcatgctcgagaaggccaccgtcgactgggtccagcaggcgttcggcgcggcaccagtggccggcggcggcggtggcctgcccggaggaggtggctatcccggcagcggtggtggcctgcccggaggaggtggctatcccggcagcggctttccgggctaccccggccgtagctgatcggtacggtggtggctccacggcggcgccgcctagctagcatgctgcacaagtgcagccgcgcgcgcggatcaggccgtcatacacaaagtatacttatatatagtacctcaaagtcctcaagcattaagccacgtgaagtgaaggctatacgtattaagttcggttgtaatggtcaggtgtaccaaacacccaccaacacctagctagtgagcaggcgcaatgcggcgtctgtgttgatcgagccgtagctctagctctagctcgatcgggttgaataatttgcggcaaaacttatagatatatatggaataaaatcgaaaagtttcatcgttttaaaaaaaaaaaaaacggacgcgtggg

SEQ ID NO: 17107 - DNA, 2128 bp, Zea mays
  Clone ID: MRT4577_115598C.1
gtaccctccgagtctgccgggatccttgctcctcctttccttctcttccttattccattctcctcctcaactccatcgcattgctattccagtcctcacagagaagaatcccgcgagcgagcgagcgagcgcgcgaggcggcaaggacgaacccaagacgtacgatggcgaggaggctggcgtacacgacggcgctgaccacgctcttcagctacgggctgctcttcgccttcggccagctcagggatctcttccgccacctgctcggctgcttcagacccaacaaggacgacgacgtcaagcaggggtacgcgccgatctgcgtcggcctggaggatttcttcgtgcgacgcctctacctgcgggttcaggattgcttcggcaggccaatcgctagcgcaccggactcatggttcgatgtggtggagcgtacctcagacgacaacaacaagacattgcagcgcacctcaaagaccactagatgcctgaacctgacgtcctacaactacctcgggttcgccgcggccgatgagtactgcgtcccacgcgttgtcgactccctcaagaaatactcggcgagcacctgcagtgctcgagttgatggcggcacgaccaagcttcacaccgagctggaggagctggttgcgcgttttgtcgggaagcctgctgctgtcgtcttcggcatgggttacgttacaaactctgccaccattccctgcctaatcggaaagggtgggctgattatcagtgactcactgaatcacaactcgatcgtcaatggcgcaagaggatccgatgcgactgtcagggttttccagcataactgccctgctcatttggaagaggtcctgagagagcagatagctggtggtcaaccactacaacacatgtgaccttctatgacatttagattacgtcaccaacaatggggctggacgagaatcaaactacgaagagaggctaggcaggcatgacagatgtttgaggaggctgaagatgctattcacagggatgactctagtgatgatgatgaaataggagacgggcaactatgtgttgtgtgcttaaggaagagaaggagagcagcttttattccatgtgggcatcttgtctgctgttccgaatgcgcattaacaatagagcgtacacctcatccattgtgcccactgtgtggtcaagacatcagatacatgatgagggtttatgactcttaagtatgacaaaatggagatgtgaagcgtggacaatcagttggcactgcagccattggtggtccattcaagcctctgaatcatgatggaaaattagaaactaatttgatggtacaaaatggcattctagagaaggcaaatttgaccacgaccttgatgttgtaaatgatggtgacaaacagttgtttgatgggagtaaaggatgcagagatgacagtgcatagcagccaggatgttgcagcggtagtgaagagcagacacagcagaccacgatgaggcctgctactcagagccaggatgaccgtgaggcctgctactcagatgacagacacagatggcagacacagcagatcacgatgaggagatgttggtcccgcatcaggatgacattaaggctgcagccgatgaaacaccttgccgcggtgatagcgccagaacagccgtcgacggcttcaagctcctgcgtgtgtttatttgggcaacagaactagacgtggatcacaagcagccgcattgtttatttgggcaacagaactagacggcattgggccatgttgcctgggttcccaggttcgacggcttcaagctcctgcgggctacctgacgtttgggcaacagctagccgcattgtttatggacctggacgtccatgcacctggacacgtcttgccattgggccatgttgggtcgcttctaaaggcagtaaaatcattcaccaaggagtcgacgacacagctagctgatttgtctgctctgacgtgtatgtaagcaaatgttgtatcaggtcatgtttgtaaggtgtgggaaatgaagtctaggcttatgtagtgccacaagtgttacaacaaaaaacgtagcatgcgctcctctgattcgtcgacattatattatatattatatttattcatcgtcgttat

SEQ ID NO: 17108 - DNA, 468 bp, Zea mays
  unsure (1)..(468): unsure at all n locations
  Clone ID: MRT4577_115599C.1
aaaaaattagaaacaattcgcccccgcnacacctccccaatttccccgattcttattttttttttatccccacccccaaaacaanctgacctgttaattataaacaacgtttgtccgnncaactacaccacatcttttaatttcatttttcactttttttttttctcatttacttttacattcccaaatattatttttttaccactctattttattcattaattattcatttttcattttcttctttattctcaatacccttaacctaattactctttatacctattttacttcattactaacacatttttatttttttttcattatatttcatattctttattcttctatcttattatctttcttttttcactacatatctattatttatttctttatatatatttcttacactctttacctcctattatttttttttttttaatatctcttatttatctttttttt

SEQ ID NO: 17109 - DNA, 259 bp, Zea mays
  Clone ID: MRT4577_11559C.1
aaaaaaaaggggccccttttttcccttcaaaaagttaaaaggaaacctgttgggctaaaattttgcccacattttttttacacaacatggcttttttttgttacaaagattctgccgggcttcccaggggtcaaaattttgttttttgggggtcccagttttgccctttgcaacctagcagaacagattcttctgggtcacacttataactaacaatcgggcaaagaagaacacttggagcccctccaatccaatcagg

SEQ ID NO: 17110 - DNA, 258 bp, Zea mays
  unsure (1)..(258): unsure at all n locations
  Clone ID: MRT4577_1155C.1
cgatcgctcagcggatatatttggatatggtatatganaacttggtatactaagctaataatgatggactgcttaaatgttttagggcggctagttatattgagtaactggaattctgaaaccattcgaacaccagaaccataagatcattttgtcatctgggttgtgctagatactaataatctagcatggtgatgccaagaaactctgatcaatagcagtaaataagggaatacctccacttgtatagttcatttg

SEQ ID NO: 17111 - DNA, 160 bp, Zea mays
  Clone ID: MRT4577_115600C.1
gatcctcgacgccacggccgaaaccgccgaggccacagccgcaccctcaccggggtttgtcgtcaccggccccgtatactgcgacaactgccgcgccgggtacgagaccaacgacaaccacgccatcgaaggcgcgacggcagagatcgaatgccgtcac

SEQ ID NO: 17112 - DNA, 610 bp, Zea mays
  unsure (1)..(610): unsure at all n locations
  Clone ID: MRT4577_115601C.1
aattcggcacgaggcggaagtagacgtgcacagcacaggcgcactgcagggaaccaatccccatggccgccgcaccctgcacgctcaacatggcctccgtccttgcgctgctgcttgtcttctccgtgcactggacggggcgcagccacgccttcagcctcatgaactacctgtgcaacaacggcagctcctacgccctcaactccacctaccgctccaacgtggtggcgctcctcgggtccctgtccgccaacgcgtccagctccgccgtaggcttcgccaccggcacgctcggccgcggcccagaccagacgtgggggctcgcgctctgccgcggcgacgtcaacggcagcgcctgcgcgtcctgcctcgcgctggcgccggacgtggccttcggcaagtgcaggggcgtcaaggacgcgtccatctactacgaccgctgccttctccggtactcggacacggacttcctggccaccccggacgacgccgcggcgtcggtgcagtacggcgccaacctgcaggtgaacgtcaccgccgaccccggacggttcgcggngctcgcggccgacctcgtgggcgcgctgtccgcctgggcggcgtggaactc

SEQ ID NO: 17113 - DNA, 340 bp, Zea mays
  unsure (1)..(340): unsure at all n locations
  Clone ID: MRT4577_115602C.1
attcnnctcnaggatcggtcgaatccagcaccccctccagatttgcgtcaccaatcttcttcttcttccgccgccgccgccgctcccccacaaggaggttagctgctatccccaaatcgattcatcaatcatccgtgtccttccatttcattccagtcggtcgccacagcacggaccgagaacagagcatcacgtcacatcaaactaacctaaccagcctcgtccctcgctgcgtatctgctgcactttcatcaacaccagtctttctcctcctggattgcattgcccaggcaagagaacgcactcacaccgaccggaataaccatgaacttcttatcca

SEQ ID NO: 17114 - DNA, 1215 bp, Zea mays
  Clone ID: MRT4577_115603C.1
ctggccgggtgacaagaacactggcagaccaagggatttgcattatttgtttacaagtctgtggagagtgctcgccgtgctttggaggagccaataaagaattttgatggaaagacgctcaatgtgcagaaagccatagatgggaggaccaagggctcatctggaatgaatacaaatactaactccaatcccactactgcatctgtggtcgtcgcccagatgactgctccttccagtgttgccatcagcccatatgatgcatcagcatatagtgctactgtggttcctgacatgagttttgcacagcaagctgctatgctgggattaggtgcacagcaacaggcattcactcaaccgaatgcaatgcttgccatgatagcagcaatgcagaacccagctgcgctagggatgagtccagccatgcttgctgctatgaacccagccttcgccgctgctgcattgggtgcaggggggcagcaggcacacacagttggtcttacaggttttggagctcagggttttgcgacaccgtcgtttggagcaggtgccgctttcccaaatgcagcaggtgttcaagcagcagcagctgcatatcaaggaagtggagctcctcctggctttcaagggccacctgggtttcaggttggccaggcaactacccagacaagcactgcagcggcagcggctgccgcagctgccactgctgctggttatcaggctggggcatctgggcagggccaggtgcctggttctcaggtcggaggcactggttttcagggtggatattgacagaactagtttggcatctgtggtccgtggttcgttcatgtggttttgcattcggatggcttttgagtctatattggtgccaaaatgtagcgaaaggcttcctgctgttgaattttacaactggatttgaaccagatgcctttgtagcagtatttgaaggaggaactttcttgaaggatcatatcgttttattgcctaatatgtagttttgctattgcggcttcattatgtactttgtggatgtgtactgggtttcatgtatcaaaatatctgtattttgactagttggctgttacctggtcttatcaaccgtgttaaatggttttgtgggcacaattggagacattttaactgcagttcctgggctgtttggagctatggggtatttatggcttttgccttaaacctggaaatttcttccccccc

SEQ ID NO: 17115 - DNA, 230 bp, Zea mays
  unsure (1)..(230): unsure at all n locations
  Clone ID: MRT4577_115604C.1
ttgcatgaccatgnacnagtctgccgtacngctgcgaaacgctcgcttgcatggccgagtgtaatcgctgcgaataaccacatacacgcggaaggacaagcgaacatcgaaagtattgtgggcttcccgtccgaccgagctctcgactctctctctcccaagacgtgttgagctgtttcccagtccttcgtcaccttccctccgctcagactcaccagcgcagttctccc

SEQ ID NO: 17116 - DNA, 815 bp, Zea mays
  Clone ID: MRT4577_115605C.1
gcgggagtccagccatgcttgctgctatgaacccagccttcgccgctgctgcattgggtgcaggggggcagcaggcacacacagttggtcttacaggttttggagctcagggttttgcgacaccgtcgtttggagcaggtgccgctttcccaaatgcagcaggtgttcaagcagcagcagctgcatatcaaggaagtggagctcctcctggctttcaagggccacctgggtttcaggttggccaggcaactacccagacaagcactgcagcggcagcggctgccgcagctgccactgctgctggttatcaggctggggcatctgggcagggccaggtgcctggttctcaggtcggaggcactggttttcagggtggatattgacagaactagccatctgattattttccttgtatcttagtttggcatctgtggtccgtggttcgttcatgtggttttgcattcggatggcttttgagtctatattggtgccaaaatgtagcgaaaggcttcctgctgttgaattttacaactggatttgaaccagatgcctttgtagcagtatttgaaggaggaactttcttgaaggatcatatcgttttattgcctaatatgtagttttgctattgcggcttcattatgtactttgagaaagtgtactgggtttcatgtatcaaaatatctgtattttgactagttggctgttacctggtcttatcaaccgtgttaaatggttttgtgggcacaattggagacattttaactgcagttcctgggctgtttggagctatggggtatttatggcttttgccttag

SEQ ID NO: 17117 - DNA, 1963 bp, Zea mays
  Clone ID: MRT4577_115606C.1
gaccccctcgaggcattgggtacctcgaggccgggccgggccttgtgaatcactagtgtcgcaaatcccaatctcccagcttgcgcctaaaccctagcttgcctatcgatggcgccgaagaagcgcaaggccgatcccgccgagtcccccgccgccgtggaggcagccaccaccaaccaccgccacgagccggcgtcctcggagcccaagccacgcggctccatctacttccccatcactgacgacccgcccgaacccaacgccgccgaagaggacgaggacgagggcgccggcgacgacgaggacgacgcggaggacattgtcaagctacttgagccgctgtcgcgggagcagctcgttgcgctgctccgcacggcggcggaggcgagccccgccacgatggcggccgtccgccgcgccgttgaggccgaccctgccagcaggaagctcttcgtccacggtctcggatggggtgccggcgccgaggacctccgctccgccttctcacgcttcggcgagctcgaggactgccgcgtcatctctgacaagcaatctggtagatccaagggctacgggttcgtcctcttccgctcccgccgctctgcgctccgcgccctcaaccgccctcagctccaaatcggtggtcgtcttgctttctgtcacctcgccgcctcaggccccgcacccccagcttctcagtctcagaaccctatctccaacgccaaccccaatgctaactctaactccacgagcaacgctgctggatcctcatcatcacaaactgacaatatacagcgcaagatatttgttggtaatgtgcatgctgatgtggacgtggaccgcctatatgactattttgcacaatttggtgagattgaagagggcccgttgggctttgacaagaacactggcagaccaaagggattcgcattatttgtttacaagtctgtggagagtgctcgccgtgctttggaggagccaataaagaattttgatggaaagacgctcaatgtgcagaaagccatagatgggaggaccaagggctcatctggaatgaatacaaatactaactccaatcccactactgcatctgtggtcgtcgcccagatgactgctccttccagtgttgccatcagcccatatgatgcatcagcatatagtgctactgtggttcctgacatgagttttgcacagcaagctgctatgctgggattaggtgcacagcaacaggcattcgctcaacccaatgcaatgcttgccatgatagcagcaatgcagaacccagctgcactagggatgacaccagccatgtttgctgctatgaacccagccttcgccgctgctgctttaggtgcaggcgggcagcaggcacagacagctggtcttacgggctttggagctcagggttttgggacgcaggcatttggagctggaggtgcagctttcccaaatgcagcaggtgttcaagcagcaacagctgcatatcaaggaggtggggctcctcctggttttcaagggccacctggatttcaggttggccaagcaactacccagacaagcactgcagtggcagcagctggttatcaggctggggcagctgggcagggccaggtgcctggtgctcagattggaggcactggttttcagggtggatattgacagaactagtttggcatctgcgggtcgtggttcgttcatgtggttttgcattcggatggcttttaagtctatattggtgccaaattgttgcggaaggcttcctgctcttgaattttacaaccggatttgaatcagatgtgtttgtagcagtatttgaaggaggaactttcttcaaggattatgttgttttattgcctaatatatagttttgctattgcgacttcattatgtactttgtggatgtgtactgggtttcatgtacctaaatatccttattttgactagttgtctgttacttggtctt

SEQ ID NO: 17118 - DNA, 656 bp, Zea mays
  Clone ID: MRT4577_115607C.1
tgatacaatgaaggttctcatcgttctcgccgcctgtgtggtggccgctctggccggagttccctccgagtctgagatcaaggcccactgggagagcttcaaggccacccacggcaagacctacgccaacgctgtcgaggaggcctacagggccaaggtcttcaaggaaaatgccatcaggatctccaagcacaacgaccgtttcgccagcggcgaggtcaccttcaaggtcggctacaaccagtacgctgacatgcacacccacgaggtcaccgagaagatgaacggtttccgcatggagatgaagaagcccagcgccttcgtgcactctgcttccaacgactcctggccctggagcaagaaggtcgactggaggtccaagggatacgtcacccccatcaaggatcagggccagtgcggttcctgctggtctttctccgctaccggctccctggagggtcagctcttcaagaagaccggcaagctggtggctctcagcgagcagaacctggtcgactgctcttgggactacgataaccagggttgcaacggtggtctgatggactccgctttccagtacgttcaggctaacggcggtatcgacaccgaggagagctacccctacaccggcgaggacggcagcgcttgcgcgtaca

SEQ ID NO: 17119 - DNA, 169 bp, Zea mays
  Clone ID: MRT4577_115608C.1
ggcggctcttttttttttttttttttaaaaaatttccgtatagcgaaatagactctgtacctctcttaagtgtcttagtcactaaacacaagctaacatactctaccgtaaaatacaacggtatgtgataggtgggtcgcatatttgtgcgattgtcattagtagaccc

SEQ ID NO: 17120 - DNA, 332 bp, Zea mays
  unsure (1)..(332): unsure at all n locations
  Clone ID: MRT4577_115609C.1
ccctcgaggctggccgggattctatccatccacaccgtgactcaatcgagaggtcgaacctacaatatctcataaatagtggatgcggcatctccttcccaattctcgatatctccttctcctccgcggcacattctatccatcccactccccaacatttaccccttccctccatcagatcaccaatcactaccaccataaccaccacccctcacccaaaatgaccgaccaaaaaaccgaccccctctaccaacgcgaaggccacctccacacccacacctcaaccctcacctccatcacgcccctcacctccctcccccccaccctncacc

SEQ ID NO: 17121 - DNA, 712 bp, Zea mays
  Clone ID: MRT4577_115610C.1
cggccgggatccgtcttgccacctcgccctccgccctcgactcttgtctcctcgcctgccgctggcgccgatctccatcctgctagcagaggtggcgccggcgtccttctgctcccgccgcattcgctcaccggtgagcatcctaatccatcccatccggcctcggcctcgaatttcgtctcctcgcccgccgcttgcgccgatccccatcctgcgagcagaggtggcgcccggcgtcctcctccttccaccgcatcgtcgctcgccgaataagataatacataaagaatggccgcgcacaacacatctatgacatgtgagggtgactatgagactgaacagaaaaagcaagccgctgcagatgtccttttccactattcacagtttattatggtttgcattggtgagggtgttcgcccaactgatctgaggttgcatcttatgaaggaagtttcaggaatggccacttctctaacgaaagagccacagcaagcagctgcctctccggattctagcgaaccatcttcttcagggacaacgaaatgagacacgaatgagatcttctaagcttcttcaagaagtatgataggaaatattgcaaactattaggatcacagctttgtggtctgagaactggtttctggtgcagtgataggaaagattgatgatgatatacttgggttggtgaaggctccttatgagcacttgattt

SEQ ID NO: 17122 - DNA, 359 bp, Zea mays
  Clone ID: MRT4577_115611C.1
tcggaccaaccggcgttatgttgaaacgagggaagggaggttcggctgggaacaaggtgcggatggtactgggtctaccgggggcgggcaccgtgaactgggcggacaacaccggcgcgaagaaccttttcataattttcgtcaagggaattaaggggcgccttaaacgccttccgtgtcgcctgtgtgggggacatggggatgggcaccgtcaagaagggaaagcccgacctcaagaagaaagtgatgcctgccgtgattgtgcgccagagcaagccgtggcgtttcaagggccgtgtgtacatgtactcttaaaataatgcgtggagtgattgtgaattccaagggtgagatgaaag

SEQ ID NO: 17123 - DNA, 308 bp, Zea mays
  Clone ID: MRT4577_115612C.1
ctcgaggtctgaacaatgttctatcgtctgaatggatgcctttccacttcgatggcctgtttaagactttggaccataccagagaggatggaaccgtgtataagcttccgaacccaccacgattccaattgtttactgctgtcacaccttctccttctgacactggtttcacactcttctctacatctacctttgttctgaagcatctaccagcctcccttcctctagagaccttgaagaaccttacgtggtctgttagaactacttcatttgagtcgacaaaattggacggcctgcctctaatagtt

SEQ ID NO: 17124 - DNA, 270 bp, Zea mays
  Clone ID: MRT4577_115613C.1
cctttcgggtccgtttccattctaagcctgaacgaccagctcctgcacaccaacatcatcgacatgcagctcacgcacatgccctgcaacttccccagcctgaccatcacctttctcttccagcacagctccaaccccatgtacctgctcgtgctcatttaacacaacaacaacgactgctacctggtccacgcctacatcatgcataacaactccctccactgcgaacccattcacgagtcctggggctccatctgaaggatctacccc

SEQ ID NO: 17125 - DNA, 250 bp, Zea mays
  Clone ID: MRT4577_115614C.1
gggggggttgatccttgaaagcaatacttatagtggtaccacctttctgaaacatagtagcgccaggactaaatttatgattcgtcaaaaacatacttttaacaagagtttaatttaataaaaccttggtgccagaacctattagattgtacaaaagagtcgacttagaacaccctgaatggtttcctcaaggtgctattgacgtacaggcattttatattatgccagttcttttttaaaagaggaaaca

SEQ ID NO: 17126 - DNA, 743 bp, Zea mays
  unsure (1)..(743): unsure at all n locations
  Clone ID: MRT4577_115615C.1
aattcggcacgagggaaatggacagtacagcactaaatcggcctacagggcacaatttctagtcatctacagccggtttagaacggacatcatttggtgggttcactgttcacacatagaacaaatgcaaaatattcacctagatcctcatccaaaacaaaatcctccatgattggccacatcaggacacctctgcgcctcgtaactgcccagtagaaaacagttaccaccttgcctatctctttgcgcaagaggtccggtgtcacatcacttccggacacttcacaaatgttaatgggactcaacagccaaacttcacagcccttggagaatgatgggagcacaccctgagttcaatcccaaaagagcgcagcaaacgttcaatggcctagctatctaaaccatgtgaaacctctggaaagagctgaacggatcaaagagaacctagtcttgtataaagggataacataccacaatctccttagtagttcgatgctgcgcttttggcccttgaaatttagtttactcgggtttgtgtgtgcctttagtgcctggatttgcctcccctcgaagttattgcatataaaactctntccccctatatgaaaaacaactactgccatctaccatanaaaacanggggtatcataaaaaaactaaaaagtcaactcgagcgattcaggtatagtgcaaatgtggtgacatttagacatcttactttccataaaaagtacatgcccaaa

SEQ ID NO: 17127 - DNA, 2156 bp, Zea mays
  Clone ID: MRT4577_115616C.1
cccccgggttcgggtctcgatggtctcgtactcttgtcacgttccttcctgactgcccccacttctcctccggcggcgcggcggcgggttacctcccaacagcccgaccatggaagccgacatcgctttcaggtatgagatcccccggaccgcccagttcctccgcgacggcgcctacaccagggtcgcgctccagttccccgacgagatgctgaaggatgctgctgcggtggcgagggcgttgcggcgggagcttgcctccggcggcgccgacagtggggttagggtgttcgtgatggccgacacggcgtacaactcctgctgcgtggacgaggtgggcgcgtcccacatcgatgcgcagtgcgtcgtccactacggccacgcctgcatgagcccaacatcaaatttgccagctttctttgtatttgggaaggcaccgttggatgtccacgcatgtgccggcacattgctggagtgctcaagaaaaagcaataagcgcattctggttttatatggactagagtacgcatatgcattggatgaccttagacagactttcatggagtcatgtaaatcaaattctggcaatcatgaagtccagtatgcagaagttctatgttcagttatgagtccatcatcaagtactacagaagaaaacaaaattcctcagtcgagtggcccctcttgtaatggggatatctccagaaacagcgagtcggcaacattcctgaataatcgtaatggcatggaatgttccagttccacacaaaagtacagccttgctggcatgacatggaatatttcagttgaggagaaaatggaggactatttcatattttggattggacaagatagctcagcatttgccaacatagtgcttaccttcaataaatgtgaaatagttagatatgatgcaatagaaaatcaactcacagcggacgtctctcatctgatgaaaattcttaggcgaagatattacctcgtggagaaggcgaaggatgcaaatattattggcattttggtgggaactctgggtgtagctggttatcttcatataatcgaacaaatgaaagatctgatcaaggccgctggaaagaaatcctatacattggtcatgggtaggcctaattctgccaagcttgcgaattttccagagtgcgaagtttttatttatgtttcttgtgcccaaactgctctgctggatagcaaggattttttagctccagttattacaccttttgaagctgtactagcttttggcaggggaagagagtggaccggagagtatcttttggatttcaaggatttgatcacttcagagaaacaagaagctgcgagcacaacaggagaagcacgcttttcttttatcaaaggtgtctatgtggaagataattgccctcaagaaaatgaggaacaatcggaaacgtcgctcgctctggctgaggtaactgaaaaggcactgagcatccaaaaccagcacaacgacgctgtcctttaccaaggaagagcaatgtcctcaatcgactacctcaaggcacgttcctaccgtggtctaactggagaatacgaaggcccagttcctgattcagtcttggtaggcagaatgggcagggcagctggttacagtgacgagaaaactgagagcgcacagtgaaggtagcattatgcgagttgatcagttgctacaggctccccttttttggcggtgaaaaaccaggagggtgcacaatgattcaatcatgcagcctggatggtttaccaacctgtgtacttttgtttaggtgggctaacaggtttatagacaattgtcaacatttttttattgttgagaatacctgtttctagtcccagggaacaatactttggatgctgttcaatcaggtggcttttttgctattaggaactactagtgtgtgcctaatcagtttgtatgcaatagtgagagctatctcactgatgtggggaagcctttttttttctttctaacaactgtggcatgtgttcagaagatgagatgtacactattcacaacatgcactgtactcatccattatgtttgtacaagacaccaaatttactctgcacattcttatttattggtaccggtagtagttccgcctaagcacgcgtgcgcgcgcagtcatagctcttgcata

SEQ ID NO: 17128 - DNA, 119 bp, Zea mays
  Clone ID: MRT4577_115617C.1
tctataacgggcgcgctgctcctctagctggatattttttcttggggttcggtcactagaccagagaagaggattcgtatacgcccgtccgcccgaccattaagctatgtcgatgccgg

SEQ ID NO: 17129 - DNA, 220 bp, Zea mays
  Clone ID: MRT4577_115618C.1
cgtcgccgcgtatctcccttcagcttctctcccgtatctccctgccaacggcggcggcaacgcgagggtaagatggcggcggcggtgtctcgcgacgacgagctggtgatcaagtcaccaaacgacaagcggtcttatcgcctcctccgccttggcaacagcctccgtgccctaccttgtcacgaccctgagatctacgccgacggttacccacctcaga

SEQ ID NO: 17130 - DNA, 647 bp, Zea mays
  unsure (1)..(647): unsure at all n locations
  Clone ID: MRT4577_115619C.1
ggccgggacgctagtaagataggactagcaacatacatagtgaagtgcagtagtggcctctttgcaccaatgaaagacaagataaatggacctacttgcaactactagctctataaaaaaaaagtaagaagccccgacgatcatctccagactgcgcacatcaatacctctatgcagggtacagccgcgagcatggaatacccatgtatacaattgtacggggtacaaaagtccattacagcaaccatcctacagcacgttagaattgacagacaaacaaccatatgccctattgcaacaaccagccttagagcatatatatatccaaagaatctcagtagaccaactaccacaggagaagcctgccaacaataaatgaattaaagtaaagcgcaacctttgctgctgtacatccagcaacaacaattgcttccattcaattaaataggtggnttgaaccttgctgcttacttggcaggcacaaacagatactaccattcaaccaaataggnaggagccctgctgcccttcttacgggagaaacagctgctgacatgcaatctacaaggaaaggggcaaacataggctgcttccttgcaacaacaacaattggctgccttttacccaaaggttggggggaatattaa

SEQ ID NO: 17131 - DNA, 265 bp, Zea mays
  Clone ID: MRT4577_11561C.1
catgcgctcgcggtgacggcgaacagcagaacggctgccactctcccctccaacctagagcgctagagcactggacttcggcactcccgaatcctcgaagaagagagagagggccttggcgttgttccaggaggaggccctcggtgccaggaaaagcccggacccggaagctcagatgaccagcccatcttctgtactgagcccaccgccgtcgttgaaacggagaacgattcgggactacttcgctgccagtaccgtgtcttga

SEQ ID NO: 17132 - DNA, 666 bp, Zea mays
  Clone ID: MRT4577_115620C.1
ccggccgggaatccacctgacacgggctacacctaaacactagagaggcgagtctaccttcgatgtgtacaacactccatactcgttcgttcattctgtgtgttgctttccgttgcaggtagttggcaaccgaaactgcgtcggcaaagagtacatatctacttcaccatgaccaacctcggtttagctgtgatcataactagatggcattgacatcctcctgcacatgacatgccacagcagatggagccaagagacacgacaatgcaaaatgtagcgcgagcggctgcatgcctcggacatgcacgcggcggcagaggttgctgatgcgccactgatccagcacccggtcacgaatggctcggcgatccccccttacgctattgatgccatccacccaactgcatgatgctgagtcgccgaacactgctatcctggacaacatactgcaggagaatcccctcgcagcatgcacgcacagagaacctccaccacgttcaccctgaactacgcggaacgcgtcatggacccacatattcggaatggcgcaccgcaatagctaatcccgaatggcgagaatgtgtgcgcctagatcctccacagcatcgctgacctacgcgactatgagcagaacgtggcacacgtgtgcaccgtaatgcgcaccta

SEQ ID NO: 17133 - DNA, 418 bp, Zea mays
  Clone ID: MRT4577_115621C.1
atattttttttttttttttttttttttttttgggttttttttttttttttggggaacaagccaccacaatacaggggttttttcagattacatggcaatcacaaacataagatgcaggacaattcaagtgtgatcgacttaaccggggaaaaatatagttggaaaaggccaaaggaaacaaggcaccattaccaggccaagcttttgaaaaaagggtagatggggcccatcacactgaaagggtttgggcagatcagatgaaaagtttttcaatggagcccttgagaccctgtatttgaagtttcaggtgggtaccctcattacctggaattgggcaagcaataaccggtcttggaacaccccaagcccggacaaaagtttgttttggtggaacaaacccatttggggcggttttatc

SEQ ID NO: 17134 - DNA, 352 bp, Zea mays
  Clone ID: MRT4577_115622C.1
cccacgcgtccgcccacgcgtccgcccacgcgtccgcccacgcgtccgcggacgcgtgggatccaagagagaatgccgcagcacatctcaacagtcgccgcacgcgccgtccccgccgatctcgcgcaacagccgccgcacatgccaccccgccctcgcacccacggcatccgcgcccagatgttgcgggcggcgccgtccccgccgatcccgcgcaacagccgccgcacatgccagcctcggcctcgcgcccacgacatccgcgcccggctgttgcggccggcgccgtcctcgccgacccctcagatataaagtcactctggtgttcttcaagactacccgaagcgattca

SEQ ID NO: 17135 - DNA, 768 bp, Zea mays
  Clone ID: MRT4577_115623C.1
ggaggaattgtcgaactggaaagggctctctcgctgcaggagggggacgaataggatggccggaggcgtcatagttccgagcgatggtcctgccgccgaccacggcgggagcctgacgctgtcggtgttcatgacctgccttgtggctgcctcgggcggcctcatcttcggctacgacatcggcatctcaggcggcgtctccgagatggagccgttcctgcggcgcttcttcccgcgcgtcctggagcggatggcgtcggccagggggaacgagtactgcctctacgacagccagacgctgacggccttcacgtcgtcgctgtacgtggccgggctgctggcgtcgctcgtggccagccgcgtgaccagggccatgggccggcaggccgtcatgctcatgggcggcgccctgttcttcgccgggggagccgtgaccggcgccgccgtcaacatcgccatgctcgtcgtcggccgcatgctgctcggcttcggcgtcgggttcaccaaccaagtcagtctcagtccgctgtcccgcaccatccggagctcggcgccagccgccagctgtgcgttcttcttcttcttctctgcgacgcgtcacgcgcatggcatgtgttcactggagtcattggaccttgcggtagacatcttcccttacagcgagtccacgatagagtgccgccactagtacagagaagttctatagtggcggttgtaaacctatttatagtggcgtttttcgtaaccgccagtgctaggggccagtag

SEQ ID NO: 17136 - DNA, 383 bp, Zea mays
  Clone ID: MRT4577_115624C.1
tttgaggtaccacataaaaatcttaattttcagaggaagcctaagtttccaaaggtccttattatgcacccccaacccattgttaagagatgccagatacagagacttaaccgtaaacatattctcatcgggcggccgggcgctacagccatgccatctaggtagccttgtagctgcgcgcctctaaggatgggtttgcactttccttgccctaggagagacgtcggtactgtggaattggatgtcgtcgtgggatcttattgctggtgaggtttatgtcatcttcctcttgatcaggacatcaactaatagatgtaggaggtggatctgattgtcatataagaaacacgacactgagatattatattgcttgccttgacctc

SEQ ID NO: 17137 - DNA, 498 bp, Zea mays
  Clone ID: MRT4577_115625C.1
ataaaaaaaaaaaaaaaaaaaaaaaaaaaaaaaaaaaaaaaaaaaaaaaaaaaaaaaaaaaaaaaaaaaaaaaaattgttctttacctcgctaccgtccttagtggtgggtttttctttttttctcttccctcctgcttgcccgttcggtgctttctttgtccatggccccccttttttcctttcgttttgttggtttactttccgttggttttcagttttcctacctggggactgcgtggactttgccgtttctttccttttttggtttgctgccctttccccttttttcaccttgcttaataggcaaaaggccttcccctttcgccctttcttcctttcttaatgctgattggctgggggctgtaccctccctttgagcgttaatcttgggggggttgggggttacgtgcccggtaacttttccatttgcttaccccctacctcccccccctttcgttttttttttttccttccttgcccggcggcccgttttccc

SEQ ID NO: 17138 - DNA, 474 bp, Zea mays
  unsure (1)..(474): unsure at all n locations
  Clone ID: MRT4577_115626C.1
caaattacaccaatacctgaacacggggaaggtagatgacaatanaataacaataaccgggacgccgttaagtgtcttggtaaattggaaatgaagtacaatactaaataccctgtaacgaggtattccattggtagggcaatgtctggtcgccatgcagccgcacggcaggactgcctgggctacnggcgtcgtacaccaacatcactcaacggcnggccttccaatgcggccatggtcgctaacacgccgcgtcgtcccacacggatacggcttctacaaacgatactgtgtacttgcttggtggtcagactacggaagacaaccttggactgcgnccaacctagacaccacttcaacggcttaattaatgaagcatagcttacctcaccattgcatgcatgcattattatctagagaacacaataaagaccctgatcgatatgatgatggagtatgctattacctttacta

SEQ ID NO: 17139 - DNA, 924 bp, Zea mays
  Clone ID: MRT4577_115627C.1
atggtgaccactagctcgatggtggggagaagcaagtcgggctgcggcctctgccccgccctcagcttcaaggatcttcatcatctttgctggggcggggggcgagctaagccggagctctacttctcgtatgggccggcgggccacctcttccttcagcattcaggggagagggcgctcaccggcctagcggagggggcggacttcgacaacgcggggccgatcggcctcaagcgtcgtcagctccagcatgcctggctcgttggctcagctggccctggcgtagcttctggtgccacctcccaacgctggggcggagtgtggttgtctgcccgccgtacgggcgactgttgcgccgtgcgcaccgggggaccgcccaagacgtcgcacgccgctagggcggcattcgtgttcttgggttgccctgccctcgctccggcacgatgcctccacgcggaggtggttgccgtcgtcggtgctgaggtggtggcagccgaagaaggtttctccgccgacgagaccgtcggtgccacccgcggacagacctccggctctttggctttgatagcttgtcctcgcccctcgagtgggtacatgggcgagggccttgtcacagcagcgtctgccctgaggtcatcgctgctgctgtttagccacccggagtggaggtcgttgtcgctgctgatggagcggtcaccgctgaaccgcttaccatgtgtgagttgccctatgcggaaggtgacgagtgaggtatccgtatcccggaggcgtatgagtccctcggctcggtcggccttgccacccaaggcttctcttgctcggttaaagaaccctcggctgctctgcgatgagccagagccggaggcagcggtgtcagcgtggacagaggcggagtcggctcgagaagaagcttcgtcggcctag

SEQ ID NO: 17140 - DNA, 531 bp, Zea mays
  Clone ID: MRT4577_115628C.1
aaacaacccagggaggcatggaaaaaggaccaaaaccccaaaaacgggttcaaaacaaaaccccgggaggcatgggaaggaccaaaaccccaggagcgggttcaaaacaaaaaacttggacaggtcaataaggtccaacagggaggaaaaatcaaacccggaaacaaaatcttgggcaggccccaaaaactgaaaaggccctttattttttctgggaagggggcgaaccacccgacctaattttccggaggacccccgccatccccttttttttttttttggccctctggggagtcccaagctttttttaaaaaagcttaagggcacgcttgcccttgccaaccttaaaaagctaagggaaccccttttaaaagggagcaaacccagaaacctttttgataaggccccggacaaaaaacacccttttggtggattcccccttgggggggcacggccgggaaggcacctcgccctgggggacaacaaaacccttgtggatgccaacaaaaaggcccaactttggttgggggg

SEQ ID NO: 17141 - DNA, 115 bp, Zea mays
  Clone ID: MRT4577_115629C.1
ttcatctcaatccatgtggatcagaggggtttgagtagctttaaatctacaatagggcaaaagctctactaaaatttttcaatctcatcaaatccatatgtcatatgaccgaaca

SEQ ID NO: 17142 - DNA, 307 bp, Zea mays
  Clone ID: MRT4577_11562C.1
ggtcgtccttttttttttttttttttttttttgtacggagttatggtttatttgtggttgttttttttctttacatgatgcatagtttattcaaattgtgatgttttacaggggggaggcaactttgggccgggagggccatacataccccaccccccgacggggaatggccccaccgctaaccacgggggtgttacccggccggggggaccgggcccccccacattatagacctgcccccccccttgggatatgcctgcccaacgacactgcacgggaaccttttataatgggccgcccccccccc

SEQ ID NO: 17143 - DNA, 1479 bp, Zea mays
  unsure (1)..(1479): unsure at all n locations
  Clone ID: MRT4577_115630C.1
ccgggggcccagcgccgaccaaacagggtcctcgtcacagaacacgcgccccacccgtctcgtcgcgccgatccagcccggcgctcggccccgcggcgtgtgcaatggccctcgacaccgccgacgccgacgcgccgcgcttgcgcctcgatgccagcgccgccgtgcacccgctcctctccgacgacggctccacggccgcgggggagacagcggagcagctggacgccaggtacgccccctacgcgcgccgggacgcgtacgggaccatgggccgcggcccgctgcccgcggcgcaggcggtgcggctggcgctggccgccgccgtgctcctcccgctccgcttcgtcgcggggatgctcgtgctcctgctctactacttggtgtgccgcgcgtgcacgctgttcgtggatgcagatggggggcggccgaggttggcggggtggaggaggaaggccgtgctgcgatcggggtgcgcgctctcacgggcgatgctcttcgtcttcgggttctactggatccgcgagacccgcaggaggtccactaatgctaagggtttaaatcaggaccaatttgaagaatcccaaaggccaggggcaattgtatctaatcatgtctcttatgtggatattctttatcacatgtcagcatcctttccaagttttgttgctaaggagtcagtgtccaggttgccacttattggtctcataagcaattgtcttggatgcatttttgttcaacgagaatcaaagtcttcagaagctaaaggtgtctcaggcgctgtagctgaaaggatccaagaggtttgtcaagataagaataccccaatgatgttgttgtttcccgagggaactactacaaatggggattaccttcttccatttaagactggagcctttcttgcaggtgcaccagtgcagccagtcattttgaaatacccttacaggagatttagtccagcatgggattcaatggatggagcacgtcatgtgttattgctgctctgtcaatttataaatcacatcgaggtggtccggttgcctgtatactatccttctcaactagaaaaggaagatccgaagctctacgcaaataatgtcagaaaactaatagcaatggagggcaatttagttctttctaatattgggctggcagagaagcgcgtgtaccatgcagcactgactggaagtagtctacctggcgctagacatgagaaagatgattgaaagacgttgcgtcgctttttctgtaacagacagacgaggagcacttaaaaatgtaactgtgtgcgtgtttttttatatctgtaatgtggcactttctttgtttgaggaggttgttgagtacccttctcatactacattgtacaaaaacaatgtccattatagtttgatgaggttcgtgctctcgtaaaaaaaacaaaacgcggtctttcnaaaaaaaaaaaaacaaaccacatttttttttttccccccccct

SEQ ID NO: 17144 - DNA, 234 bp, Zea mays
  Clone ID: MRT4577_115631C.1
gaataagtcgaagaaagacggaagacagctacagctgatgaatggcaagaaatgttactactagatataaataaggttagccccgggggctagtcaagtgagtaacgacggtagtaatatcgtataactcatacgctacctgcacgatatatagccgccaacgagcagcgacgggatgatgacgggataatgttgaactgtcttaaagtgcacggaaattgggcttcctaatgg

SEQ ID NO: 17145 - DNA, 710 bp, Zea mays
  Clone ID: MRT4577_115632C.1
gtcgactcagcgtccggaagatcctaagctctacgcaaataatgtcagaaaactaatagcaatggaggtaggctaaacccaaaactgagcttgtctaaaacaaccatgcaaaggtcaaacaacttcttcgtaatatatgtatccaccgagggctgggtaacaaaaaggcaaagggcaaaacagttctttttttcaaaaaataaaaatcataaaaaaggttcttagggcctttacttagtgtttttcttcttggacttcgttcaagcttggggtctttcctccaataataagctctacaatcaccgatcaccttttttaaaatataaattaatatggtcttaatcccaccatataaataacgttctctttctgcagggcaatttagttctttctaatattgggctggcagagaagcgcgtgtaccatgcagcactgactggtagtagtctacctggcgctagacatgagaaagatgattgaaagacgttgcgtcgctttttctgtaacagacagccgaggaacacttaaaaatgtaactgtgtgcgtgtttttatacctgtaatgtggcagtttatttgtttgaggaggctgttgagtacccttctcatactacattgtacaaaaacaatgtccaatgtccattatagtttgatgaggttcgtgctcccgtacgaggtctttcagatttcgagtgctactgttttttcacc

SEQ ID NO: 17146 - DNA, 767 bp, Zea mays
  Clone ID: MRT4577_115633C.1
ctacaaatggggattaccttcttccatttaagactggagcctttcttgcaggtgcaccagtgcagccagtcattttgaaatacccttacaggagatttagtccagcatgggattcaatggatggagcacgtcatgtgttattgctgctctgtcaatttataaatcacatggaggtggtccggttgcctgtatactatccttctcaactagaaaaggaagatccgaagctctacgcaaataatgtcagaaaactaatagcaatggaggtaggctaaacccaaaactgagtcaaacaaccatgcaaagatcaaacaacctcttcgtaatatatgtatccaccgagggttggagagtatgattggcctcccacctgtaaaggccccaagagctcgagaaggctcgattctaatccctatggatggctctgctgtcggaaaaaatattgccaagtatggggacgaaggggcaatttagttctttctaatattgggctggcagagaagcgcgtgtaccatgcagcactgactggaagtagtctacctggcgctagacatgagaaagatgattgaaagacgttgcgtcgctttttctgtaacagacagacgaggagcacttaaaaatgtaactgtgtgcgtgtttttttaatatctgtaatgtggcactttctttgtttgaggaggttgttgagtacccttctcatactacattgtacaaaaacaatgtccattatagtttgatgaggttcgtgctctcgtacgcggtctttc

SEQ ID NO: 17147 - DNA, 731 bp, Zea mays
  Clone ID: MRT4577_115634C.1
acttgagcaccttccttctcccgttctccctctcctggtaaattgagtaggtggctgccgcatattggcatgggactctcaagtgctgtggcatggtgggaggagtggcagctgcgcatcctcgtcctcatcagcctcttcatccagtacatcctcttcttttccgactatgttcgtagggttcctgtcctacgcaggttgagagtgctggtgtggatcgcatatgtaagcagcgatgccgtggcgatctttgcccttgccaccctcttcaaccgccacaggcacacttgtgatgaggagggcagcaacctggaggtcctttgggtgcctgtcctcctaatccaccttggtggccaatcaatgatatctgcctacagcctcgaagacaacgagctatggaaacgacatatagtaacccttgtgtctcaggtcacggtcgcgttgtacgtcttctgcagatggtggtccggcgagaaaacgcagctggcggcaggggtcgtgctctttatttttggcgtcctcagattcgctcagaagccatgggcccttaggatcgccagcttcaacagcctccagtccagcacggtggcccctgagaagggggcaaagagaatatacgcctacggaatatgtagaagcagcaaagaggtgcgtactggacacgaaggtaaatattgaatataaatacaatatggattgcatgttcgttgatcagtctgctccatactctg

SEQ ID NO: 17148 - DNA, 219 bp, Zea mays
  Clone ID: MRT4577_115635C.1
tcggcgccgaccaaacagggtcctcgtcacagaacacgcgccccacccgtctcgtcgcgccgatccagcccggcgctcggccccgcggcgtgtgcaatggcccttgacaccgccgacgccgacgcgccgcgcttgcgccttgatgccagcgccgccgtgcacccgttcctttccgacgacggttccacggccgtgggggagactgtggatcagttggtc

SEQ ID NO: 17149 - DNA, 132 bp, Zea mays
  unsure (1)..(132): unsure at all n locations
  Clone ID: MRT4577_115636C.1
ttccgtctctctcatctccggggtgacntctatctcacccctgcctctagagagccgcaggaaacaagtagcgccggtacggtttgttcaggattcgaaccccaccttttgaattgctccgaatccgaggcg

SEQ ID NO: 17150 - DNA, 321 bp, Zea mays
  Clone ID: MRT4577_115637C.1
cgcatttgccaagccggagcactccatgtctgggaagcaactggtgtctaaggttaggagcaggagcagaagaatcacaggatctgacatgcaattgcttgttcatcctctggatattgagaaactagagagggcatccagaccttcaagtgctccacatcagtctgtggatgcatttgatacggactcaaaaatgactgattcagacacatttcacagagatgtcaccctcgatggtttatctgacaagtgtcccgaatggatccaggacgttttgaatgtaatcatacacaagcatcaaagcagtaagataagcattgc

SEQ ID NO: 17151 - DNA, 1715 bp, Zea mays
  Clone ID: MRT4577_115638C.1
ccggccggggagaaaccctcctcctcccccgatttcctacttcttccagactaaaaccccaggcctcgcgagtcgccgccgaccgccgcaaccacgcgctacgcccccgatggctcacctccagctcctcttctcatactcgcggcggaacccgcagcgccaccgcctgctctcactcttccacttctcctccgacgccaagtccagctccgcctcgccgccgcctcctcccatcaagcccgtctcctacgctccgaagccgcagcagcaggccccgcccgaggagtctgccgccccgacaaccccggacgttgcccctagggaccaatccccactgccacgacggcctcagcagccgatgccgccgcgggagtggacgcggcaggatatgcggtacgtgaaggacgcggcgcccgcgatctcgcccgtctcgtacccgtccagggtcgcgccgctgccggaggaccgtccggtcggcggcgaggtggaggaggtgcaggacggggggctgcagggggagtcggagcggatccagatgaacgcggtgcgtcccaccaggagcgtctttgggatgcacgaggaggataggctgccgtacccgacggtcatacccgtcgtcaagcggccgcagaaggtcgccattgatttaatcgacgccatccgcctagttaagactagtgcaaacgagaagaagcggaattttgttgaaactgttgaagctcatgtgatattaggtgttgatcctcgtcgtggtgaccagatggttcgtggcgccttaacattgcctcatggcactggcaagactgttagggtagcagtatttgctgaaggtcctggagcagacgaagctagagctgccggagcagatgttgttggtggtgatgagttgattgaggagatccgcacaggaggaggcaaactaagctttgacaagtgcatagcaaccccaatgttcatgccccgattgtcaaaggttgctaggatattgggtccacgtggtttgatgcctaatcctaagctaggatctgtgacgaatgatgtttctggtgcggtcaaagcggcaaaatcaggacgtgttgatttcaaaatagataaaactgctatagtgcatgttggccttgggaaggtaaactttactgaggagagtttacgtgaaaatattggtgcttttgtgcatgcacttttacttgctaagccagtgggcttaaagaaaacttcaaaatatgtcggatatgtgaagaagttcacactgagtagcacaatgggacccggacttcctgttaccataccatcactatctgtggccgccgatcactataacaaggttcaagtcagctaagtcaatacagtagaacatcgaatgtagctttctttctccaatagccgcggcctgcagatggcggcttgtttggcagtggagcttaaccattcagcaaggttgagatttgggtggcttgctgttttgttattggggataataccttttgtggacaaggatcattcaacaaacatcataacctataactttattttatccttgtcactgcaattttgagattgcgttgctggtctacctatgttatccagagtcttgtcatttgttgcacgaaatgtaatattgaaatacggtagttttagggcattacttatgataataagaaatgaagtattgaaccatgattcgattcagaaaaaaaaaaaaaaaaaaagcggcc

SEQ ID NO: 17152 - DNA, 212 bp, Zea mays
  Clone ID: MRT4577_115639C.1
atcatattttttttacgattataatttttttagagctaattcccacaaccacgcaggaggagagagattaccgcagcaagagagacccaaccaaaaacgcctatggataatcacatgctccggtctcactattatgattggaatgaagatgcgcaccgcgccccctccagagacgccgggggggcagcccatgccagggcatgttttcactt

SEQ ID NO: 17153 - DNA, 510 bp, Zea mays
  unsure (1)..(510): unsure at all n locations
  Clone ID: MRT4577_11563C.1
gggggcaaaaaaaaacccatgggtttttgggggaggggaaacaacaaaacaaccatggggggtaaagagtttaaaagaaaaggccccccctggggatatcagttttaagcgggaaaaaagcaaaaacccaggggggggccatcagggataggaggggcaacaaaaccaggggaaccaaaaagggggtttaaaacttccccaggattggaaagggatttggatttaaaacttcccagcatttttaaaaaagggggggtggccaaaaaaaaccacccctatggggcccccctgggaaccggggtcttcttcttcttcttttttttcttccaacccttttggggaccggggccatttccaaatggagcacttttggggtctgaaaaaaaactgggttcctgggccttctttttcttctttttnttcacaccccccttttgggcacccggagaaacctcctccttgccctaaaagacctaaagggggtttgactcgccccgggatttttttttc

SEQ ID NO: 17154 - DNA, 390 bp, Zea mays
  unsure (1)..(390): unsure at all n locations
  Clone ID: MRT4577_115640C.1
cccacgcgaacgcgcaaaagcaccgaaagggggcagcacgggtgggcagcagcagcagcgccaccaccaccgacaaaagagaccaggggaggcgctcggggaatgaacggcaggagacaggagcagcaggcacggcaggaccatgagagcgccctcccaacaagaggggagcgcgggacacagagcgcctggagaggcaagagcgcacgagcaggcggaggcncgcgagccccgactatggccaccgacgcgaagtcagtagacgagaagctcgacaagaccacgcgccgaggacgcgcaagcccgaccagatcagcgagaacgagaagaccggaatcatcaacctggacgcacgctaccacagtgcagaagcggagcagagcgagggga

SEQ ID NO: 17155 - DNA, 665 bp, Zea mays
  Clone ID: MRT4577_115641C.1
gggtacctcgaggacggccgggaagctcggtgctctgcgttgcgctgtcacctctcccagagtcgacgagaaccagacaggactgatgatcgctaacgcttgcaactggacccccaccattacatgcgccgcgccttgaaacacatgtctgatgagctctggcagactgctccacactacgggtgccctacatagagctgagatgttctgagggttgctgcacagtcggacctagcccctgcacaaaccataggggcgacggtttgaatcatagagatgaacctgaacatgtcgctatgctacgagatgagatactccgttgatcgcatgaagcacgaggtcgccatgtatgtgttgagatgagacaaccaatctgatccgcaactgctgattctggaccccaaaaggtattgcatcagcccaaaacatgtacacgtgaatttatgacgaggcatgattctggcgctggatctggattgtcactttcacggacagtgaaacgtcgttacatcgctggatgatggataccgatgttattgcacacattgtgtcgtgtctggacctactactgccgaactcggacattcaggcacaagtgatgcaatgtcgttgatgctatatgctgtcatcttattcacctcagatgctgtacttcagactcaact

SEQ ID NO: 17156 - DNA, 618 bp, Zea mays
  Clone ID: MRT4577_115642C.1
ttgggtacctcgaggccggccgggggactgtacaaccacgatctagaatgggccggcatacgtgatccttcctttctgtcgtctgatcggttctgtcgtcggcactctgagctacctctggactgccacgggtctatacaatcgctcatgagaactcgaacaacaatgttgcgatagcccgcatgcctttgctcaagaaatgcgaccaccaatgtagacctctccatcctactgaagataggtattccactggcatccctgctcgtacctgtatgataattggaacttgaacaccggcattcccacatctgcaaccctcttacgaaatcactcaaagacaatccccctggatcactccatggatgtaccagaagctgtctaggcatggtgcccaatgaaagacaatatagtgaagcgtaccatcacctgcgtcaaggatattgaccaacactccgcaaatactatgcactctacaacagaacgggggaccttgccctcgcaacttttcctccaaatctacaacttccacttgctcttgatctcacgcacaaccaatgtctcgaggccatatgatatatattcatgtgcacataacctcactgctctatgacctatgac

SEQ ID NO: 17157 - DNA, 342 bp, Zea mays
  Clone ID: MRT4577_115643C.1
attatagtaaaggttactgttgtaaaacagtagtgactttggtccatatcttatttgccatttgtctttaaaacattttacattatttgcatcataaattgtaatttttatgactatacataattggtttttttcctgacccttggaatgttagtttcatgtaactttttaaaaaattaaaacattgcagactaaatgtactgataagtacatactgaacacatttaattaccacagtaattaaaaagtcctgatctttacttcttaagatgaaaattcattaacttgcaatctctgggatttctctattatccacaatgagagtatgaataatcccttctt

SEQ ID NO: 17158 - DNA, 464 bp, Zea mays
  unsure (1)..(464): unsure at all n locations
  Clone ID: MRT4577_115644C.1
gcgcctgcanataccgtttccttaattctctgggggagccacgcgtccgctggatataagtagatatggcgttaacattgtcttttacaatgcgctcttctatttcagggggggattgactggggaggattattggagcttcttgatgaagatagcttgggaaaagacacggctctttcttctcctgaatgggcatcggatgatatagcggttctagcataattccggggcaagcttagagatagacagatgatactttatgtttgggcagaatattactattactcattcaatactcccttccactttactttctgtcccccatgttaatgggctttgtagggggaagtattgccttctgatttttctttcccagaccccactcattgggagatgtaataacgggttgctcttatatatttaaggagcatgcttgattgtggaacccactgaatgcatgatct

SEQ ID NO: 17159 - DNA, 258 bp, Zea mays
  Clone ID: MRT4577_115645C.1
atgactcgacggggagctcgtgacggcgaacggacggggacggatgcagcggggcggcgtccatcgaggagcgggtcatgccgaggtgaagctcgcggcggcgccatggaccaggcgcaacaacagcacacaaccggatggacagggcaagacgtgaggcttaccagggcatcggcttgctgcactgctccagtgcgcggggtgctcaccgaggtccatgcgacgtgggaaggagacggtttggattttggaagatga

SEQ ID NO: 17160 - DNA, 370 bp, Zea mays
  Clone ID: MRT4577_115646C.1
ggggtgttttttttttttttttttttttttttttttttttttttttaactttattttttatttttttttttttacaattttttttttgtcccaccgtgcggaaaatgcaaacatgcgcccaaaactgaccttcacaccccgaacggggggggggggggggcccacaaacacaaaaatcggggggcagaaccaacggggggaaataaaatgaaagacacaacccggacgttgaaccacttcaacctcggaaaatcaagcagggcacataggttacaccactgcggaccgggacttttcactgctaggatttaagggggggcgggggtaccctgcccatgtttgaagcgcccaacgggccaggggatggggg

SEQ ID NO: 17161 - DNA, 133 bp, Zea mays
  unsure (1)..(133): unsure at all n locations
  Clone ID: MRT4577_115647C.1
aagaataaattattttatgtacctggccggtaccacctaaccnnancacagtcttgctgctaacagtcgacgttacctttgatcagctgccatttcgatcacctgccacagttttaatctatacatttacact

SEQ ID NO: 17162 - DNA, 348 bp, Zea mays
  unsure (1)..(348): unsure at all n locations
  Clone ID: MRT4577_115648C.1
gtgtggggttttttttttttttctcacaaatccancaacttgtctagttggctgttttatattattattaagagaaaactgcttagtaagcaaatgccatcgaaataatgaactgacgcaccctgtatttaaaatgacaaccacagaacaaaagatgatagagccattggaaaatgagttcacaatcaaaaaggtggcagacttgggggaaagcggactagcatccactgttttacacacgctgtgacatggttccatcccatctccacaatcaaccggatcttctaatcataaagcttgggctttggcccaaaaacatggcgaaccaaatcatttagaatctttaat

SEQ ID NO: 17163 - DNA, 1640 bp, Zea mays
  Clone ID: MRT4577_115649C.1
aaaaaaaaaaaaaaaaaaaaaaaaagattggcaacctcgaggccggccgggacgcggccccggccacctattcgccgggccgggatccgcccaccgagccaccggagcaccagccaccagtgcaccaccatcgcagggagttagggacacacaccggctgccgcggcccgccatgtctcactgctgcccctgcgcgagtgcctcctcctccaccgcgcccttcttcctcccttccatccccgactcctcttcctgcaggagcggcagcggtggcgccttcagcgctgctgttggtcggagcaagctgcggtgcggcggcgggccgaggcgcgggcaagcgacagtcgcggcaggcagcaaggacggcgggagcggcggcacggctggaggggagaagggagaagacgacgccccggcgttcaatccgttcgggttcgtgacggacaacccctccagccgcagcgccatccagctgcccgcggttcccgccgaggacggcaatgtcggccagatgctctacaggatcgaagacaagggcagggaatacggctcgtatgtcagagcaggagagtttcgatggttcgtcagggaaacagggtcacctgatgcacgacgtgggactattgtgttccttcacggagctcctactcagtcatttagttaccgggtggttatggctcagatggcagatgctggctaccactgctttgcacctgactggatcggatttgggttcagtgaaatgccacaacctggatatggattcgactttaaagaggacgaatttcacaaggcatttgatgatcttcttggtactctaaatatcaccgagcccttcttcttagttgtccagggctttcttgttggttcttatgggctgacgtgggcactcaataactcaagcaaagtccttaaattagcaatccttaacagtcctcttacagtttcttctccagtccctggattgtttcagcagctaaaatggccactctttggtgaatttacttgtcaaaatgctgttttggctgagcgtttcattgaagcaggtagcgcatatatgctgaaattggaaaaggctgatgtatacaggttaccgtatctatccagtggcgctcctggattcgctttgcttgaagctgccaggaagatcaatttccaagatgtactaagtagaatttccgccggattttcgtccaacggttgggaaaaaccaatactgcttgcatggggaatatctgacaagtacttaccgctctcgatagctgaggaattcaagcaagctaatcccggcgttgtaaaactagaggcgatagaaggagctggtcacatgccgcaagaggactggccggagaaggttgtgaaggcgctgacatccttcctgtaaacatgtgcaaagatcattatgtcatccgcacgggaactttcaaacatgcatgatgactgtcgtggcttcattacgtcctcctgtctaatttaattatgccttggattgcttagatttgtgactgtacaggtcaagatgtatattagcaaacgctttgcatttgtaaattgcgacgtggacgataatcaagcgacgtgttagctcacgtcagagaatggataacatgttgtagataatggaaaccaagttccgggat

SEQ ID NO: 17164 - DNA, 481 bp, Zea mays
  unsure (1)..(481): unsure at all n locations
  Clone ID: MRT4577_11564C.1
aaaaaattagggaacggttctgcaccctgatacccctccgcaattcccgcgatggctgttcaacttatccttctctccacagcaaacccgccatgctttaaagcatgagtgcttacgcacnaaaagcagacctttaccccaccacctcagcttcaacagcagcaggtgaaacaacccagccagcctccacctcatgaaccatttgttcccataaccaaggagccatgccacccaaaggttccacaacctggaaacacaaagattccagagccagattgcaccaaggtccctaagccaggctacaccaatgaccctgagccaggcagcaccaaggtccctgacaaaggctgcaccaaggtccctgagccaggtagcaccaaggtccctgacaaaggctgcaccaaggtccctgagccaagcagcaccaacgtccctgagccaagcagcaccaaggtccctgacaaaagctgcatcaactttt

SEQ ID NO: 17165 - DNA, 1390 bp, Zea mays
  Clone ID: MRT4577_115650C.1
gtctgttcttctcctctccctctcatcctggcgtttgtaccgagagtacgactgactgggtgaagggtggtgcctagctgatcgcctgatccatctcgtccgcccggggcccaagcagggttacaagagttactagggatcctctgatcgaaaggatggacactttctctcatgtcccccctggattccgtttccaccccaccgacgaggagctggtcgattactacctgaggaacaaggtggcgtccaacaagatcgaccttgacgtcataaaagacgtcgatctgtacaaaattgagccctgggatctccaagagaagtgcaagatcgggacggaggagcagaacgagtggtacttcttcagccacaaggacaagaagtacccgacgggcacccgcacaaaccgggcgaccaccgccggattctggaaggcgacgggtcgcgacaagcccatctacaccaagagctgcctcgtcggcatgaggaagacgctcgtcttctacaggggccgcgcgcccaacggccacaagtccgactggatcatgcacgagtaccgcctagagaccaccgagaacgtgaccgccgcccctgaggaaggatgggtggtctgcagggtgttcatcaagaagcgagtggaggccgtgcggcggatggccgacggcgcgccgccgtggttcgatggccacgtccccggcggcttcatggcgcccgcgggccttggctcgccgaggcagctgatgcatcaccacccaaacccggcagcagcagcgccactgctgtacagcggccagcagctctaccactgcaagcccgagctggagtaccatcaccttctgcagccgagccaagaggccctgttgcagcagctccctcagttggtggagagccccaagcctcctcctcccgccttcatcgaccaaggcagctgcagcctccagtcccccgacgaggcttctgggtacaacaccaccccgcagcaaccgccgcccatgacgacggaggccgcctacatggacgacgactcggtcaccgactggagagtgctcgacaagttcgtcgcgtctcagctcttcagccacggcgacggcatggcgaaagaggatggttaccccaacccggggcaggcattatttcaggctgagaacaagcagccggaagaagcactggactacgcctccacgtctgcgtctggtggcggcggcggcgaggcgaacatgtggaaatagcgtatgccgtatacaattcatctgcgagtttaccatatatatgcctcccaaacctgatttagtgtacaaatatatagcgtgcaatataatgcttgtcatgctgacacatgataatatacacatgcatgcatgataataaacacgtaaccgaagtggttattttt

SEQ ID NO: 17166 - DNA, 251 bp, Zea mays
  Clone ID: MRT4577_115651C.1
tgctatccctgtaatcaaggatgctctctcaacaaatctcggatcactattgtttgccacagcagaggctttttctgcctatattaacacacgcggcctccatggaggtacatacgcttccacaaattatcatatggtaccagagcctacctctatccactgcacagaataatcgccatgatgaacccgtcacgagcggtctcctgtcctcggcgctaggccatcctgtgacagagaaattaaccaagaca

SEQ ID NO: 17167 - DNA, 361 bp, Zea mays
  unsure (1)..(361): unsure at all n locations
  Clone ID: MRT4577_115652C.1
aattctgtcgaattcttcttttgttagttttccagctttttcggagggggcacaaccaaaaagaatcctgacttgcgttttaccattttcagtacatttaaaacgaccataggctcctaccttacatggccccacacagttttcttatacatatactacaaacaccgacccacacaacgtccagatcagaaacaccgaccatctacacaaccactcaatcatataggcacatatctgaacatatgctgtagctcgacaacaattacataacatcacatncaactccctggacaactgacgcccacactctagaatactaccatagctctgcaaatgtttcacagtgactggacccaccaac

SEQ ID NO: 17168 - DNA, 180 bp, Zea mays
  Clone ID: MRT4577_115653C.1
gtcccacttattccatgtacacatcctttcgccagcggattaatcacttcatctctgcagagctcacactttacgctatacctcacaaccttctatgacagctctggcttgttcaagatggaacactcacacagtgtacacatataagagtgaggaactgttgtactcagacacagtttt

SEQ ID NO: 17169 - DNA, 252 bp, Zea mays
  Clone ID: MRT4577_115654C.1
ttgaaagtagggaaaacgcattagtcacacactgctggatcaacggaggcacttgatgatgcaacaaaaatgaatcacacctggtttttcatcactggccaaacgtatctatgattcgctgattgaaacaaaccatggggtcagaacagccaattgaactaatgctacaaatgatcagtcaagtaactctggcaaacctttccccctactttgagcaacaacaatttgttgcatttaaccaactgggtttac

SEQ ID NO: 17170 - DNA, 129 bp, Zea mays
  Clone ID: MRT4577_115655C.1
ggcacctcaaacaacctctgataatttgggaataaggaacagaaggggaaacacaaatcagctgcccgccgaagccagtcatactaggacatctcaacaggcgtgtgttctacagcgagcgaaccgatt

SEQ ID NO: 17171 - DNA, 630 bp, Zea mays
  unsure (1)..(630): unsure at all n locations
  Clone ID: MRT4577_115656C.1
ctcctccatcaccaccaaantcaanaacagncagttcgcgaaaataatgaagagncgnagnatggnatcatcggncgngctcttggtgntagncctcgngntagtggnggncaccgccccacaggtagcggaggcaaagaagaagagagcggtggagagcggagaggcggtggaggtgaagaagatccaggacgacttctgctcgacgatgtgcgagggcaagaaggggacagacctggtcgtgtgcaaggagtcctgtgcgctctcccagcagtccaacctggtgttgtacggtaggatccagtgcaagggaaagtgcaccgagcagaagggcataacggagacggccatgaaaagtctgccaggaggagtgcgacaaggcgtaccgtggtgaaagcggccgaggtcaccaaggactgcaacgacacctgcgccaaggaaaataacccgtgccaaaaaaaaaactgcaaaaaaggacctgcacccctccctcccttactgaaaccccatcccaaatggaaacgaaccatgcaagcgtcttaagccgagtctattacgtacgtcctccacccgggctgggccacaaaatgaaaaatgaaaaaaaaaaaataaccatatactatggaaggg

SEQ ID NO: 17172 - DNA, 513 bp, Zea mays
  Clone ID: MRT4577_115657C.1
cacaccaagcaaagagtttattgaggggctaaactgcggggagtgtttgcagcggaaaagcaaaccctggtgtggccagggccagggtaaacaccctcctcctagcatttggggctcagggtaagcataaaaagctactcctaatctcccccaggaacccttttggggaacccctccctgcttccccctgaactccatggggggcagtattaagcggggtccttctttttgttcctggggccaaggatgggataatcccttgagattcactataaaaattaaaattcctttataaatcacaggggagggttgggaggggatcacctgggagcctggggccaccagtcacctaaagcctcgccttcctttacaatcctcccagttctgaccccaagtaaagagcagaggatgagagatcgcaggcccagagagggacagacagaaatgaggagatgggtcggggggtggaaaaaaggtgacacagagaggaggaacggttcagagggaaagagg

SEQ ID NO: 17173 - DNA, 238 bp, Zea mays
  unsure (1)..(238): unsure at all n locations
  Clone ID: MRT4577_115658C.1
tgggacagctgccttaataaagtcaagattttgcttcacaagatcgatggtgtgtaccagagcactgttaatgcggctgagggcaaggtgaccgtgtnntaccgctggcctatagtacaattgtccgtgtcaaggacttattgactattacttcacctcatccttgattgtgattcaaaatattactcaccttgactaattttatattgaaacaaacgtacgattagaaaagtatact

SEQ ID NO: 17174 - DNA, 544 bp, Zea mays
  Clone ID: MRT4577_115659C.1
tctcatttattcgatgattgattgcaaatattttctcctcggctgtagaatacgacgggtgatgactacaggatccacagcggcggtggcgcgggtgacgtccttgcgatagaatacacggatcctcttccgcgatccatgatggacaagactgatgtgatgggatgtgcgctgaacctcaacacgcacaggaagaacctcaggcggcttgtcgaactgtacatcaagaggcatctccgggaacgagggacaagaaaccctattgatgcatcatctcacgcgaagcgaatcgtcctgcaaaagatccggatcgatggcaatcagcctgaactctgctatgcatgatcgtgctcctggtctactggagcagaacgatatcaagattgcccattttgcgccgaacgaccgttggtcgcactacgtcgaggaaaaccatgatgtggtgatcgctgctctacatcgtgaggcacaggctctgcgacatatgcccggtgtgcctctccaaggtgtgaaagactcgctagtttcactggtacgcctcttc

SEQ ID NO: 17175 - DNA, 602 bp, Zea mays
  Clone ID: MRT4577_11565C.1
ccggccggttcctgccctgggctccatgagcagctggaaccccttgcagagctcctggatcaggccctccacgcccaacttcctcgccatcagtggcaggaagtcctgaaactgcatggaggagcccttgtcggagtccatgctggagttatcccgcgaagtcgcgatgaggatcgaagatctggcaaaatttatgtgtgcgtgggatcgtggtgggtcatgaaggaggctggtgtttatttatagggaaaacgaaggagatggtagcagcagggggaggaagttcttggaatcaggattcgggagcagtctccccatgcatgcccaacccaagtgcagggaattgaaggcatgctctcctgctcctgcctgtctcaagacatggtgggtgtttgctgcgtccggctgttcgtttctgcgaagtagcatagaggaggctggctggttgcttggacatgcctatctggcttcttccctttctttttgaccacataagaaaaatggatggataagggttgtgattggaaatgcttgcttgtatgtatgaacacaagcaggatcaaggtggagttggtaaaaaaaaaaaaaaaaaaggggcggcc

SEQ ID NO: 17176 - DNA, 583 bp, Zea mays
  Clone ID: MRT4577_115660C.1
ttgggttccgggccccccctcgaggcggccgctatttttttttttttttttttttataacataatggtcgtttttatttaatatagtacttctcatcagggggatgtttctcagttaatataaagttttttttcaaaacattaaatctcttttccatgtcaatgtctatagtttttttttaacattaaatttttttccgcatttcagtattagatacactgaatacatttttctaaatgttttttccctagagataaaagttttcctttttgcctgactctctgatatctaaatataatattaacttgggagacaacaaaacaaaaatctaatttaaaagactcctcaacgattcaggaggcagtgattataaccgaacagtggtgatttcctaagattctgggcaagaacttccttcttcctatttcacatgctttgagagaattctaagattatgaaatattacttatgtaaatttcagccatcttacttgtttgactacctaactagcaaattataggctgcatttttctgcgcattatttgttgtaaagaaaacatttttttttcaattataaatgtat

SEQ ID NO: 17177 - DNA, 1027 bp, Zea mays
  unsure (1)..(1027): unsure at all n locations
  Clone ID: MRT4577_115661C.1
ccggccgggatggacaagaaatcgagttgctaggaacctgcctgggatggactgtattctaatcttatcccttgatactaaatcttatctcatagtaagtgctagcatcatataaaaggcgagctggcacggggccggccgggaacctctctgtaagaatcaatacctaccccatggagaagctctcttctcgtcgctattcccggccggcgatgtccctgctgatcatcgtggccatcactatctcctgctccgtcgtccacagttcggaggctccagcccaagaagcagcagtacctcgtctggacggagaccatcagggccaagcgccgccgccaccggatgccggcaaacctcgacagccacagccgccgtgctgtcttcggcacggcgcttaacgtcctaaaatggacagggaggacggaggatacttaagatcaaccaggccgcgacgacaataagtttttaaattttattaggactagtttaggaaccctatttttttaatggatttttattttatcaaaaaaaattgggttcccaaactagttcttaacaatacaaacataagagaatccgtacaccattcgtgtcaaattataagtaatataggtcggggtgcataactgagataatttggttcatttatcatttgtggtcctacgagttcaaccgtgtgtttggtttttcaaggtaacaccactgccactcatatataatcgttgtagtgtcatatgttgttttaactataactagtcggttgcccgtgcgttgcgacggtttacaacaatactaacgtaaaaaaaacatcaaaaaaaattcaatataatgatgtgtaaagcgacggcacccaaacatacttgatactaaaaaaaaaaaaaaaaaaaaaaaaagtagacatatgctcaagatattaaaaaaaaaaaaaaaatttgaggccttatcttagtcaaagacccagaaagtatgagttgaaaatatagatagccaaatgggccgncgacacgccactagcactaacactatt

SEQ ID NO: 17178 - DNA, 371 bp, Zea mays
  Clone ID: MRT4577_115662C.1
gtcgaccaagcctctacagaaactcgtgttaaggtcgacgacaccaagatcaccgaggagacgaccaccactgtcaccaaggaagaggtcactctcgagcacgtcaccaaggagactgttgtcgtggaagagaccgaggagcacgatgaagccgtcaaggaggtcattgtcacggagaagaaggagaccggagtggttgctaagcccgccgtttccgagaagtcatcgtggttccgccgtgctctctctaccggtgctgcagccgtcgctggcgcaggtgccattgcagccggtgcagcctctggagctggccaggccgcctctggagctctcacccaggttgacggtgtctggaaacgcactgtccaggt

SEQ ID NO: 17179 - DNA, 537 bp, Zea mays
  Clone ID: MRT4577_115663C.1
ggggggggggtgccactcatacaggtgtggggggccttctgcaacacgcaatttgtgactctgtcttgcctgccgccgctggctactgtcgacctgctgaagctgtggtctacctgtctgtcaactgttgggtaccctgcctcgggtggggggggggcggtttctctttccgttgagaactccacctgcccgtgctactactacctgcgcttctggcccctgtgggagctgtccgtgtccgggtgttacgactcctcccagttgtgcatggagctgcgggaggccatcttaatactacccggactcctttcactcggtgatgggactggtacctcgtctgtgctactcagtgcgatggcttcatcattctacatgcccccggccatcttctagtccgtgccactcggacgccccctttcggctagctcgctacctagttccttcgtgtgctagtgactggtgccatgcggtctctgtgtagatcgtttgtggtcacattcaccgctttccctgcgcttgctctgattctttgctcct

SEQ ID NO: 17180 - DNA, 302 bp, Zea mays
  unsure (1)..(302): unsure at all n locations
  Clone ID: MRT4577_115664C.1
tatcactttagatcccttcactancatatgtctggctcaagcgccataggtgggttctcccatnccnancntctccaattcccaaacctccattgcctacttctcccttctcaggtccaaccagctccccttcctgttgttgtgtccaaccaatacccctccctccatcttcctctctgcagcaaccctaccattgttgttccccttcttccatagtaacctcaccccatccccaacatcttacattccntctccctcacgtccatctcctccatccccctgattccctcccatctctaacc

SEQ ID NO: 17181 - DNA, 457 bp, Zea mays
  unsure (1)..(457): unsure at all n locations
  Clone ID: MRT4577_115665C.1
gcgnggggagggagtttttgggcgctgggttggacgccggcctccgcgctggcggcttctcgtcgccgccgtctgccgncgngtttgcggcngttgtcgagcccaagaacgtccctgcggtctttcgcggcgtggttaatgtgtgggcggcctcctcccttttgggttctgtcctgggggcctcnattcctgctggcaaagtgggacctgncgtggctgtggaagctctgatgtccnncactggccctgtgttctacggggatctcacgatccatgagagggtgtctgtttccttctcgccgttcattccgtcgtgcccgtcttccctgggtcttgtgaatgcggctcgtgcttcatccctcgagccgggattgcttggggcgccttctcgttcatgggngacttgttcggtcttttcatggctcttggggcgcgtctgtttggccctgggttcttg

SEQ ID NO: 17182 - DNA, 249 bp, Zea mays
  Clone ID: MRT4577_115666C.1
atgcgactggcttgagctgattgaggcttgtctatgttgaagccagcatgatgcgtctgagaaatggacacttgaaccaaacgattaagtccttctgtctgatccaccaattggactctttgatccaatctagatctcaccttatgatcttgcacacaatactaaccctgatgagccactgtcacctatgtatgcaaattacacattctatgatccagtcttgactggaaaatgccatgtagatttttc

SEQ ID NO: 17183 - DNA, 227 bp, Zea mays
  Clone ID: MRT4577_115667C.1
ccgccgtgtgatggttctgcagattcgccttagcgggtaacaacgcagagacttttttttttttttttttttttttttttttatttttttaagtaaaatgaggaacagacttaaaagctataggcgagacatattaaccagaagctacagttggtccagaataatcatgggggggcatatgaaaaaaggtataataggaaatgtttgctaagggccaaaaatgaaat

SEQ ID NO: 17184 - DNA, 622 bp, Zea mays
  unsure (1)..(622): unsure at all n locations
  Clone ID: MRT4577_115668C.1
gaggctcggccggggccgcaggagatcgcgcgctccatcaggactccctcgttgccctcgacaccaagaccggcgccaaggcatacacttgctggtgatggagaagtggaaccaaatcaagagcaggttttgcagatagcccttgagatttgcaaggagggtgttctttccctctttgttcagaatcttccttcattgggttgggagaaaggatcttgtccactgctggtgtattttgttgagacagaaggttgatgaaagctattgttgcgtccagtatattgaaaatcattttgatcttttggatttccttgttgtttgctataagaacttggaagtcgcgttgaattgtggaaacatgttgcgagaatgcataaaatatcctacacttgcaaaantatatattggagtcaagcagcttcgagttgtttttccagtatgttgaattgtcaaacttcgatattgcatctgatgctctgaacactttcaaggatttgctaaccaaacatgaagatgccgtctctgaatttctgagctcacattatgagcagttntttggactctacacaaaacttttatcttcaactaattatgtgacacgaagacatcagtgaagtttctt

SEQ ID NO: 17185 - DNA, 1495 bp, Zea mays
  unsure (1)..(1495): unsure at all n locations
  Clone ID: MRT4577_115669C.1
gggaccctgacagactgtagcaataattggtcgctccccgatccatctgggtttcgcctgccagcggcgagatgtccttcttcttccgggccgcatcgcggcagcgcccgttgccgcaggagatcgcgcgctccctcaaggactccctcgttgccctcgacaccaagaccggcgccaaggctctcgaggatgctgagaaaaacatacttacattgaggcatacgcttgctggtgatggagaagtggaaccaaatcaagagcaggttttgcagatagcccttgagatttgcaaggagggtgttctttccctctttgttcagaatcttccttcattgggttgggaggctagaaaggatcttgtccactgctggtgtattttgttgagacagaaggttgatgaaagctattgttgcgtccagtatattgaaaatcattttgatcttttggatttccttgttgtttgctataagaacttggaagtcgcgttgaattgtgggaacatgttgcgagaatgcataaaatatcctacacttgcaaaatatatattggagtcaagcagcttcgagttgtttttccagtatgttgaattgtcaaacttcgatattgcatctgatgctctgaacactttcaaggatttgctaaccaaacatgaagatgccgtctctgaatttctgagctcacattatgaacagttttttggactctacacaaaacttttatcttcaactaattatgtgacacgaagacaatcagtgaagtttctttcagagtttctgttggaggccccaaatgctcaaataatgaagcgttacattttggaagttcattacttaaacattatgatgggcctgctaaaggattcaagcaaaaatatcaggatatgtgccttccacatttttaaggtatttgttgccaatccaaacaagcctcgtgagattattcaggttttggttgagaatcacagagaagtgttgaagctactccacaatctccccacaagcaaaggtgaagatgaacagcttgatgaggagagagatttaattatcaaagaaatcgagaagcttgtgcggttgtcagtataaacccggaaattcgaacgtatccttgaagacatactgtgcaatatgctgccttgtatagagcttgtttttcatgtatggaaaaaaaagtttggccacaaattgcattcttcgcgagaacacttagcatttctgtcagaaaattattgtcgtgtagcagaatttgcaacaggaataatctgcattatggtgtggtgttgataccattaaggattggtgaaagtgcctgccatttgaaatgggtacgcttgtcatgtttgttttgatgtctaaagtttgcactttttttttgacaacttgagggctgttttggtgcccaagaaaataaagggaggccataggaagtaaaaacctcccccccccaaaatgttctaaaaaaaaaaaaaaanaaaaaaaaanaaaannangggggcgac

SEQ ID NO: 17186 - DNA, 334 bp, Zea mays
  Clone ID: MRT4577_11566C.1
ggccgaccacgcgtccggaattattttacaaggccagttcctgcttaatctggattccacttcttcagtcgttttgtgtgtccaaaattcagaatagattatgatcccgtttgtggcagtgcacattttgatctaacaccttactgttgtgggaagcttgggaaacacaaactgatatcctttcaagcatacaataacattggaatactcttcctggagttagaagctacacgcatgataatgcgaatttatggataagcggtcagtgtgatgactggcaccctcttagcataacccatggtcaatgaacatactatgtctctactttagtttg

SEQ ID NO: 17187 - DNA, 1307 bp, Zea mays
  unsure (1)..(1307): unsure at all n locations
  Clone ID: MRT4577_115670C.1
cattgggtacctcgaggccggccgggccttcttcttccgggccgcatcgcggcagcgcccgttgccgcaggagatcgcgcgccccctcaaggactccctcgttgccctcgacaccaagaccggcgccaaggcatgctgaggtgaattaaatcgaaaaaggctctcgaggnatgctgagaaaaacatacttacattgaggcatacgcttgctggcgatggagaagtggaaccaaatcaagagcaggttttgcagatagcccttgagatttgcaaggagggtgttctttccctctttgttcagaatcttccttcattgggttgggaggctagaaaggatcttgtccactgctggtgtattttgttgagacagaaggttgatgaaagctattgttgtgtccagtatattgaaaatcattttgatcttttggatttccttgttgtttgctataagaacttggaagtcgcgttgaattgtgggaacatgttgcgagaatgcataaaatatcctacacttgcaaatgctctttcagatatatattggagtcaagcagcttcgagttgtttttccagtatgttggttttgcacagtcatatgcacgatttgctggctataccctaacagtaaggatccgagcagttttcttagtttctaatactaaagtagttcaaatatacacacttgcaagaaacaagtgctacacattttcttcttttaggacaactgggtgatgaaaacagcacagattagtcatagataatttgtttccctcttcataactagtgcccatcttttgatgcctatgtgcatcctatgttaatgcctatactaactgatgtcttttgtaggattcaagcaaaaatatcaggatatgtgccttccacatttttaaggtatttgttgccaatccaaacaagcctcgtgagattattcaggttttggttgagaatcacagagaagtgttgaagctactccacaatctccccacaagcaaaggtgaagatgaacagcttgatgaggagagagatttaattatcaaagaaatcgagaagcttgtgcggttgtcagtataaaccctcaggaaattcgaacgtatccttgaagacatactgtgcaatatgctgccttgtatagagcttgtttttcatgtatggaaaaaaaagtttggccacaaattgcatttttcgcgagaacacttagcatttctgtcagaaaattattgtcgtgtagcagaatttgcaacaggaataatctgcattatggtgtggtgttgataccattaaggattggtgaaagtgcctgccatttg

SEQ ID NO: 17188 - DNA, 428 bp, Zea mays
  Clone ID: MRT4577_115671C.1
aaaagagaggacggtggtgttctttgtcactagaatgctttctcttttctcccaaggatgaacaagagctaatttctcttatgtgatatggaatctgaatttttccttgaatgtcattggcatgtgggtctgcagtccacacaccattgacacattaagggcttgtttggttgcatgcctaaggtgccaaaaattgtcacacttgactaaggttaggcgctcaaattcagtgcctcaccttaggcatgtctaaaaaaatcttgccacttttatgagtcattgacgagcggggcctatacagaaggagaaaaatcttgccacaactgtagctacaaaccaaacgcatgtctaacttggtcaaacctacctaaccaggggcggaggagccattatggttaggtatagcccaagccatacctacatatgaa

SEQ ID NO: 17189 - DNA, 284 bp, Zea mays
  Clone ID: MRT4577_115672C.1
gcacatgctcctgctctatctccatcgtcacatctcaggccaggctcctgctctacctccatcgtcacatttcaggcccttccgccgtcgcctgcgtcgtcacgcagccatgcaaccgagcttggcacgcggcagcagcagcagccgccgcctgcacacagcggcttcaacctgcccacgcatggtcgctcgtcctgtcaagctcagcgcattccggcagcaatggcataacggcggcggggctgcgtgggtgcttagggtgggcccagccaacccaggcaact

SEQ ID NO: 17190 - DNA, 424 bp, Zea mays
  Clone ID: MRT4577_115673C.1
ggcggaaaacggggggggcggcccaaaaaaaccccccccttttttttttccctcagggcccgaataaaaaaacagcaaaacttggggcccgggaaaaaaagcaacatttccctttaaaaaaagggggccctggggggggaaaacttacgtaaaggcactggggggcccaaaataaacccccgggaggggaccctttatttaaccccggggcaaagttggagattgtccatttcctttttgccccccaccccccggggagagttaaaaaggccaacaggagttggttaaaaaaaaaaaaatactaaatggcccgaaataatttggacgggggtctccgggggggggtgtccccccccaaaaaattgtgggcgggaaataaccccccccgcggtttcccccccttctccaggggggtccccttccc

SEQ ID NO: 17191 - DNA, 209 bp, Zea mays
  Clone ID: MRT4577_115674C.1
ccaaatcacaagctgccatttactcaaaaacactatctacagcccatttatgcgaattttattcacccatcacgaaccaaatcaccttcatctttgcacgctgtactgctcgctcagaccttttggttgtagtgttattcttacaggttatcatatggatcgaccacagctttacatcatagagccctcaagactttcttataaatact

SEQ ID NO: 17192 - DNA, 318 bp, Zea mays
  Clone ID: MRT4577_115675C.1
ccacggtatgtcgccacggctattagtagagaaggaggagacagagggaggacgcgaggagagcggatggaggaggagacaagaagcgatgacgacgtgtgatgccgcgctcgcgaccgcaagaaggggacgcttctgcgctggactaaggagtgctgacctttctatgacgaactcaacactacagctgtacgaaaggatccagtgcacgggcagaagcacaaagcataactgcacaacgggagaactcatgaagggactacaccatgaatgcgacgaggcgtacttggggaaggcacatgatgataccaacgctct

SEQ ID NO: 17193 - DNA, 273 bp, Zea mays
  Clone ID: MRT4577_115676C.1
caaaatttttgccatttaatcaacaattcttagcagtaggaattctgataagtctacatgttggaattggactatgtctgaaagcaaattaaggtactttacctgaaaatctttcaggttctataacacctgtctgtatgagaatgttttccaattttagagtatggtgtatgcctgcttttgaatcctcagtataacttgtttacaattcagatacaatggccttaccccaaaactattgtcttgaaatgaaagggctcatgaatctgcatt

SEQ ID NO: 17194 - DNA, 326 bp, Zea mays
  Clone ID: MRT4577_115677C.1
ggaaaacccggcccgacccacgcgtacgcccacgcgtccgggattcaaattacacccttttggctgagctctacaacaaatgcaagggggtgaccttagagatcttaacctccacttgcagtcactttttgaagcaagaaccactggtccagccaaccaagcagaatattctgcttgcaggagatgcagcgatgcatatcttattataaacagggacgtatgcaacgacccaaagaccgaacctgtgttgaagatcctaagaacaaagaattgtggcttcttgtgatctacgataaaaccaaacttaactaacttcttagttccta

SEQ ID NO: 17195 - DNA, 213 bp, Zea mays
  Clone ID: MRT4577_115678C.1
gttgttttgacttctgctccccctactgttcgggtcagatcacatgcggtgggggggggcaacatttcactgccaaccggatagtcactcttgcaactgctgtttcaacctattttgttcgatgatgacctgcctgatccatccactaaaagtccactccaaaactcctctgacactctcggatataacctcaaggccatgaacatactctac

SEQ ID NO: 17196 - DNA, 578 bp, Zea mays
  Clone ID: MRT4577_115679C.1
gggtacctcgagggccggccgggacagtatctcctctactcgctttactaaataagcgaccagagcaaatgaaatgcagataatgaagatgctgctatcttcgcactctgctccttcctcgggacatcgggcatgcttaccggcatgaccgacaagtatcccgatgacatgtccttgggatggagcgaaacacaagtcctgcaagactccttctgcctaaagaatttcgagaactagttctacaccgacggcatgaactatctctctcgagtgcgactacaaagctgccgattgcaccgactgggtacgatgatgactgcgccagatagcctataagaagaacagcaatgtcactctcctgtgtggtgcgctgaaagaagccgatgagcaggcgagcacctacaagtacctgtagaccgaggtatagccatgcctatcgataggccactgtgagtgataacgtattctgtctccacctacctcagagccgagcagtacatcaccgacaagacgtacctcgccgtctgcgcatagatcctgaacgataaggcgtgacatcatatctgtgaattctaggc

SEQ ID NO: 17197 - DNA, 444 bp, Zea mays
  Clone ID: MRT4577_11567C.1
gtgacactatagaagagctatgacgtcgcatgcacgcgtacgtaagctcggaattcggctcgagggatggacaaaatatacttgcaaacatggctcagagacaaggaatttactttaatgcatacaacaaagggaagacacttgttttcagcaaggtacccttacctgattatcgagcagatctggacgacaggcatggatcaacacaaaaggagattaagatgtctaatcagacagaggcgcgagtcgaagaccttttgtccaggtcaaagtggaacaacaattctgcaagcacatcaactgtctcaacgagacaaattttccctggcgcatcctcgtctgtagttgaaccagcagcaccaattgataaagaaaagctcagttcccagcttagggagttgcagaattcaaggaagacgacagcaagtgctagatcaatgcaat

SEQ ID NO: 17198 - DNA, 416 bp, Zea mays
  Clone ID: MRT4577_115680C.1
cttacactttatctaaactccaacccattcttttgtaattacaccaatctcgtttacaaggttgggagtctataatgtaatagtggcttctatcaccactcatctctcttccactattctcctacctagaacttaaaagacaatatccctcacaacctctttcacggtgactaatcctctcgtaaatattaaatctctcatttcatcgaccaaaacatctccccataagaaaggagctaataacaccaaaaaccggcccgattcttcatcgcaacaacatctcatcaaaatctaccttgaccacaattcttaacaccctcctattattgcatagcaaccagcgacttaattacattctgaccaaaatgttgtgattaacaaacaacataccatcctctctataatcgatagactat

SEQ ID NO: 17199 - DNA, 310 bp, Zea mays
  Clone ID: MRT4577_115681C.1
ataggattcagcacgccgcccgttgggaagggagcttctaggctgcccgccgcggcgcgtagggcgggggggctgagccaataggcactggcccttggcgcgcgaacgccctaaccttagtcggggtgggcgtcgagcataggccccagttgctatcttggattctgacttatagtcatacagtcataatccggcacacggtaccttcgctccactggcttttgaaccaaacgcgaggaccaattgtgtgaatcaacggatcctttagtactatgttgaattactatactttcgcgggcatgattagggt

SEQ ID NO: 17200 - DNA, 564 bp, Zea mays
  Clone ID: MRT4577_115682C.1
tgggaccctcgaggccggccgggccgggagtttcataggaaaacaaccaccactctcacgaccgtcgacctcatgcatgcgccacagctgcgcactctgaagtcctcgtcatgtcccctcacgaactcctaaactccatcccccgtgaacggcaacgacggcacctccaatagggatgaggacaggaatctttggcggaggagactccgccatataaggcgcaaaatgtggacgagagcacaaagtccaagagacctatccatccagatactacatgatcatgtctgtgttagggctaggggaccagacgatgcacactgaggacattaccgtgcataccaagtgcctggtggatggcgtgaaggggtgctccatgtcacagatagagaagcaagactatgtggtcaacgatgagactgataagcaggtacgatgagaacactaaggaatatattgagaaggagagcacagattatctacaacgctaagactgatgactacgatgcctcgaaaaccgactgcgatgatgatcatgcctgtaatgacgaggataacgacgactac

SEQ ID NO: 17201 - DNA, 293 bp, Zea mays
  Clone ID: MRT4577_115683C.1
cagtgtggggctcgagctacaccaagtgaacgtgctatgcagtgacctcaggcgaatgtctatgctagatattgtgtcctccttgggacttattgtgccttgcgtcgcctgcatgcactgcgttaccgattacacagtgtcaacttgctactagtgctattattccacagttcctcccataagtttgttcaatgggcttcggagattgagacgtgcaagcttataggctatatctggtgcttgaggcgatcgccttacaagaaataattgtatcattgtagacacaatgattg

SEQ ID NO: 17202 - DNA, 227 bp, Zea mays
  Clone ID: MRT4577_115684C.1
tgctttataagggattatttgaccaacgggggggaccaagcggttttgttcgatcctctccaatcacctgaatccctcgagtattcatcgccggcgcaacgcggactctttccttcactgcaaaagggggaaggggacaccaacggaacaaaaggccaaggacacgaagctgtgcacgcaggaacgagccaagatactggtggtcatgtacgtcaacaaggagtacg

SEQ ID NO: 17203 - DNA, 323 bp, Zea mays
  Clone ID: MRT4577_115685C.1
tttttctcgggttttttctattcccctgttttttctttctttttctttcttttgttgtttcttttgtttttccggtggcggacccagcgggagcccttttttctccggcgaaattttagagttttgtgctccccaaaaacttagtttaaacaaggggccccaaacagcaaccgaagggcctggggccaaaaaaagtgggggccccccctgtttaagggtcgcgcctttccggcagaaggaaacatttttggggccccacaaaaacatttttttaggggcccctggggggtccctcccctcgggggggggccaaaacccggggg

SEQ ID NO: 17204 - DNA, 301 bp, Zea mays
  Clone ID: MRT4577_115686C.1
cgaggagggtctggaaccttcactgctattttaacgtacacataagtgggcggatggttcgattcattctaccaaatgaccctttcaaaaaaaggtgcataattgtcctttgcagaaaaagaatggggaaacctaggcttgttctcatatcaccactttaatcttatttaaccatcctttatgttttgttccagttataaacgtttaaataatataatgttgtttatataggtggaattttcctataaaaaaaagaatcttttttaaaaaaaaatattattaaaaaaattaaaaagggcgg

SEQ ID NO: 17205 - DNA, 165 bp, Zea mays
  Clone ID: MRT4577_115687C.1
cgcactcgaccgcgctcctctcgaacgttaggtatgctcgtccaccgtctcctcctcgtcgtcgccgtctccgcagcgagctgcaccgccatcggggaggcggtggtttacgaacccctctctgacgagcacttccctccggggatcctccccaatgacgtggtc

SEQ ID NO: 17206 - DNA, 551 bp, Zea mays
  unsure (1)..(551): unsure at all n locations
  Clone ID: MRT4577_115688C.1
taaaaagaaacaaattgaccgtcgtaataagaaaaagaagtccagtcagaagaaaataactggatttcaggtgcatatcccgaacaaatttgcatatacttcacaagttgtgtacacgttattttttttatcattaagctttctgtcttactaaataatagttccttgaatagtttctcccagggagtacttcaagggtccttattacatctgcagattcaagaatcagggttgttgatggccttaatctagttcacaagtacaaaggtatcaaattttgagcccgggaaattttttaagatcagtaggcatatcacatcatttatttttgcaagacatagttttgtaccagtaccacattgtttttctctgcttctggtaagtgatttagtaaaatgactggttctttacgtaattacattttgataacctgtnttgggttgttcattaaaaacttatttctgtgttagaatcccagtgtctgtagtttggtagatgggcaggaatcaaaccatatagtaatcaactttttaccaatatcatatttcgtg

SEQ ID NO: 17207 - DNA, 205 bp, Zea mays
  Clone ID: MRT4577_115689C.1
acgacaagagcggtgtctatcggcgcgaaacgagcaggcgaaggaggagctgtgccaagccacaatgggtatctcacgcgactcgatgcacaagcgccgtgccaccggtgtttagcataaggcctggaggaagaagcgaaagtatgatctctgtctgcatccgtccaattctaattgttgcgccattccacaaccttcctcctta

SEQ ID NO: 17208 - DNA, 392 bp, Zea mays
  Clone ID: MRT4577_11568C.1
atgggactctaaaagtagcagatatatctgtgaaggaagaatgcaaaacccgtccatctggccttaatacagttaatatgcttaaggttgcatcaagtgcacttggtattgggcctcagacagccatgcacttggctgagcggctttacactcaaggattcatcagttatcctcgtacagagagcactgcatatccgtcatcatttgattttcgaggtgcacttgctgcactattaaataatcctctatggtccaatgatgtccggaaattactggatgctggttttgttaacctcgtcaaggtcatgatgctggggaccatcctcaatcactccaatgaggtcagcaacagaagcatctttgggaactgatgcttggaggctgtaccaata

SEQ ID NO: 17209 - DNA, 863 bp, Zea mays
  Clone ID: MRT4577_115690C.1
cattgggtacctcgaggccggccgggaaaaaattcgacatctctatcccgccgccagctactaaccacagcgaatcgacaaacagcaggatcgatctctgtccagtcgaacttatccatcatggccgactctcaagttaccctgcgcacgcgcaagttcatccgcaaccctcttctcggacgccgtcagatggtcgtcgacgtcctccaccccaaccgcgcaaacgtttccaaggacgagctccgtggcaagctcggtgagctgtacaaggccaagaaggaggatgtttccgtcttcggtttcaagacacactttggtggcggcaagagcaccggcttcgctctcatctacgacagtgccgaggccatgaagaagttcgagccccgctacaggctagtacgatacggcatggccaccaaggtcgagaaggccagcaggcagcagcgcaagcaacgcaagaacaggatgaagactttccgaggcacagccaaggccaagggtggcgcgaagaaggagaagaaataagcggctggagtgggctgctgctgacgatgatgatgatgatgatgactggttacaaaggtcattgtttggggggtcgagagtggcggtttctctggaactactactgttccgcctgctgcggtttcttcatcatggtgggaacggagttgcgtctgcgggcatgggcatgtttagctaccattgcctggaaaactcttgcggatggacacgacaagacggatggcgtttgagatgaattgtctgctaaccatcaatgcatatcatggactttacgatcctccaattgattcgtcacctggccctaaaaaaaaaaaaaaaagcggcctcgagctcagctt

SEQ ID NO: 17210 - DNA, 132 bp, Zea mays
  Clone ID: MRT4577_115691C.1
gaagctcggattcggctcgtggccatccggcgcgcacttactatatcgtctgcaccacggaagcgggccgggctaagtttacgagacacggcggagagatccacgccaccaggacgctaaaaagcggaccaa

SEQ ID NO: 17211 - DNA, 718 bp, Zea mays
  Clone ID: MRT4577_115692C.1
aattcggcacgaggcggcccttcagatctcaattcccaatgccctcgccgtcgtagctgtgccccgaccccgcgcgctcgctcggatccatgggcgggctcagggcagcatcgccatcaggcgcaggatccggagccgtcgcgggggcgggatccgattccacggggcggcgactggcgatggcgtgcgtgctggcgtccgaggccgccactgtactcgccgtcatgcgccgcaacgtccgctgggcggacgtccgctacggcggcgcgggggacgacgagcaccttgaccacccgctcgtcgcggggctcaaggctctccgccgccgcgctgccgcgtggggccacggtcgctggacgggcgtcgaaccgctcctctacctccgacccttcctcgatgtcgtccgctccgacgagactggggcgcccatcacgggcgccgcgctctcgtcgttgcacaagatcctcacccttgacctcgttgggcccggcgcaccaggtgctgccgaggcaatggccgccgtcgttgacgccgtcacggcctgccgctttgaggtcatcgacccggcgtccgaggaggccgtcctggcaagggtcctgcaagtgctgctcgcctgcgtgcgcagccgtgcagcgctagcgcttgccaaccgccacgtctgcacgacgcggaagcatgtgttgagcgtcgtgcatcaagctggaaccaagggggagct

SEQ ID NO: 17212 - DNA, 397 bp, Zea mays
  Clone ID: MRT4577_115693C.1
gtccgcccacgcgtgcggtcatctacgagcggggagtagcgcagcggccggcgcgcgtcagaagtgcccatggacgccgcggcggtgctgaagcggaagggcgaggaggcgcccgaggcgtggctgctcggcggggtcgccgtccccgccaccaagatccgccgactcgacgcggaggtgccgccgcctgtcgggtccagcgcgggcgtgctgtcacagccgcaacgtgctttaggggtggaggaagcgcggatgagcggccacgtgggggcgccagccatggaagccacgccgttgttgaagaggaagggcgaggaggcgccgcagccgtggctcgatgtcgacggggtccctatacccggcacgaagatccgtcgactcgacgccgattgtgcca

SEQ ID NO: 17213 - DNA, 116 bp, Zea mays
  Clone ID: MRT4577_115694C.1
gctggctatgtcagagccggatgtcctgcgagacctgcggcaccgggttctcgacgaccatcgccgtgtacaccgcggactgccaaggtgacgatcgagtgcatgcagtctctcgc

SEQ ID NO: 17214 - DNA, 312 bp, Zea mays
  Clone ID: MRT4577_115695C.1
cttgagtgtatgtccccatagtgggccccttgacccacatgctgaccggtgccttgggatttgactagagttgctggctcgaggcccagcacgaggacttaccctggggtctcgttaggtttggaagcagctgtccctagggggtgaagtccccccccttttttttttttcccctgcttttcccaggggttaacctccctatgtgaactgtagactcagatcccactaaagtgctgttgcacctatgatcctaggtggtttctaagcacaggggacaccccaaaccccctgcctgaatggatgggtccatcc

SEQ ID NO: 17215 - DNA, 331 bp, Zea mays
  Clone ID: MRT4577_115696C.1
gggggggcaactgcccttaattgttctttggccttagcaggtaagtccagcttttcctgctttaacatatcaacgttaatttagggaaggaaataataggttttttggggagaagttgtttcatacctgtaaactttttaaacaaagacggactgggggtattttacaagatacaaaaaaaatgtttacaaaaacaaagattttaacccagacctgtccactttgggggtgggagggactcgaaaattgcccattaggaaaatggaagaaatgtcaagtaaaaaaatccatgttccgccagagttcgctcaaaaaatctaaacctttgttt

SEQ ID NO: 17216 - DNA, 652 bp, Zea mays
  Clone ID: MRT4577_115697C.1
tttggggtaccgggcccctccctcggtttttttttttttttttttttttttttttttttttttttttttttttttttttttttttttttttttttttttttttttttttttggggaaaggggagggcatcctttgttaccatcgcatttcgttacaatttaaacaggggcaaggcgagaggggcaaaaaaggaaaaccccctcccaaagcaaaaaaacccccatttcaccccacaaaaaccgggcccaaaaatcccaatcccccatcccccccccgttttggttacaaaacgtaccccattccccccttaagcaaggaccccgggggcccccccaaaaccccgtccgggccgggggagttccccccaaaaaagttgtaccccccccccacggccccccttttgagtatcaaccacccgggcttggttttcacgggcgaggggcccaaaaaaaaccccgggccggcctcccgccccttaaaaaatttgggcagttcctccaaaaggggtttgcccaccccggggctccgggggggggccccccgaaaccccccctgttttttaaaaacccccggggccgggcccccccggggaaacttttttccccccaaccggtcaaaaccaattaacaaccccccctctttgggggagggg

SEQ ID NO: 17217 - DNA, 148 bp, Zea mays
  Clone ID: MRT4577_115698C.1
gcgcctcatcctactcttctgcggcgctggtcatatttttgtgcgcggcgattgagatgttttcggacgctgacggcggcaacctgagaggctgcgagaagatatttaagaccaagtgcgcgcagtgtcacaaggacgagaaggccgc

SEQ ID NO: 17218 - DNA, 377 bp, Zea mays
  Clone ID: MRT4577_115699C.1
caaattcatggatgagaacattacacacggtgctgctcacttgctagtagatgctggacaccagctccaacatgcaacatgctggcatgcataagctacgtgaccatacagctggcacggaaacgctcacacgacattatgtgcatggtgtgcctaaagactaacccggatggcgactctgcaaatcctatgttgcacatactatgcatggaaagtactagctgaacatatgcaatttttaatgacgaaaggctgtgaccactgtccggatgtaatttgtgtcgtattcggaaatggcttggtgttgatttctttcattgcatgaaatgcaactgctgtcttggaatgaaattaactgagcacacatgtcgggaaaa

SEQ ID NO: 17219 - DNA, 312 bp, Zea mays
  Clone ID: MRT4577_11569C.1
cccgtgcgtatgtacacaactactagcccccagccgcagaacagcgatattgagatcagatgcacgctcttccaatagatcagactgaacatcgggacaataatagagggcaaaggactcaaccaggacgctcaccacctataagcccgtcatcaagatcaacgacgtccatactagccggatacggaccctggtcgaggccacaatgtttaacaccatagccgaggagaccgacgctggtcttgtattggatcgaagaactgacactctccaaacaccacagacctgagacatttatatatccaatcacca

SEQ ID NO: 17220 - DNA, 166 bp, Zea mays
  Clone ID: MRT4577_1156C.1
ataattcttttcctttttattttttttttctttgttgttctttaaaaaacgggcgggcgctaataaacactgcactttattatatggagacataacctcgcccatcccaccacttgagttatcagggcaatgcctaattcacatagtaccttctcattggaaggat

SEQ ID NO: 17221 - DNA, 1533 bp, Zea mays
  Clone ID: MRT4577_115700C.1
ggccggcggcgccagcggcggcgacgaaggggacggccagctgcacggcctcaagttcggcaagaagatctacttcgaggacgccggcggctccagtagcagcggcggcagtggcagtgccagcgcgaccgcgcctccagcgacgcagcagccgtcgccgccggccgcttcgcctagggccgcgcccggtggcggcaggaggggcagggccgcggctggcggcgcgggcccctccttgccgcccgcgcccccgcgctgcctggtcgacggctgcaacgccgacctcaccgacgccaagcccgcctactactgccgccacaaggtgtgcgaaatgcactccaaggagccccgcgtcctcgtcaacggcctcgagctgcgcttctgccagcagtgcagcaggttccaccagctgcctgaattcgaccagctaaagaagagctgccgcaaacgcctcgcaggccacaacgagcgccggaggaggccgccgcctggaccccttgcgtcacgatacggccgtcacgctgcgtcgctcggcgagcccggcaggctcagaagcttcatgctggatttctcgtacccgagggtctcaagcgccatgaggggtgggtttccggcggtgaggcccggtggtgaaagggtgcctggcggtatccagtggcaagcgggcttggatcctcgtcaccaccaaggcgcggtcgcgggatacggcgcccactatgggagcgagggtggtagctcgtcgtcggcgaggccgccggtgttccctggcccggagctgcccccaggtggatgccttgcaggagtccccgcggactccagctgtgctctctctcttctgtcaactcagccatgggatgctgcccacagccacagccacagccacgctgcgccaacagcgggtttcgacggcggcagccctgtggcgccctccctcatggcggcgagtagctacatcgcgccgagcccctggaccgagaccgactcctggggccacgaaggcgggcggagcgtgcctcagctgccacctgacgacgtccccctcggcgaggtgcactccggctcgagcagccaccacggccagttctcaggtgagctcgagctcgccctgcagggaaacaggccagcgccagggtcggcggcaccgccagcgccgcgcaataatcagggctccgcgggcacgttcgaccaggctggcaacacgatggactggtcgctctaggccgggggccgaaataaagcgcagcagatcctagccgcgcagggagatggaggaggctgaaagtttgatgctgcacgctgcttgcttagcttagagcatccagcatgataagagtgatgaactgatgcggtgtcaggagactagtttattctgtgcttcaccatgaactcgtctgtcgcggcgtctatgtagacagacggcacacgtccgtggttcgaagttaccagtatgcttgtcggggactttgctcgcgatgcattaatctcattgttcaccatccagaaaaaaaaaaaaaaaaaaaaaaaaactcgagg

SEQ ID NO: 17222 - DNA, 719 bp, Zea mays
  Clone ID: MRT4577_115701C.1
ccggccgggatggccccacccacctattctccctgccggcggcagccttaaccctaatctcatcgcctcctcttccttctccagttcctcgaaggcccagcagacaacagcccctctttcttctcagccatgtcggaggacgaagcgaacgctgctgctgcgccggcagagggaaagaactggcggcggaaggggaagcacgacaagcccaagccgtgggacgaggaccccaacatcgaccgctggaagatcgacaagttcgaccctgcctggaacgagggcggcatgctcgaagtcagctccttctccaccctctttccccagtaccgagagaagtacctacaggaggcgtggccggtcgtgaagggcgcattgaaggagtacgggatctcgtgcgagctcaatttggtacttgatgagtgattaaccttttcttattgctattgactggcgatattgttatgtggtaaacaaatgctctgaagcctctctctcggtgtgtgtaggtggagggatccatgactgtgtcgacgaccagaaagacaagggatcccttcgctattatcaaggccagggaactaattaagcttttgtccaggagcgtccctgcacctcaggcaatcaaaattcttgatgatgagatgaactgcgatattattaagaatggtggtcttgtgagaaataaggagcgggtttggtaaaaggagggaacggctttt

SEQ ID NO: 17223 - DNA, 1708 bp, Zea mays
  Clone ID: MRT4577_115702C.1
ttgggaccctcgaggccggccgggacccgaaaaccccaaacccaaaggcatctcccagtcggagtcgccccatggccccacccacctattctccctgccggcggcagccttaaccctaatctcatcgcctcctcttccttctccagttcctcgaaggcccagcagacaacagcccctctttcttctcagccatgtcggaggacgaagcgaacgctgctgctgcgccggcagagggaaagaactggcggcggaaggggaagcacgacaagcccaagccgtgggacgaggaccccaacatcgaccgctggaagatcgacaagttcgaccctgcctggaacgagggcggcatgctcgaagtcagctccttctccaccctctttccccagtaccgagagaagtacctacaggaggcgtggccggtcgtgaagggcgcattgaaggagtacgggatctcgtgcgagctcaatttggtggagggatccatgactgtgtcgacgaccagaaagacaagggatcccttcgctattatcaaggccagggaactaattaagcttttgtccaggagcgtccctgcacctcaggcaatcaaaattcttgatgatgagatgaactgcgatattattaagattggtggtcttgtgagaaataaggagcggtttgttaaaaggagggaacggcttttaggccctaacttgtctacactcaaggctattgagattttgactggctgctacatcttagtgcagggaaatactgttgcagccatgggcaactataggggaaggggactgaaacaagtgagaaggattgtagaggattgcatgaagaatgtaaagcatccagtgtaccacatcaaggaactactaatcaaacgtgagctagcaaaaaatcctgctctagccaatgaaaattgggacagatttctcccgaagttcaagaagaagaatgtcaagcagaagaagcctcaaactaaggagaagaaaccgtacacaccctttccaccgcctcaacagcctagcaagattgatcttgaacttgagaacggtgagtatttcatgagtgacaaaaagaaatcagcaaagaaatggcaagagaagctggacaagcaatctgggagagctgaagaaaataaaagaaaaagagaggctgcatttgttcctccaaaggagaacactgcaggtccatccaaatctgacaagaatgccagtgacaacagtgagatagccgatatagcgaagtcattaaagagaaaggcgaaggaatttagaaagaacgaggcccaggagagtgtcatagctgaatcatatatcgcaagtaatgatgaattgcggcaaaaaaagaaaaagaaatcaactaagtccaagtagccctaatcctcatgcataatgacactggcaattgagaaggattgcatgagccatccctataattatgtcattcatgctgtgatcgtattagatgatgaaacaaaattcgaaccttccgctggtctgttgttgcaacagttcatatgcaataggtttttaatgggtaactgccatgataaccaaggaacagaaagagccctcaagcttatcattctccaaagatatatattttcatcctataggttgtgttggttggtagagcctggctggtctaggcctgttgtatcatagtacgttatatgcaaaaaaaaaaaaaaaaaaaaaactcgagctcgtgcaaa

SEQ ID NO: 17224 - DNA, 344 bp, Zea mays
  Clone ID: MRT4577_115703C.1
gtggcggaggacttacggtgcgccagcggcggcatcttccaggtggccggcttggaccaccacatttggagcatttggtgaacgatcctttgagagacagacaaccgaaccggtggcgatgcttctttcgttggacttgctatgccctgccccaggggttggaggtagtggattggtacagtgacgggggaatgctggcggtggatgtctcggcgaggtttgctagtcgactagataatgtcgcgcgtctgaaacggcgcaattgcaagcacgctattagttgatacatacatcgcgcagtgtatgtcctgaagagcggctatattcatacatgataacaacgg

SEQ ID NO: 17225 - DNA, 225 bp, Zea mays
  Clone ID: MRT4577_115704C.1
aatgaccgacccgacccacgcctcctcggacagcctaccaaaaaaaaaaatccatctttaagaaatgccctctgaaaagcatcttgcgcaacttatctctcccaacattgtaatccctatcttactccgacacatccaacatgatatcgcactctaagttggtcaagcgttcctccaaagcaattagcatcctaagctatctacttatcaaaaaaaaaaacaaaa

SEQ ID NO: 17226 - DNA, 710 bp, Zea mays
  Clone ID: MRT4577_115705C.1
cattgggacctcgagccggcggcgacccgcttcaaatatggtgctgacaccgtccgtttcctctgctccgtcgtcgccgccttcgcgcgcctggtccgcgagctccgcaaggcgtccgacgtcatggcatccgcatgctctctgtctccggtagcggtcctcaccgcacccgctatggcggcggcgccatctcccatcggcctgatagcctccacgccgctcccgaagcgaaagaagatgcttgcccaccaggttgccatcccggaggacctgcagctcgtcgcgccgccgccgccgccgccacccgtgcctgcgcttcctcttgcagacgcagtggtgtccgactgcatcagtgggagtgggagtgggagtgggatcgggatggtagtagagcaacaacaggctcggagcttggcgaagaaggccgcgtgggcggccaggaggcggccgtcgacgctcgtcataccggtggccgacgacgctggcgaggtcgccgccggttgggccgcagctgccgcgccggtgaaggaggccgacgtggaggtggtgggggacgggttttggttggcgagtagagcaggaccgaggcatgcgatggaggacgcatatgctgtgctgactgacaaaaaccatgcagattctcaactggcattctacggtgtcttcgacggccacggcgggcgcgcggccgtggacttcgtctccgagcg

SEQ ID NO: 17227 - DNA, 244 bp, Zea mays
  Clone ID: MRT4577_115706C.1
tcggcagggggggcttgaggtgcgcacactcgctcatagacgacacgcctacaagggccactggccgcgggtcatcctgttcggcggcgccaccgtcatcgagaccggagcttcttcgggcctccccgacatcaggctcgcgggggtgacgaactcggcgcactcgtacgacgtggagacgcgcacgtgtgacgaggctacatcctgctggatagcctgcgtctaatagggccgcgcatgctgc

SEQ ID NO: 17228 - DNA, 341 bp, Zea mays
  Clone ID: MRT4577_115707C.1
gtagagaaacactgtgggttaagaggggaaacacagggaattaacaaacagcccctaagaagtgggagaagaaaacacggggaaaaaaaggttccccacaaaaaaggggggacacggagagggaaaccgcggggcaaccacggggaacaaaattttttttccccggttttggggggggaaaacaggaaaacccccccacgagcccaaaaagagggcgctaagagtgccgggtttgtcccccaaggggggggagggagggccaaaaggggcccccggattttcaaaagggggatgccccatgcacccagggagattttacagtgggggaaggggtgttcccc

SEQ ID NO: 17229 - DNA, 291 bp, Zea mays
  Clone ID: MRT4577_115708C.1
gttgggctaacgatttgattgattgatatgtggaagacacaggctttttaaggcagtgaaactattctgtatgacactgtgatgagggatggatgtcattatgtatttgtccaaattcatagaatgggtaacactacgagtgagccctaatgtcaatgctgcgctccaggggattatgccatgtccctgtaggttccccagctgtatgtcccactgtgggtgactgggatctcgacagtcggggaggttgccctggggaagtttggaaatctgtaccctccgctcaacttt

SEQ ID NO: 17230 - DNA, 421 bp, Zea mays
  Clone ID: MRT4577_115709C.1
tcggcgctaagtttcggccgccggccgcggtgccctccgccccttcccaatcctgcccccaagccccagtcagccatcgaaactccaacccccaggcggccaggcccaagcgtccggcggttgcggccccgcggcttggcgaaggcgaccggtggctaggccccagcgactcagggcggatcaactatgactacgaccagagcatcggttcatcgaacgtagaagagatttatagctatactagtgccctgtgttcttttctgcatgatttctgtgaaatttctgtgttccaaataggccttgaattggtagctgctacgagcttacgttcaaatcctaaaactgtaatgcctgcctgcaagttaaaccttatgtggaattctttctcctgaccttacaatgaacaagtatttgtgtcctg

SEQ ID NO: 17231 - DNA, 1067 bp, Zea mays
  Clone ID: MRT4577_11570C.1
gccggccggtccgggaacatcacccgcccacacggagcacgctccacgccccgcgcggaaaagacggagagagaacaaaaaagttaggggggggaagaggagactcggcggcccgaacgacaagcgctgacgcacgtacgtcggcaagtaatgtaccaggccatcccctacagcagcgcccggccgtggctgatgccggcgggcgaggcggccgccgtcgtcgccgtgaagccggagcctgagccggcggcggcggcgaccgtcgcggaggagcgcgcccgggccgacgccgcgggcgggacggacgacgacggcgacggcggcagggcggaggtcgggagggccgtggcggagagcccggtgctggtggtggggcggcgcgggtgctgcctgagccacgtggtgaagcggctgctgcaggggctcggggtgaacccggccgtgcacgaggtcgcggacgaggccgcgctcgccggggtcgtcccggccggcgcggaggccgccgccgaacaacgcagagtacgcggggtgggcgggaagctcctcggcgggctcgaccggctcatggccgtccacatctccggcgagctcgtgcccatcctcaagaaggccggtgccctctggctctaattttaaatctgtcaggcaggcgtatctcttccttcttcgttttcccttttctcccccttccggaaaacgattggcgtcgtggtttggccgttggaccgagttaagattacatcacgccgccaccgccgctgatggatgcgttggaatagggctttgatctctctctctctgttttttttttcatttgctttattaggggaaacagaagaagaagaaaaaaaaggaatgatgagaattctaatcaaataatttagtctagctttatctggtgggtagcgtgtggtgatgactgctcgcttcgcgtcgcgcttcgtccatcatgtacagtcgtttccgtttcagattctagtgaggaatgagctgtccagtttcccattctcccgtggcctggaccatttgcgtaaaaaaaaaaaaaaaaaactcgagactactcgtgc

SEQ ID NO: 17232 - DNA, 464 bp, Zea mays
  Clone ID: MRT4577_115710C.1
atcaaacaaaagccaacggcagggtatcggggggagcaagggcacacaagggccgacccaaaggtccacgaccatcacccaaacaccaagcataggcccgagaactatatatggaacataaagcgcaaacagcgacaaaccaggaaaaacccatagaaacacgggttcaacaaaggctaggctacggcgcaccatctctggccaaaggccggacgcggggcccgacccgggaaacccggaccggaaccggcacgcgccccacctagccccaaaaggagccgaaatagagctgggcaaaaacatggccaaacccggggccagggggaaatcggtgtccaatcacaatcccacacaaaatccgaaccggaaacaaaaagggcaaagccgggggagcccaaggggggcccaaacaaacagtaatggcgtagcgctcacggcccgcttaccaaaccggaaaccggccg

SEQ ID NO: 17233 - DNA, 804 bp, Zea mays
  unsure (1)..(804): unsure at all n locations
  Clone ID: MRT4577_115711C.1
cgggtcacgacaactattgtgacaaagatggtcatgtaggtggttttttctacaaaaaggagcataaggctcaggctcgccgttctttaaagtctgctagtagtgccagtactagaggttctcgggggagttatgtcaattcagtcactcaggtgatgttgtttctccttcatcaccatgctgcctcttcaccgcaaggtgttgctagtcatgcgacttcgtcttctactctgccaggttttgctgctgcttctcgatcttttttaccctcatcctttacctcaacatctcttgttgacccactttctttatttcttgttcatatttgatgttgctatggctcgtgtgctgaattttggcccgacaccttctattgtgccttcttctgtgttttcttaggagtattcggttgtgattccagaccacactgtgaagcctactaggacacaggtctgcacacgacatcatctctcaaatgctccaccatcttctgatgtgctcaatccttctgatgttgcagcttctcctgatggatcatcttctactgaatcatctcctgttgggccatcctcacctagtatctcttcacctgagcggctgagccgctacttcatcaaagtcattgatctcgtcaacctatcgatttgtatggttttggaccagttacttggcaaggttttggtggtattgttctttctgaaccgatttattattgtgaactagcaatgtgcacgtacgctgntacgcttttcatttatgcttaangttagagtccaaaacccaatacctatatgttctattggc

SEQ ID NO: 17234 - DNA, 417 bp, Zea mays
  Clone ID: MRT4577_115712C.1
ctctagcggccgcccgtttcattcctttttgttgcagtgagcctacacaagttcgtctttgttttatggataatatgtataacattatctattggaatagcaatgttgatgctgcaaaaaaagaagccccatcaaaaaaaatataagagaaaaaaaaaaaaaaaaaaaaaaaaaaaaaaaaaaaaaaaaaaaaaaaaaaaaaaaaaacaaggaaaaaaaaaaaaagggggcgcccgttttaaaggtcccaaatattaacccccgggcatgcaacgaaaaagtttttttattgggccccccaaattgaatctatgggggagttgttacaccgcggaaccgggaaaacccctggggtaccccacttaaattgccttgcaaaaaacccccttttcgccaggtgggttaatagcaaaaagg

SEQ ID NO: 17235 - DNA, 647 bp, Zea mays
  unsure (1)..(647): unsure at all n locations
  Clone ID: MRT4577_115713C.1
aattcggcacgaggcttgactgtgtgaatcaccaccattcgcagcggcgtggccgagccgaaggagacaggcgaatccgagtgacgggtgtgagtgtcgttggatgaggaccgagaggggcatctccagctgcgccgagcccagtcgagggagcaagacgccggaagcgacgcgccccgtactctgcatctctgccgccgccgctgctgctgcttgcttctacagtcccctggccccctgttgctgccctgctacgatggcgatgcaacacggccaccagtagcccctgctcgctcctgccgcagcacgcgacgggaaaggcccaaagggaggggaggcgagaaagaaaaacaaaagatgggatcttgaggaggaggtgctgggggtgggngaggcggcataatggcggccgcggtgtgctagcgggctaaagggggtgcactactgattgctgatgggttaaaggaggtgcaggtggtggtgagatggnaggtgnacgcgttcatgcccgcgcctagctagctagctagcttacctgtccacgcctctgtgctgtgtcctcttggctttctctttcccgctctcctcctcgcttgccccccgccagctctccagggagtggactagtgcagggagggagggaggga

SEQ ID NO: 17236 - DNA, 688 bp, Zea mays
  Clone ID: MRT4577_115714C.1
acctcgaggccggccggggacgttaggtaaaacaagtggactgagatacatacagataggtgggaaaatgctgtgcaacgccgcccgccgcctcgtttctcgcgccgtcgctccgcctcaccgggagccgcaaagatcgccacggatgaagttccctctgaggccgacgagcactccacgacatctaggcctagcaaagaggttgccccaacatcgaggcccgacgacacccctctccctcatgcaggcgcgcccgccacacgctagctaccatccctatcgcaagttaaccgtatatttactgccgtgcccctaccattgctagatctataagaaggggggttgcatgtcaatggcaccatttactactgtcccaatgatggtttcgccagagacatgttgtcacaattgtagagctccatgctgccgttctctctttatcatgaacgagactcatgctagctggtactgtgtgagcacagtgcttgctctagcccatgtaaactcacattgctaatattgtgccatgctgaatgtatcaactgcggatcagatcttactcagcgttggttcataaagtattctttgttcacactggcatgcctggttccgactctactgtacctgtagaaggatcaagtccatatcagattagatgttctcagtgtcctcaatgctgcattgaccg

SEQ ID NO: 17237 - DNA, 179 bp, Zea mays
  Clone ID: MRT4577_115715C.1
tacattttactcggcatgaaggacgaagggcggctacttgagctcgtgaaggatgatcaggcagatgggatctcgaattcattaccaattgacctggcggccaagattggcgatgcatcactcattactgaagcgactaaaaaggaggaggagcagcttgaaaacacacggatcaaggt

SEQ ID NO: 17238 - DNA, 890 bp, Zea mays
  Clone ID: MRT4577_115716C.1
gccggccggttcggggcttcttgtgagcacgggcgcgcacgtcctgattgcccctgctattggaccaaagatgggtcttaacttcagtgtactcaacacattcggagtcccagggctgaggggggcgactaccaagcaggtttatgagcggcatttcgcgaacaaggaaaccaaggagttcaaagatttccacattgcctacgtcgagttctgcaagtatttcaacacggtgatgcccggtcaggattttgacactccatctactacggtgattcagaaattctttgaagacgagtggaagccggagaagaacgaggaggagaggaagaggaagttcctggagttcatgaggaagaaggtgagggaggccaaggtggacgacagcttcttcatcgcggcggggctggcggtgccggtggcggccgtcatcggcaagagggccagcgggcagatcccctacgtgaagagcgtgaggctggacctggtccccaacgtcgtgttcgtgccgttcgtgacgctgctcggcatcatgggcgccaccgcgtggcagatgggcaacaagagcgctgtcgcccaggaggacgaggacgccaacgaggaggagaagaagaaggagacgatgaagcgcgcggcggggcagcagcagcaggaggagcaaaacaggtcgccttgattgatggcttgttcttcatgcatgcgtgcatgcatcgtctcttggttgatgaatgcgtgtgtactgtatgcatggatgactctggatcagtcactcgtttattcacccaataaccatgggattattatttgttcatcgatgaaacattttatggcgcataaacaataatctcatggatgcaaaattgtgaaaaaaaaaaaaaaaaaaaaaaaaaaaa

SEQ ID NO: 17239 - DNA, 130 bp, Zea mays
  Clone ID: MRT4577_115717C.1
gcggtttaattagcacaccctcctgtagatgactgttgtttgttggatcgacaacttggtatggcttgaataaggtgtgttatctgtacctgtatactttttttttatttaagaaaatgcaattgtgaac

SEQ ID NO: 17240 - DNA, 336 bp, Zea mays
  unsure (1)..(336): unsure at all n locations
  Clone ID: MRT4577_115718C.1
agcaatttcacacagaggagagccaccccggacgcgccaacgacccccaagggcgcgagacgaagcgacaggccgcgccaagngcgcacgcaggagcaaggaccccaacaccaacggggccggcaagggccgcacccaccacggaggacgaaaggccaccggggaacagccacacccacgacaaccccgaggccgccaagaagcccgagccgaaacaccgccacagcaggaacgggcgcgccaccaaggccgagaagccccgcaagcaaacgaagcagcggaagaacagggccaagaagacccgcggcgccaagaagaccaaagccggcgacgcca

SEQ ID NO: 17241 - DNA, 255 bp, Zea mays
  Clone ID: MRT4577_115719C.1
cattacttatgaggtttcaatccatgatttgtttgaattacatgactacaatccacagggaggcccatcataccgacataatgttcaagcagtcggaccaacgaaagctttaactcacattgaagaaaccgatacacacgctgttatccatgaatcccttcacatgatataatttttaagcttatacatatggtgattgaactgtttcaattatgctattacttgatctgttgacagcatttactgaaggtcttg

SEQ ID NO: 17242 - DNA, 395 bp, Zea mays
  Clone ID: MRT4577_11571C.1
tcgcgcgccagaatcggcactcatccgccgagcgaagagtcggcagaggcacatgcgcccaggcacgtaccgccttacgtactgctaacagtgcctcgcgcgtccacgcgagcgagtcatcaccgctgctagcaactcgtgcagagaccaagagtcgtctcgtcatcccccatccgagcgcaggcaggtcgaacaatcagagggtgctcataggcaacatcgaagaggagacaggcacatatggtgcaagcaacgatcgaagcacaagcaagcaacgatctatgcatcagacacatcgaggatcagactatcgatcaagaccatgagcacacaggtccatgaccatagaactgaccatgaccatcaatcagatcctgaggacctgcaccagcatg

SEQ ID NO: 17243 - DNA, 414 bp, Zea mays
  unsure (1)..(414): unsure at all n locations
  Clone ID: MRT4577_115720C.1
gccttgctatcatcaagggcatcctaactgatgttcttcaattaactcctagccaaattactgtcaagggtgcatatatatcaggactgagccanaaactncaacatccattaaatgtcancttgagtttatctgagggaccggataaaagacatgatgagttttatagtcttcttcatcagcttgactccatttacaattcactaattaattctcaatttaggctatctgcatcacagcatcccttttaacatttataacatgccaacacgcatcatcacaaacaacattcctctataaatggtgtaacaaataccattcatcctgtatactctaaagaagaattttttgttgatccgaaacttctttatcacattgataaggttgctttcatagcccatttcaataaatcaa

SEQ ID NO: 17244 - DNA, 290 bp, Zea mays
  Clone ID: MRT4577_115721C.1
aaaccacatagaactttcttctaattctacggtgacagcaaatttttttgaaatcaggcgtcaccatccttaaaacagttgagccacatgccgcactaccacacttggggaacattacacacaatcccttgccttacaaacagaattatttttttttggcaatatgcgggggatagtcatggacggagaaacgttttagcccaattttctttacgggagaaccttttatgctttaaaagccttttttgagggggtgggtttacccttttgccccatttttgactttttgg

SEQ ID NO: 17245 - DNA, 391 bp, Zea mays
  Clone ID: MRT4577_115722C.1
ttatcctcgtatagcggtccgctcttttttttctcttttcattttttttattttttttatttttttgggtattggggtttttgaaaccacaaaaggtgcccaaaacttggcatcttgttattacacccaggtattatcatcttgttaagtgctatcgcaatccaacttttccaaaacctccttcttgggttaatggaaattggcttgtggatttgtaactaaataacatgtttatctctatttaaatttatctatatactacacttggtggttggttgttgcgctaatgccgaatcggtcatttttaggcgcctgttccttaaaggctggtctttggcgcctttactaaattcttccatggataatcttttaaattgagaccagttctttt

SEQ ID NO: 17246 - DNA, 329 bp, Zea mays
  Clone ID: MRT4577_115723C.1
ttttcctggcccaaaatttaaccccttgaattccaaactttatttacaaaaagatgcccttacacggggttttgggctacataaacacaatgaaggttggtcaccgaaatacaatgcccaccactggggggcggcgaggctttttttttttaaaccaaaattaaaccggttttggggggaatcccttccatttttgacgcctcaaaaaaaaagcccaatggttgactatgcatccctagctttgaaagggctgccccttgcatgtacagggggaggggccccttaagatactgaccctttccttggatgggataacggagggggggggc

SEQ ID NO: 17247 - DNA, 284 bp, Zea mays
  Clone ID: MRT4577_115724C.1
aggcgggccctgttccccccgctggccaacctgcacacgtcgcgcgcgtcgcacaaggccgagctccggggcgtgtagtccgaggccgcgcggctctcggcgctcgtatcgtccgtggccgccgagcgggacaagctccggcgccagtgccactcgctcctgctcctcctgcacgaccaggcccaggcggcggcggcggctgtggcgcctgctccgagcctccacgctgcagcaagcgtcctgtcggcatgacggggatgatgctctgcctctgcctctgctac

SEQ ID NO: 17248 - DNA, 371 bp, Zea mays
  Clone ID: MRT4577_115725C.1
cggtttcgtgttcggacgcgtgggcggacgcgtgggcggacgcgtgggcggacgcgtgggcgagcacggaatggtggtcgcagccgcagagtcgcattgcacggtggagtggaggtgttctgcgcgccgtacccccgggttattaggttccgatcccatccccgtaccgtttttgctggcctctgtcgcggggtcgcatcgcatgccttcatgccttggctggcagcatttactatttatccgaggtgtgggtgggggcgttggcggtaaccggcaacactcgtctaccttacactttctctttgtgcgtgctctactctcctattctttctgaccccggtatctacaactgttggagtatgtcctggttg

SEQ ID NO: 17249 - DNA, 283 bp, Zea mays
  Clone ID: MRT4577_115726C.1
cacgcgtcaagccaagcgtcagggcgcgctccgtctgatctctcaccgcaggaatctcgaacctctctcacccatcaacatctacccccaaacctcaaccggcctagctccagcacttgtgcactaactatctccgtgcggttagccacgagcatcgatcctcattaatccatacatccgacgtctcacatctccaacttgcccacttatgatgtaatgtctgtccatgatgatgccatataggaatcgccattgggaacctctcagcgaatttacacgacat

SEQ ID NO: 17250 - DNA, 147 bp, Zea mays
  Clone ID: MRT4577_115727C.1
atccacactccctcaacctgaacttcaatgcgacgctctctttatcaccacactaagcgcgactactacttttattacgctcattgccaccgctatacttgccatctccctatctctcgctcctttcgctgtctttcctcccttaaa

SEQ ID NO: 17251 - DNA, 211 bp, Zea mays
  Clone ID: MRT4577_115728C.1
gtaactgttatttgtagagtagcctattagatacttgttgagcaattgcatgaacgtggatggaattagatggataaatggcagtacatagattgaggtaactgtacttaatttgattatttgtagtgtagctattagatagatatgttcataagattattcaaacgaacttgttgaacaatagcatgaacgtgaatggaattagatggat

SEQ ID NO: 17252 - DNA, 372 bp, Zea mays
  Clone ID: MRT4577_115729C.1
acagagtgctgcacggcgtattgcacggccagcgccctttttaggcccagtacctcgcacataaacattattttcaccagctagatgtccgtggcgtccagcgcgcgcctcatgcgccagagcctgtggtcgcgctcgcactcctacacccacgcgggggtctctgtgtggtattggaggaacacgcagagcgggtactacggctggtcgcagtacacaaccagatagatatgctacacctcatagattatatataataagatgcccagcatgcacggttggtttgatatggacccctcggttagtcagaaaccatgaattttgatgcgctccttcttcacaaagccggcctggaagaggaaattcaagacg

SEQ ID NO: 17253 - DNA, 1518 bp, Zea mays
  Clone ID: MRT4577_11572C.1
ccacgccgtggggtggacgcatccgagcccttctcgtcgttggagtttgccgcgtagtcgctcagctcgcccccatctcctcctctccccatggcagcttcccctggagccctccctgtgcgcgctcctctctccatggctgttgcatccctacttcctgttcccagcaccggatcccctcccccgcgcgtcctcttcttcgccatgcatccatggagtcgtcgaccgtctccccaaactgcaccgctgtccactcctacggcgaggtcgccttccctgctctagcgcgccagctccatctccctgacgacctctcatctcccagaccctctgctcaccagccatatcctccctagcgctcgcccctgccccagccatggacaccagcgcccctctgctccttctttccatggctgcgcacctctctgtagcaaccctcgccgtcggacatcctcttgtagccccgcgccatccgcacacgtatggtgtttgacaaaatgcccaagtggattgccgtgtcatggacagtcctattagcgtcgtcggatgtttgatgttttgcgcagcccatccgcgacaccagtgacggatctaggaatttatctcagggtatgccgaaccaataatttagtagcaccatatagaaataataaaatttgtctaactaaatagttacaaatatatataattggttccaatataataattttataatcatgataatatattaattcagttcaacatatgcataaatttcacttactcatgggagtatgtactagaagattacttatttttctttggcccgcggtttctaatggtaaaaaaagtcttgattacatcttcttcatccagttgaaagaaaacatctcgctcaatatatgtgagtagacaatcatccaaaaggctatcacccatcttatttctcaacttacttttgatgaatgtcatcgcagaaaatgccctatcaacacctgctgttgccacaggtagaagtaatactaatttgagaagcgtgtatactaagtcataaactttatgtctcttcgtttgaacaagcttcaatgagagatcaacaagattttctaggccttcaaataaaacatctttttttatgtcagcaataaagttacccaagtgcaattcaagctttagtaaatcggtaccaaatatgtcctttggataaaaatcagcaagtctgcgtaacttctgtgcatcaaaagaagcaaatgagtctttaggattgaatgccgacatacaagaaagtaactccatattaacctcatcaaagcgactgtcaagctcttgactaatttgatcaataaccccaatatatacttctcttctaaagtgatcatcatttgtttggtttttggcaaaccgagctgatcttccataaggcacataattattctccatgataggaacatggacataccaataatgttgacaacagttttgtagtgagatccccaacgagtctcgcctggcctaggcaatcccatctcttgatttaat

SEQ ID NO: 17254 - DNA, 420 bp, Zea mays
  Clone ID: MRT4577_115730C.1
ttttttttttttttttttttttttttttttgtttttttttttttttttttttgtttttttttttttttttaaaaagacccaaaaatgggtcggggaacaatccggccggggcaaaaaaaaaaaaaacgctgggcggcccctgaatcacaggggcagaaacagacaactcacaggctaacaacaaagcatcacagggcccatttggaaggggtcagctttgggaaaccaaagggggggaacagaagtcccgcccattacgggggccccggggggggaatacctttagatttccaaagcccctttttaaaggggggaccggaaacccataaggggggggacatatacaaccctggtggtgggggcctccggaacaaaagcaaggtgggtagagatagaagcaaactttgtttttctcccaac

SEQ ID NO: 17255 - DNA, 484 bp, Zea mays
  Clone ID: MRT4577_115731C.1
ggaaggacacgaggacgaggcgtacgtgggtgccgttctcactgtacgcctgggagaagtgagatccgacaccgggacgacgagacaaggctgacctacattctactttactcctcatactagacaccctctctacggaccccgacgcccggcgcataaccgaaggccatcggcagaggtgatcgtcgtccagcatgctaaatgccgctgacttctacaggaaaatacctaagggatgtgaccgacgcagcactatatggcgcatggatcattcattgtagcagcagtaccactggggttgttgctgggaatggagcagaacagatacttaacggtgaatactaccactgtcagtgagcgctgattggagcgcagacggggagaacgtacggacagagtccagagcgaaccttcctgcactctcatgagaatttgcatcagcagatggtagtgacgagcggagaacacacagatcggacatcac

SEQ ID NO: 17256 - DNA, 950 bp, Zea mays
  Clone ID: MRT4577_115732C.1
cggcctgtaaaattgaaactgatagatcaatgcatggtcaccaagctaccgttgatttcgatacagcggttggcaggtaccgagatatccagagagcaaaacaggggacgaatcaaaccacagcaaccaaacaataacgattaaagaatgcactactagttccagctacctgcaaggacaaaagcacaagtgcgaatcagtgtcaagaactcaagatcgaatccgaatgggagctatggaagtgcacagtcgttgatccggttacgcgtgggactgggctgcctagtacaggtcggcctccctgtgcgtctggatgacgcagtcagacgtcgggtacgcgacgcaggtgagcgcatacccggcaccgacctgcgcgtcgtccaggaacgactggtccgcctggtcgacggagccctccagcaccttgccggcgcacgtggagcacgcaccagcgcggcaggagtagggcaggtctataccggcctcctcggccgcgtccaggatgtagctgtcctctggcacttggatcacgctctcctgtccttcggggccgatgagcttcaccttgtagacggcggcgacgcgccagtctggcctcgctctgaagcacggcaacggcaatgttggcatgctccttgtcgttgggaagctcaggcgcagggacggctttctgctgttggtcagctgaggcgcgttcttctgttcgatggccatgaagttgcagaggagtggtgaggcgaaagttgccatcttggggtgttcgatacctcacacacgcaggttcgcgggcaatgggaccgattctccggtgcaggcgcgaggcggcgagggatgcgtgcggaagaaatggagaggtcacggcggcttgttgaattgggatgggatagggattagggtggaaattgaagcgcggaggccggctctatggctttccccggccggcctcgagg

SEQ ID NO: 17257 - DNA, 1064 bp, Zea mays
  Clone ID: MRT4577_115733C.1
gtacaacacattccggccttcccgcatcaatcaatatttagtattcgtcataagcaaaatgttgcacgacctcgaagagatgattgccaaaaaatcagagagacacaacaaaaaaacgagaatatagatttacctgtaacatatatgtatttggacattatctagacatacggggccctactgatattgggggccctgagcggtggcataccctgcacaccctcagggccggccctgggttgatccatgcacggggaccagcccgggctagtacaagtcttcctccctgtgcgtctggatgacgcagtcggacgtcgggtacgcgacgcaggtgagcgcgtacccggcaccgacctgcgcctcgtcgaggaacgactggtctgcctggtcgacggagccctccaggagcttgccggcgcacgtggagcacgcgccggcgcggcaggagtagggcaggtcgagaccggcctcctcggccgcgtccaggatgtagctgtcctctggcacgtcgagcacgctctcctgcccttcggggccgatgagcttcaccttgtagacagcggcgacgcgcaggtctagcctcgctctgaagctcggcgacgtcggcacgctccttgggaagcccaagtgaagcggccgttttgtgctgttgttcagcagaggggccttcttctgttcgatggtcctgaagctgcagagaactggggatgatgtgaaggttgccattgccatctttgggtgttcgatacctcgcaggcgcgcgggcactagggccagtctccggtgcaggcgaggcggcgagagatgggtgcggaagatttggaatggtcacgccggcttgggactacagtggaagccgctgacccgctgctgctgaagcgcggaggctggcagctggctctctcggcttttaaccgtagcggcgcatggcacccgtggccggtggcccaccgcccacgccaatcgccatacctgcctgccggttgccgcggcgagcggcgtgctctggacggcgcttccctcgtctggtccgctcgtgaaatcgtatcccggccggcctcgag

SEQ ID NO: 17258 - DNA, 477 bp, Zea mays
  unsure (1)..(477): unsure at all n locations
  Clone ID: MRT4577_115734C.1
aaattcggtgggggttttttttttttggggggccgggggggttttttttttttttttttttgtgggtttttttttcttttttttttttttgtggggggaaaaaacgccccccccccctccgggggggttataaaaaacaaaaaaacaaaaacccagggggtcttcccccttccccccccccggggggggggggggaacccttttttttttcccccccccncccaaccccccnccccccccccgctccccacaaaaaccccccccccccccccagcggcgaggcgagccccccccctcgcatcgccatggcactgccgggggaagcgccccccgcccttcggagcgccgagaggggccccaggacccaccaccggaacgacccggacccagtgcgccctcctgaacccaaacccagggaagggcccgctgcctagccggggcaagcggcgcccagcccgccggctctcagcctaccac

SEQ ID NO: 17259 - DNA, 286 bp, Zea mays
  Clone ID: MRT4577_115735C.1
ccacttgccagcaggaggagccgcttgcgggcctttcatgttgaggctgagcgccttggggctggttgcagagggttgcagcggatggtgcgggtgctgctgctgctgctgcatcgccaggaacggcggcactgcttggctggggtggtggaaggcctgctggttccctccaccgaacgggtgcggcggccggcgaagccatcatctggctgcccatctgccccgtcgccaccttcagccgctgcagctccgatttcagggcctcgttcagagctgcgacaggatc

SEQ ID NO: 17260 - DNA, 890 bp, Zea mays
  Clone ID: MRT4577_115736C.1
ggagaaaattcacatgctctcgcccgaggcccgcccggcggcaaattaaactcacgcacacacacaattaggtcacatacacacttcccggctgcctccctaggtagcagcttctacaatggaggcatccaacaagctcgcagtcttgctcctgtggctggtcatggcagctgccactgccgtgcacccttcctactctgagaattcgcctcaagactacctcactccccaaaacagcgcccgtgccgccgtcggtgttggcccggtgacctggagcacgaagctgcagcagttcgcagagaagtacgccgcacagagggccggcgactgccgtctccagcactcgggcgggccctacggggagaacatcttctgggggtccgccggcttcgattggaaggcggtggacgcagtgcgatcgtgggtagacgagaaacagtggtacaactacgccaccaacagctgcgccgccggcaaggtgtgtggccactacacgcaggtggtgtggcgcgccactacaagcatcggctgcgcgcgcgtcgtgtgccgcgacaaccgtggcgtctttatcatctgcaactacgagccccgcggcaacattgccgggatgaagccctactgatatattgtgcctgcgaacgatggcaactgatatattatatctagacacgagcttgttgcagcgcatgactttccacgtgatatatgaataatattttataaataaatcaaagaggtttgttatttacatctttgagtgtagtcataaataaatcaaagaggtttggttatttacgaaaaaaaaaaaaaaagctagtatccttctatcgtatgtgcaacttcgtcaacttcacggctcgtgaaaacccgatggttgacatatgtgaact

SEQ ID NO: 17261 - DNA, 305 bp, Zea mays
  Clone ID: MRT4577_115737C.1
tctgcgatcagcgctactgtgtctcgtactgctgaaggtcagtcatagcgacatcggaggacgcttcggtggtacctgactggatgttgcatgtgaacatcttaggcaactggtacggtcgggcgctgctgccagaaccgaacgtgaaggtgtgctgccgagccaaccgaagctacgccatagatctgacacgacagtaatgggttgctggcgcacggaaactcgcaagactagtaccagcactggatcaacgacatacgctggagcacgtgcataagcgaccatgaacgttaagcgacgatcgc

SEQ ID NO: 17262 - DNA, 400 bp, Zea mays
  unsure (1)..(400): unsure at all n locations
  Clone ID: MRT4577_115739C.1
gttgtggggcgtttttttggaatgagtacctcgcaggccggccgggggggcattcccaacatcagcaggtagcgcgctccttgaccccaacagagaaaggccggcggcgctaatcgaaatagccatgcgatccactgccggcgacgtggccgctgtggaggacgaggatgcctgcatgtacgcgatgcagctggcggcgtgatccatcctgcccatgacggttaaaaacgggatcnagcgtgtgaccgctggaggtggtgcagaaggaggaccggggcggggacgaggatgtcgcgaccgtacagggggaggaccggatgcccgagcgtggcacaaaagtagacggtgcggctcacatggcggacccaatgatccacctgctaagatgctggtatcaacg

SEQ ID NO: 17263 - DNA, 603 bp, Zea mays
  unsure (1)..(603): unsure at all n locations
  Clone ID: MRT4577_11573C.1
gcttccttagnanaagcagtggccatgtcccctgtcatttgagcaactccatagaaaacgtagcagtattttgagctacatcactaatttatgcttgtaaaatacctattggaagtaggggtgacaacaggtcgggtttggatcaggtagagtaaatactcgcccgcgatcatacccatggggattatccatatccgcccatgactatactcacgggtaaaattttgtacccgtgcccgtacccatcgggtatcgggtacccgtcgggtatagcagcttggtgcattcttcctaaatgaagtatagtgcagttctaagcgtcgcatatcgccatgatcaccagaggcacataatgttgttgcacatagcagtcgtgcagatatagccctagacgtgtgttgctaatgtttttttgggtaataaacttccaactcgtcaggatcgtatagtagctagtacaatcgtctggtttattaacactctcctagttcaagtacttgtactagctagcactggtactacgtactgtcactttatcaaacgtattggcactagtactaggaccagatcagaagcatcaacagacagggaggggatggtagt

SEQ ID NO: 17264 - DNA, 1064 bp, Zea mays
  Clone ID: MRT4577_115740C.1
atgattgataaacgcccaacgcttcaaccctgcttcgtttttctgcacgtggagcgtttggggcatgttttctggtagaggaatgtaccttgatactctctgcccgatcttatcttgtgtactgcctgttggggttgggccgtacgattttaggctattctcaacgggaatgaatttcgtttcactctttttaactctaccacattatcaaaagagctataaaactataaaggagaaaaaaaaaaaataacctaaaaaaaaagaaacttatttgtaaaacttttaaatttggccgggaaaaggccaggggttgtggcaggcggatgacctgatactcatctgcggcatgccgcacgcatgtccagcacgccgcggccaagacgagcagcaaagcaaaccgtatttgtcccgcggcggcctcttcgtcccgcaaggtcgccccacctagatccggccacgccgcacgttccccttttccgccgcagcgatggtgtacgtggattcctgggacgagttcgtggagcggtccgtgcagctcttccgcgccgaccccaacaccacccgctacgtgatgaagtatcggcactgcgaggggaagctcgtgctcaaggtcactgatgaccgcgagtgcttgaaattcaagacagatcaagctcaggacgcaaagaagatggagaagctcaacaacatcttttttgctctgatgactcgtgggcctgatgctgatatcagtgaagtttcagagaagggacaggccgagcaacagcaaccgaagaaaggtcggggaaggagacaatgatgccggtctgattcttatttctttcagaaaattcacaactggaatggtggattgacgtttcattgattattgttgtccgctctgtaatggtactcggaaggaagttttttcagtacagaaccgagaacaaactgaatgcacactatcatgaattcatgattgaaaaaaaaaaaaaaacagaatttcaaaaaaaaaaaaaaaaaaaaaaagaaaaaaaaaaaaaaaaaagcgcgggggcccttttttttatttattttaaaaacat

SEQ ID NO: 17265 - DNA, 871 bp, Zea mays
  unsure (1)..(871): unsure at all n locations
  Clone ID: MRT4577_115741C.1
gggtacctcgaggccggccgggaaaaattgaaacaccatatttctctagccggtctgttattcttccctgagaaactaaactccctcctctgttgactcctaacaccggtgcttctagaaccttctagtctcttcctctaacatctgattctcctgcttgctgccctctcctagattctatctcatatcgtgtcggatcatagttctcgtattattgtattggttcgagttgtgagttcaccctatagattgtgtgctgctaacagttggtatcagagatcaatcgatccttagtgttgcggaaccatgtcgaccgacatgaagtttctcctcgatgagatcggcaggcttttcgacgagcagaacgcgaagtgagatgcaaggttttctcggtgggatgccaagcgggaggcgcccaccggtgcggagcatgctgcgaagtccacctctacaccggtcaacgtgcaagaaaccttccacactttcggcacagctgttgcagttttgctacgacctcctttgcggctcatggcgtccccatggtcgagctgcccaccacctgtttgactccggtcctcaccgagtaggctatggtcgaggccgcgcaacgggtccccgacttcgcttgttgctgcgcttccaacaccatggtcggccgggcatgggcgatgggagggacctcgacggttggcgatggttgacgatgggcacgggcatggnttggcttcgttggcgagggaactccaggcagcagcagcngtgggcgggttgcgctggttgagaagccaagtggtcgtcatccaccgtggggcgcaagcgcaccgttggtagcggcggtggctgatctgggagatgcaggtggattcagtaa

SEQ ID NO: 17266 - DNA, 599 bp, Zea mays
  Clone ID: MRT4577_115742C.1
tatcctcgtttgcagacaagtctcctgcaagattctttccgagtgtgcgaaggacgagaagccgcatcgaatataggacaatgcctgtccatactccagatcgagttcacaagctattgatttccatgaaaaacgtcttcagaatggtgtggatcgtcacgagcgccggctgcaaattgcgctaacccatcgcaaggaagttaacctacaaagaggccgaggtcatcctcggcgacatcaaccggcactcctgctagaacataagagcgcctctcaacaagatcaaccatggccccgcgtcggctcacgcaatgcgcatcgaggtcaaggaacccgacaggatcctcgccaccgtatgaggaggcgaagaaggtcgaccagataagacgtcgacatcttatactagaacgcggatgtcatcaatgtctcctcaaccgcctgctccatcgacatgatgtatttcaggaacatcatgtgcgacaacgtatcagtccgtcatagtcagaatgaaccagatcggtgccgtgatgagcaacaactagagcggcggaggaatgcatcctgtgcactatcaagcccgtgagctcgatcgaggacgc

SEQ ID NO: 17267 - DNA, 548 bp, Zea mays
  Clone ID: MRT4577_115743C.1
ggccgcttttttttttttttttttttttttttttttttttttttttttttttttttttgtttttttttcttacaatacgacaacaacaacaaggccaagaataagggcggggaccccaacgcccgcccccggtcctgatttttctcgtccttttacacgaacaccaggacgggggcacgggggcagcaacagaacctcttatacccaaactgaaactgagggaccctggcaccgcccccccccccccagtgttattggaagaaacccggccgaaccacctgctggacgctgaaacaaaaagaggaagaggcaagcccattaacaagccctggtggcggcgaaaaaatacaaaaccgggggggagttcttggagcgctggcacagggcccccgagcaggtgaagggcaggcaccgaagaggagatgaattcaacctggacggtcggaagcacaccaacacgcccccgggggttggctccaacaaaaccggtttctgttaaaagacaaggcaagaacccccccgccgccaagaaaaaaggtctcccccca

SEQ ID NO: 17268 - DNA, 190 bp, Zea mays
  unsure (1)..(190): unsure at all n locations
  Clone ID: MRT4577_115744C.1
ctagctccatccaagctttctccatctagtagttccgatggccgcagncatagacatgtacacgtactgcagtaccagcgtacaccttatcgcctcctcgtcctcctcggatcaggagctcgcgaaataacgccagctttttataacgagtgcttccttccccgactgccgctactcgttggcgcgagtt

SEQ ID NO: 17269 - DNA, 655 bp, Zea mays
  Clone ID: MRT4577_115745C.1
atacccacgcgtccgattaattcacaaaagctgagaagacggggggtcacacatcatacttcttttgccattgcaatggaaaacaactacgcgtgcccaccacccagcaagggaaacctgatcacagtcttgagcatcgatggtggtggggtcaagggtgtcatccctgctaccttccttgcattccttgagtctaaacttcaggccgttctgtgagcaactcttggtataattggttgcaatggcgatatcacaagctcttcatggatatgtgacgatggttcgggttacaggtctctccgttactcatcaagaagttttcacacgaagagcaagcaaatttagtatggcagttcttatgtagcatccctgtaaacatgatggcaaaatttcttccatggatttctgcttctgtttctacagatgagaatcaagatattcttgactgcctaagtaaaatagttcctgaagaaaaactcctccaagaggttgttttcacgtggtttggagggaaatcagaaagcagttctacatgtgagtctagctctggtcaatgtgacgttttttgctacagtggtattatggtgaaacagagttttgtgtgtatgtaccaacagctaaaatgtaaatactgttatatcatagctgaggtaca

SEQ ID NO: 17270 - DNA, 230 bp, Zea mays
  Clone ID: MRT4577_115746C.1
aaaccaaagggcaagaattgccaggtttacatacacggagtcaccctcgaaattgaacaaaaatggactaagaaagcatttcggacaaatatatttggaaacaaaagctccccagcatggtaccataaacgacccactatctttcgttggggagagggcataagactgacggtcggtggaaaggaactacctgggtgtcacccacccacccaacgtatattgctgctgct

SEQ ID NO: 17271 - DNA, 574 bp, Zea mays
  Clone ID: MRT4577_115747C.1
ccggccgggacactttgaatcctcaacaccgccagtttctatctagtctactacagcacaccctcttctatcttctttcaaccaaactaaatcacaaacatgggtaacggtgccaaggctcaacagaagcgcgagcgcgctgctaaggacaagaacactgccaagtctcagctcaaggtgaacgaaaaggcttgcgacattcagtgccagatctgcaaatctaccttcctcaagaccacaaaggcccctgctctgaaagagcacgccgagaacaagcacagcaagaccattgccgactgcttccctacctaccaggagtaaatcgaccacgctggagagccgctttgacctgagacaatgataacgagaaaaggaaccgggataaagaggaagagagaagaaaaagaaaagtgaaaatggaaagcatttagcgaagcgaggcgtactgtggcgtgatggccctgcacgagaacatggggagatgagacaagtttagatgactggcagggactcatgataactttatacagttctttttttacacaaagaaagaaaaaaaaaaaaacccgcggcc

SEQ ID NO: 17272 - DNA, 310 bp, Zea mays
  Clone ID: MRT4577_115748C.1
caactggcttggactgggcggggtgtctgaccaaatacaaggaataaccaggcatgggtacgggatctaagtaaataaaccattacaacttggctcatacaaaaaagggtgcccttttaatctcccacgctttaatcttaatttacgaacccgctgacccgccccgaattagtggatcgccaagccttggattccttgtgcccccttttcggggactttgttagcttggattggggtgatagctttggcaatggttcccctccaagcttcgagctttgggcgcaaagcatgccaatgtttcatcccaaag

SEQ ID NO: 17273 - DNA, 361 bp, Zea mays
  Clone ID: MRT4577_115749C.1
tcgtccacgcgtccggccggaccgtcacgtgtacttcaggggccgatcttacgctgacatccctgaccgagggtctcacagcgtggacctgccccggtacgcggtcgacggcgctgggtggcgtgcacagagatagcacccgggctgatatgaatgcgggaggagcagatgggggaagcttgggggagccatggcggtagcggtgggagccacaagagcgggagccccaggggcggaggaggcggaggcagccgcagggagcatgacaggaacctgcccataggcaacatgaggcgcatcatgaagaaggccatgccgtataacggcacgatcgcctaggacgctaaggagaccgtgctag

SEQ ID NO: 17274 - DNA, 3068 bp, Zea mays
  Clone ID: MRT4577_11574C.1
ggtaccctcgcggtcctgtgccgggaaaaaaaaaaaaaaaaaagctttttaaggacaaaccaaatccgctgcccctgccctgcatcgcagttcgctgcaacttttgctcacaggacacaggcacagcttgatgagcagcggccaaaacagaaagagcgattcgatcgtttcctgctccactaccactagctagtctgccgccgtccgccgtgccgcgcgagctccgactgccggcgccggaggcaggggaggaaggtgctgctgctccccctgccgcccgcgtcctgtgactgagatccatccagctcggaggaggaggaagaggagtcgctcctggtcctggcttctagacgttgtgacccagatcttgacgcagctgcccaagtagtttactcatctagaggagaggaggggttggatcctcgacccgatttggtgggggcttcgccactgggatagggggacagtttggcctgctggatctttatcgccagttgttggttctgtcctttccattgggctggtactttcttgacggattggttaagcgctgtctgtggggttgttgtgctgctcctcccttcatctcgttttgtggtgattggtggggggaggaggaagagctaggaggattctctctcttgttcttgggtcagttcttggcacggcaggatgaagtatatgaagcttggatcaaagccggatgtccttcagacggaggggagcaatatcaggtttgtcgcgacagatttggcaacagacgttgttatattgattggggatgtcaagttttaccttcacaagttccctcttctatcaaagagttcacgcctgcaaagaagttgcttcaatcaatgaggagaaaaatgacgaagtggatatctctgacatccctggtgggccttcagcatttgaaatatgtgctaagttctgctatggcatgattgtgacactcaatgcgtataatgtcctcgccgcccggtgcgcagccgagtacctagagatgttcgagaccattgacaaaggaaacctcatatacaagatcgatgtgtttctgacatcaagtgtgttccgcacctggaaggactcgatcatagttctacagagcacaaggtcactggtaccttggtgtgaggatttgaaagtgatcagccactgcatcactctatcgcgtcgaaggcgtcaattgatccatcagaggttgaatggtcatacacttacaacagaaagaaactcccgtctgagaacggtatcgattcgcattggaatggtgtcaggatgcaacctatggtccctactgactggtgggtagaggacctctgtgagcttgaagtggactcgtacaagcgggtgatcatgagcatcaaggcaaagggaagcacgccagctgttgtcgtcggagaagcattgagggcctacgcgtaccgacggctgcttggctccctggaagacgctgtgagcaatggagttgattgcgcaaagcctcgtgcagttcttgatgctattgtatctctcttgcccgctgaggaaggctcggtgtcatgtggttttcttcttaagctgctgggagctgcatgtttgcttgaatctggggagtcccatcgcgttaacttgatcaagagaataggcacgcagttggatggtgcttcagttccagaccttcttataccgctaaatactaatgaagacaatatatccagcatagatctgatcatggcaatagtggaagagttcatgtcacggaatggtgatagtggtacggagaaatttcaagacgatgaaggaatcgtggacatcgagaaggcgacatctgtttccagcgcgtcaaagcttgcagttgcaaagctgatcgatggatatcttgccgagatcgccaaagatcccaaccttcctcttccaaagttgatcgcactcgccgaaatggtgtcttctctaccccggccaacgcatgacgggctctatcgtgccattgacatgtatctgaaggtatctctctgtgtctccaccgagtgctcccgttgtagggcgtttgaatatacttaataacagtgccttccatgctgacacaggagcaccccagcctatcaaagagcgagaagaagaaactgtgcgggctgatggactgcaagcagctgtcgcaggacgcgtgcatgcacgccgtgcagaacgagcgtctccccctacgcgtggtcgtgcaggttctcttcttcgagcaagtccgggcatcgtcggttgcttctgcaaggagcgacgctaattcgacgtcggggctcccgtctgccgttcgctcgcttcttcccagagagaacggcaactccattggcagctccaggtcagccgcgacgacgatgacgacggaggaagaggagagtggggtcccgacgtcgagcgacatcaactctctgaggtcgatgaggctggccaacaacagcggtgggagcgagaggagcagcggcagcagtgacgtgaacaacaagagcagcgacgacaggagcgccgccgcggcggggaaggcgaaggggacgatgctgatgccgaagaagatgctgagcaagctctggtccgggaaaacgaacgccggcgagagcagcagctcggacacgtcggatagccctgggtccgccaacccggaggaggcgaagtccacgcagtcgcggatcacatggcgctcggtatcctagtcgcgcgcgcgcggcgggggttcagcggggtcacaagctcacagccttagttttgttcttggtcttgattttgccttcgcctagcgagtacagcagtagcgatctcataacatatggagttactgctactggtttcacttgtcatgtcgccgatgacgttttctttttggcatgggattgcttgtagctggagtggagtaggtttggtcattggtgatgtttccagcgaagttccatgggatatttattatgtgacctttttttcatggtaggaatacaaagaaagtagtacagtccgttataattgatgtattttttgcaggcaaaaataatcatagtgttttagtttgcttcttactgcgaaaaaaaaaaaaaaaaaagcggccc

SEQ ID NO: 17275 - DNA, 417 bp, Zea mays
  Clone ID: MRT4577_115750C.1
accggttggtcgtgtggagactggcgtcatcaagcctggtatggttgtcacctttggtccaactggcctgactaccgatgcgatgtctgctgacatgcaccacgaggcgcttgaggaggcgtctccagggtgacaatgttggcttaaacgtgaggaacggtgtcgtcaaggatctgatgcgtgggttggtggtctccatctacaaggatgaccctgccaaggaggctgccagcttcacctcgcaggtcatcatcatgaaccaccctgggcacattgggaacgtgtatgccccagggctggactgccacacctcccacattgttgtgaaatttgctgagctcattaccaagatagacaggcggtctggcacggagcttgcgaaggagtcaaagcttctgaacaacgttgatgctgata

SEQ ID NO: 17276 - DNA, 285 bp, Zea mays
  Clone ID: MRT4577_115751C.1
gtagaagggaactattgaccaaccaatgctggctgtggaactgggcaggcatggcgccagagagctttgcagctccatctggtcgctgttttagagcatctgactagctgttagcgctttccctagtttctctctctccatctctatctataaacttgttccccgttacattttccttatatcccgaagaccctgatgccagagtatagatacaccaaacacctggtgtctgacaatgtaacttctcgtcataccccttacaaagtgactattacagctcttttc

SEQ ID NO: 17277 - DNA, 272 bp, Zea mays
  Clone ID: MRT4577_115752C.1
gtcgtttatacatccatcccaacggggacactggaacattatagttttcttcaaatagaaagaggacgagatccatgaatcccaatctatgctcccacacaaaggatgcctactacattaatagatcgggatgcgtgacccagctagcacaagcaacaacgcgagctgtctaactactctgatcagtcacaccagatccagtgcgagcgaaccagatgctctatcgtcgctggcgtacaagaataactaaccctggacgcctagacgctaga

SEQ ID NO: 17278 - DNA, 182 bp, Zea mays
  Clone ID: MRT4577_115753C.1
tagctcactttactttttcccgcccttttcttttttttttggggattttacaaaacactccggggggggggtacatccgggggaggttacacggagccgttctagaccttatcttattccgctaccaagacgcctatttgatcatcttagataggttgaaacagggggcccactgatacctg

SEQ ID NO: 17279 - DNA, 351 bp, Zea mays
  Clone ID: MRT4577_115754C.1
taccgtcaccttccccccgtcctaagcttggatcctttaaaaccggcccccctttttttttttttcttttctttttttttttttttttttttttttctattattttttttttatttttttttttcggaaaaataacctttgtttttttgggaggccctttccttgggaccaaaaatttcctttttgtgaagaacacctattagccttccttaaaaagggcgcccccccaaacaatcgtttttttaaaaaggttaaagcctttttcaaacacctttgagaaacggccagcaattgtggcatgttaaaaaggttttgggggcttgccccaacctgctgttaaaacccatataa

SEQ ID NO: 17280 - DNA, 530 bp, Zea mays
  Clone ID: MRT4577_115755C.1
actctcgtgcaacggatatctcggctctcgcatcgatgaagaacgtagcaaaatgcgatacccggtgtgaattgcagaatcccgcgaaccatcgagtttttgaacgcaagttgcgcccgaagccttctggcggatgtgacgtgtgtctgggagttctgcacaaagcgactccaggagttcaatatcagctgttgacaggaccacctacccacaaattagagaactagttgcatgaagataatcaagcaatggcttcctacaaatctggacaaattgcatctttcacttagtatcctgcaattatcgctgatggccccgcccatgcgtcaaacctctgctctctccgctggacgatcctatattacttcaactgggccgacttcatttcaaagggctgggtcttctaccatctccgctaaattaacttcaaacattagcccgacctggtcaagcttccgcagcttcactttctccaaaaccgatatttggtactttattggaaatcacaaaaatgtgttgtgccaaaacct

SEQ ID NO: 17281 - DNA, 179 bp, Zea mays
  Clone ID: MRT4577_115756C.1
tgcaggcccgcctgcgtgagctcggaattcggctcgagctggctgctcatgcttgtttctccccaccaccgctgggtcctgcgggaccgatttcctagacggatcgtcgcgtacaatgcccccacccccgtgagggacgggggcgctgccgccgtggtgtggtttaagcatgatctgcg

SEQ ID NO: 17282 - DNA, 539 bp, Zea mays
  unsure (1)..(539): unsure at all n locations
  Clone ID: MRT4577_115757C.1
tntttttttttttttttttttttttttttttttttttttttttttttttttttttttttttttttttttttttttttttttttttaaaaaaaaacaaccttttttttttttaaaaaaaatcctgggggatacaaaccgccgggggcgggcggccatttttaccctactaactactagtaccttggggggtcacatgaaacgaaagaatccccctcaaattaaattacaggggaacaaaaaggggggggggggggaaaaaaaaacgggcgccgggggccacttttgggtggagctgcatcgccgtaaagggttcgggactggttgggggatacggacggatcatgtgggcctgcccccactactggagttggaggcgggggggggtaccggatggttgttgtttttgttgcccccgccgccgccgccgcccccgagcttccgggtgatgctggggatccccgggttggagcccaggtaccccaaaaggctgttgggggggaaccgcaacggggggggggcccttttccggggccccgcgt

SEQ ID NO: 17283 - DNA, 625 bp, Zea mays
  unsure (1)..(625): unsure at all n locations
  Clone ID: MRT4577_115758C.1
ctctctcctcccgagcaggaggcggacaaggtaagcagcaatcgcaggaaccctagcgccgccgcacccgcaggaatgggtatcgacctcgtcgccggtgggaggaataagaagaccaagcgcactgcgcccaagtctgacgatgtctacctcaagctcctcgtcaagctctaccgtttcttggtcaggaggaccaagagcaatttcaacgctggggttctcatgaggcttttcatgtacttaagctccttaacatgtatctgcaccggccggagaaaaggggcaaacccagtgccggaggcacccacatgagtgaggtctagggaagggataaaccgaggaaagccttcccctcacaaatgcagagagactgcttcgaccccgtggcctggtgacttattgagacagctctcaccactgcattagacctgctcttccgatttgatctattgcaatttccatgtattctctcttttctcaacaatataatgtttagcaatttgggccatcgatgtttagaaattttggtcactttaagtagggggggggtggtgttgnnactcaactattattttaattatactgcgtgttgttctgtaaaaaaaaaaaaaaaaaacccgcggcc

SEQ ID NO: 17284 - DNA, 441 bp, Zea mays
  Clone ID: MRT4577_115759C.1
atggccgacgatgttggcctctgtcaggccctggagtatggactcctccccgaaaccaagatccacgacgaaaggcatcatcttccagtcgccccgcgccgcgacgcggtgctgtttcctgatgtcgcaggccacgaagaaggtgatggtcgtggcgatgaggaggagcgtggcgccagcgacgaggaggcccgtgcggagcgcatgcgagacgcctccggaatagcctctatcttgcgaccccggatccccggatccaaggatagtgcggagacgacgggagtaggggaaggggcgcctttgcgagacgacgggcccttgcgcggagacgacgggcgcttgcgagacgacgttggcaggggaaggggcgtcgaggacttgcgcgtaggagggcaaggatggcgggggcgggtgggggcaaggatgccggagagcggatga

SEQ ID NO: 17285 - DNA, 312 bp, Zea mays
  Clone ID: MRT4577_11575C.1
gatcgagggactggtttccttagcgcaagacccggaaaaaggattacactccggtagatacgaatcggggatgaacacagttaacagttggcccaacaacacaaagggaatggctgggggttactagccggctactgacatacttaactcgcatgactaggtggccaaggaccctattaaaagaaacgactcatcacttgggtccaagaatgggaggaaccgcatgccagcactgaccaagctctggcttgaaactatctgtacttgaaggtcaaagtataggtcacgtgcgccgggattattccccacatg

SEQ ID NO: 17286 - DNA, 992 bp, Zea mays
  Clone ID: MRT4577_115760C.1
ttaactgattgaggtactgaagaaagaaaatggtaattatattgttgcaccttatgaagcagatgcgcaaatgacattcttatctgttaataaacttgttgatgctgtgatcactgaggattcagatttgataccatttggttgttctagaattattttcaaaatggacaaatttgggcaaggtgttgaatttcagattacacgcctagagcgaaatagagagcttgactttaatggattcacaagacagatgttacttgagatgtgtattttaagtggctgtgactatctcccctcattgccaggaatgggcgttaaacgagctcatgcactcatccaaaagctgaagtgtcacgaaaaggtgatcaagcacctgaggtatggtgctgtttctgttccacctcaatatgaagaggacttcaagaaagcaatctgggcatttaagttccaaagggtctacgatcctgctacagaagatattatccatttgtcaagtgtgcctcaaagcctcattgaagatttggaatttttaggcccatggttaccacagaatattgccaaaggcattgctctagggaacattgatccactcacgaaggaaccattcgagatcaatccagagtgcagtgcaccttctgttcataaggtttgtccaaccagagagcctattgcaccttcaaatgggaggaagaaactagatttgcctgtgcagaaaaatatattgaccaactatttctgcttagcatcccttgaggcaaaacggaaatttagggcgcctaaagtaacacataagcaacaaatattgaatgaagctttgcctagccctcaagctcaaggctctgctacctctgattcagttgaagatactaggttgccaacagatcgcattcaagcttctcaatgtagttctgagcatttaagctctgaacctcctcaaaatgacccaatcagcgttggctctcagtgtagttctgagcgtttcagctgtgagt

SEQ ID NO: 17287 - DNA, 2048 bp, Zea mays
  unsure (1)..(2048): unsure at all n locations
  Clone ID: MRT4577_115761C.1
ctcgaggccggccgggctctttacgccctcacccctcgcgagctctccacccctccacacgaccctcctcggcggcggcggcggcgatgcagatggcggcgaccaccaccgagtcccaggcggccgtgccgcttcaacaccctcacgcccacccccacgcgcccccgcagtatgctcacccgcactactacatgccgctttttttttttttttttttgttttaagataacataaattcaacttgaatctaagaataaaacaggggtgatttgattcagatgatcaaactggcacaccggaacaatgcaattattgactgcattttactttagggaagttccagagacaagtcagctaccccatagcaatcacttaaaggacaagtaattagcccagcgacagctcccaccaaactcaatgcttcacccgttcttgcttgcacatttgtaagtttctctagccaagcgtcaaacaatgatacaacacctcacttacaaaacatgacctttaacgctaccactatatgagcgagaacgaggaggcaggagaaatatatagtgagaggaatcaataccaccatactgtgacgttctctcctcctctgatgagaaagagatgatgagggagggcgatgcatgtgttacgcttctaagaagcaagctccatggcctggtcgagaggaaccgtgctctggaagaggagaacaagcaactgagacaccaagtgagccgactaaaaggtcagatctcttctctcgaaggccaggacactgacaagaggatgctatggaagaagctgctggagagttctgcgaccagcatcagctactccaaggagaagcagtttgtccaaagcaacgatgacgcgaaggaagccacggatctcagcagctcactgtgtcacagaaggcagcagcagttctccagggtagcactcgtgagatcaagggcgccaagggttccgaatccaccgcccaatccgacatgcacccagccaaagacaaccgtccgaaaggaaggatgcatggcccctcctcctcctccaccacctccgctaccttccaagttgcagaggagcgcaaaggcgatacaaagggtgcccgaggtagtcgagctgtaccggtcgttggtgcggcctgaaggcaaaaacgatgcgaagtctggatccgtaggaattccagcagcgacgagcagcagagagatgattggggaaattgagaacagatcagcttatgttttagctattaaatcagacgtagaaaatcaaggcaactttgtgaacttcctcgcaagcgaagttcaaaatgcagcgtacagagagatagctgacgttgaagagtttgtcaagtggcttgacggggaactgtcataccttgtggacgagagagcggtgctcaagcacttccccaactggcccgagaagaaagcagacgccatgagagaagcagcgttcaactaccgagatctgaagaacctggagtcagaagcgtcatccttccacgacgacaggagggtggctacgccgatggctctcaagcgcatgcaagccttgcaggacaaaattgaacaaggtatccataacactgaacgagtaagggacagtgcaggcggaaggtacaaggatcttaagataccatgggaatggatgctcgactctggagtcataagccaactgaagatggcttccttgaagcttgcaaaggagtacatgaaccgcatcgcgagcactctgaagtcagatccatttgcgaacgacgaggagctacttctgcaaggcgtccgctttgccttccgcgtacaccagcttgctggtggctttgacgaaggatgcagaaaggcgtttcaagagctaaaaacttacgcaagcaagtctgagtgatccgaatccacgcgcgttcaaaataaaagctgggatcacgcatagataaatgtgaaacacatagattattaagttttgccgaggataatgctgcatttttttataaagcttaatttattttgggcatcaaaaaaaaaaaaaaaaagncgggcgcggccgcgtatcgagcc

SEQ ID NO: 17288 - DNA, 228 bp, Zea mays
  Clone ID: MRT4577_115762C.1
gggcgacaaacccattcatgttttggaaatttagcaaacataatttggtccctgaaactattccaagggggggcctgatttcccacccgtggggaaaaacaccccccccccccccttgaaaatggttcaaatttgcgcgcgacaccaacaagcctgaaatcactgtttttttattctaccagagatcttaagaacagcatgacattttacaaataggtgtatgacaaa

SEQ ID NO: 17289 - DNA, 202 bp, Zea mays
  unsure (1)..(202): unsure at all n locations
  Clone ID: MRT4577_115763C.1
aaaatcattcattgtttgaaaaagtggcaacctttgccttattcgcacttaaagcgaaaaccactaactttaaaaaaaaacacaaccattgtgggagaccaagaagcaccatttaacccttaggatcaacttacaagaaagtattgtaggantaacatcatccatcgatccacaatccatgctacctaattcattggtccaa

SEQ ID NO: 17290 - DNA, 1217 bp, Zea mays
  Clone ID: MRT4577_115764C.1
aaaaaaaaaaaaaaaaaaaaaaaaaaaaaaaaaaaaaaaaaaaaaaaaaaaaaaaagagcagaaaaagtagagtagactacgacagcgtccggcgacggaggcggaggcgaagatgaggaagaagctcggcacccggttccccgcggctcgaatcaaaaagataatgcaagcagatgaggatgttggaaagattgcactagcagttcctgttttagtttcgaggtctcttgaattgtttttacaagatttaattgaccgtacttatgaaattactcttcaaagtggagcaaagacactgaattccttccacctgaagcaatgtgtgaagaggtacagttcttttgatttcctaactgaagttgtcagcaaggtaccagatcttggtggcgctgattcctgtggagatgaaagaggattacctagaagaaggtaaggtcatttgtaatcaacattttatgattcaattgtctcacgtatctgaaattcactttttcagaaagtcaaatggcagtgacccagagaatgatgaatcaagatctagtaaaatggccataagaaatgcaaacatcagccccagaggacgtgggaggggtcgaggcagaggacgaggtcggccaccaaccaagagaaaggaggttggttatgtacaatttgaagatgagagcagcatgtttgctgaacaaggtgagcccttgccaggagaggaaacagttcaagagatcaatggcaacgagaccatgcctcaaagcacgcaacctccagtagaggctccgccaacagcccttgcacaagctacaacaagttctaaggcggaagaagcgaacagtgatcatcagtcagattggcctatgccagatgccattggaagcatcggtgtcgtgccatctggttttggacatctgacagtgcaggttgaagatgaggactacgacaatgaggattagtcagggtcatcttctcattgtatgcactaacaggactgttctggtgttgtaaaatgtaaatatagtttgaaatagttgccgcagtttacctgtgattgtctgtcgttttatgcggttatgtagtcctgtgtaactttcgttctccaataattgcttggtagttgcttttttacatgattcaagtgttttgtgacatttaacacagtatttgagcagggattgcctattttaagtatttttgactttattcaactagtatttgagcagtcctg

SEQ ID NO: 17291 - DNA, 462 bp, Zea mays
  Clone ID: MRT4577_115765C.1
tacagccaccccacactccggcggtctgtgtcacgaccggtcaaaaacctcgccgccgccggtctcctagtcccttgccttccatcccccgatgcgacgaaccgcccctctcggaccacccgcaccgtcttgaaccctaaaccaccaggcagcaggatccgccagaaaggctggaccagttacccccatgcggcacggcgcaggaaagaacagagaggatgatggaagcgaaggtggagaggatggaaatggcgctggcgccgacgctgccgtccaagaaggtgcagacggcggacaagaatcccaaggcccagtcccggacccgccaggggaagcacctgcgccacctgctccagcccgctgacgcatcctccatgcccccggaccgccccaaatatatgaaaatccaagcgcccccatgcattcccccaccaaagtagatactgtgacttaacaggtagg

SEQ ID NO: 17292 - DNA, 1167 bp, Zea mays
  Clone ID: MRT4577_115766C.1
ctggccgggctcctgcctttgcgtgcgtttggaacgtggaagaataacgacaacgcctaataacgagaaaagaaaacccaagacttcgtcgtcaccaaaaaaaaaaaaagcagcaaaaaacagagagtagtagactacgacagcgtccgtcgaaccggagggtcggaggcgaagatgaggaagaagctcggcacccggttccccgcggctcgaatcaaaaagataatgcaagcagatgaggatgttggaaagattgcattagcggtgcctgttttagtctcgagggctcttgaattgtttttacaagatttaattgaccggacttatgaaattactcttcaaagcggagcaaagacactgaattccttccacctgaagcaatgtgtgaagaggtacagttcttttgatttcctaactgaagttgtcagcaaggtaccagatcttggtggtgctgattcatgtggagatgaaagagtgttacctagaagaagaaagtcaaatggcagtgacccagagaatgatgaatcaagatctagtaaaatggccataagaaatgcaaataccagccccagaggacgtgggaggggtcgaggcagagggcgaggtcggccaccaaccaagagaaaggaagttggttacgtacaatttgaagatgagagcagcatgtttgctgaacaaggtgaaaccttaccaggagagggaacagttccagagatcaacagcggcaacgagattacgcctcaaagcacgcaacctccgccaacagcccctgcgcaagctacaaattctaaggtggaagaagcaagcaccgatcatcagtcagattggcctatgccagatgccactggaaacatcggtgttgggccatctggttttggacatctgacagtgcaggttgatgaagatgaggactacgacaatgaggactagtcagggccatcctctcactgtatgcgctaacaggactgttctggtgttgtaaaatgtaaatatagcttgaagtagctgccgcagcttagctatgattgtctgttatgaggttatgtagttgccctgtgtaacttctgtaattgctttttagttgccttttctctacatgattgactgtcaaagcgttttgtcaaaaaaaaaaaaaaaaaagggcgcccgctctagaggaatcccagc

SEQ ID NO: 17293 - DNA, 862 bp, Zea mays
  Clone ID: MRT4577_115767C.1
cggacgcgtgggggttggggaccttgaactgttcaggactgtcgctgacaaatttgcaagcacattcagcgcagacaggactcgcaacttgattgtgaggctacgccacaatgtcattcgaactggactgcgcaacatcagtatttcttactcaaggatctcccttgctgacattgctaagaagctaagactagactctgagaaccctgttgctgatgcggagagcattgtagccaaggccataagagatggcgcaattgacgccaccatagatcatgcaaatggctggatggtatcgaaggaaactggtgatgtgtactctacaaatgagccacaaattgcattcaactccaggattgcgttctgcctcaacatgcacaatgaggcggtcaaggcgatgagattcccccctaattctcataaggaaaaggagagcgctgagaagcgccgagagaggcttcaacaggaggaagaactggctaagcacatggctgaggaggaggatgacgacttctaaattagctgccttttgagcaaccacttgcaattgtggacttgttcgaacgcctggttaaaccctgcctctagctactcgagtcatgcaaaaacactgaactttgaaattcatccactgtaatgttttgttgatcaggggtttctttaaattcaatacttgagttttaatctccctaaattgttaaaccacggaatttacccaccatgcaaacggctttgtttatttcatgcattctctcctcccacttggggcttttctgaaatgctgtattctttcctttccgtgtcttaatttaataaaattattattggttaaagtttgattataaagtaattgatattgtat

SEQ ID NO: 17294 - DNA, 357 bp, Zea mays
  Clone ID: MRT4577_115768C.1
ggggggggggggggggggggggggggggggggggccggggggcagtacgaagttgacaaatagaatagggttagttagtattacttaaactcaatccggtatactatatatcatatcaatagtaatgacacaatacaaacgacctgcgctttgccgactaaaacaagctggtaccctaagtagctgtcatatcatcatatatatcgagagagagcgtaatgtcgcaccctccctttggccgccagtctggtacgtacgctctagtgtttggttgtatagtgggcaacgaccccgctgttacccttggtggtctccccagttctggtcttcctgtcgaggttactaagggtgtaacaa

SEQ ID NO: 17295 - DNA, 202 bp, Zea mays
  unsure (1)..(202): unsure at all n locations
  Clone ID: MRT4577_115769C.1
cgcgtagagagtcgggcgcagagaantccaagcaaacaaacaggtagagggagaggagaggagaggagaggagaggttgggtctgtcactccatggctccgatgnntctgtncggggcgctgttgtcgtggtccgtgtcgcgtttcgtttcggtgctgttggcggctgggttggcctgcgttttttgtgttgtcttgttctt

SEQ ID NO: 17296 - DNA, 365 bp, Zea mays
  Clone ID: MRT4577_11576C.1
ggcacgaggtgctcacaggacacaggcacagctttgatgagcagcggccaaaacagaaagagcgattcgatcgtttcctgctccactaccactagctagtctgccgccgtccgccgtgccgcgcgagctccgactgccggtgccggaggcaggggaggaaggtgctgctgctccccctgccagccgcgtcctgtgactgagatccatccagctcggaggaggaggaagaggagtcgctcctggtcctggcttctaaacgttgcgacccaaatcttgacgcagctgcccaagtaggttactcatctagaggagagaggggttaggatccttgacccgatttggtgggggctttgccactgggatag

SEQ ID NO: 17297 - DNA, 732 bp, Zea mays
  Clone ID: MRT4577_115770C.1
agctcacaaatgctgtcagggttgggacctttgaactgttcaggactgtcgctgacaatttgcaagcacattcagcgcagacaggactcgcaacttgattgtgaggctgcgccacaatgtcattcgaactggactgcgcaacatcagcatttcttactcaaggatctcccttgctgacattgctaagaagctaagactggactctgagaaccctgttgctgatgcagagagcattgtagccaaggccataagagatggcgcaattgacgccaccatagatcatgcaaatggctggatggtatcgaaggaaaccggtgatgtctactctacaaatgagccacaaattgcattcaactccaggattgcgttctgcctcaacatgcacaatgaggcagtcaaggcgatgagattcccccctaattctcataaggaaaaggagagcgccgagaagcgccgagagaggcttcaacaggaggaagaactggctaagcacatggctgaggaggaggatgacgacttctaaattagctgccttttgagcaaccacttgcaattgtggacttgttggaacgcctggttaaaccctgcctctagctactcgagtcatgcaaacactgtaatgttatgttgatcagggtttttctttaaattcaatacttgagttttaatctccttgaattgttaaaccacggaatttacccaccatgcaaatggctttcttttatttcatgc

SEQ ID NO: 17298 - DNA, 582 bp, Zea mays
  Clone ID: MRT4577_115771C.1
gattcccggcgctcacccgttctccatactactaattctaatccacacctgctgattccagttacagatccagctcgtgcttttgtattcagaataaaaggctcaaattggctcagctcctgtagttgacgccgcaaaacctgtgcagcgatgcctggacagaggctgccaagaaagctgccctagtctaacagctcaaaatccgccccaagaaaatccgaggtcatgatcagatcttcatggtccacctcaagaacgtcagagtgcaccaaaggcgcgataccaggtaaagccgaatgacactatatcgtcgcttcacggacaacgatttccttggaatcgccatcgtgaagacaaatccgcacattgcattcatccgaggcgtgagtaacatcaaggaagagaatcagtgtcgcgcacaagttcacccctgacatcttccccaagcctgtcaagatgcacaaggttaaaatggattacttggtctaggtgaataataatgttagccagcttcattactatgtactagatacaatgagtggaacatgaaaagacgttctcgtgtgagaaagatacttataa

SEQ ID NO: 17299 - DNA, 889 bp, Zea mays
  Clone ID: MRT4577_115772C.1
tgcaaattggtgtgaagtctgcaggggaacaagctccatatatctacaaagttgaacaacaatacaagtaatttgtttacacaccattttcacatttctgaactttaagcctttattgagaataacaattgtggttcatttaatacaagcaatgcttgtccatgctttgttgcgttgcagagactgtggaattgtgaggtctgtccatgctgcctgctagaaatgggaaaatatgttagcagtagcaacaagtgtttttggcctttgatcttctggaggtcatgtggttgcagttctaccgatacttgttctacttgggcaaaattaggacaattcagttggagtacactgatgctaaagaaagcctcctgcaagttgctcgtaaggcaccaacaacagcccatggttttcggatccagtgcaacaaatgggttatcatagagaggctgctgcttggttggaacagaacaagacattgtgattttctttgactgttttgtaaggaatcagtgaaggaggctgaattgtggaatactattgtgatgaacatagtgaagcaggctgagttgttgcgtgcttctggttctggtctcagggagttacttggaaggggtttgtctctccgactctgctactgctttttaggcactgcttttttttgaagcacacattgttgtagctgaaacctccataatttcttcaccggttttatttaatctcttgttgcaattataggtgtacacaaaaactaatttttcatttgcttgtattactaaacttaatttcacaatcagccttgtagcactttgagattctgttgtttatttcttgtattagatattcttctgagtactggaataaagtcaatttatcatttttcatcagtaac

SEQ ID NO: 17300 - DNA, 2904 bp, Zea mays
  Clone ID: MRT4577_115773C.1
ctgcctgctagaaatgggaaaatatgttagcagtagcaacaagtgtttttggcctttgatcttctggaggtcattttgtcgcagcttcgtggtcggccggggcgaccactaggcaaccataaaaaaaaagaggccaaggagaaccaaggtaatcgaacccggaagcgaccttcttgagcccgaagcaaaaggcactgctcatcgatccgccaccacgccacaaaatcctctcctactccggcagttctgctcgccgccgcctccacgatgccggaagacgtgcagatgaacgactcggagccccagcctgcggcctcagctcccgccgtcggggcgccggcgctctccacactacaccatctgaaggagatcgcgtccgtgatcgaggccggttctctgtccaaggaggtccgccggatctcccgcgccttccgcctcaccgtcgcgctccgtcgccgcctcgccgcgcgggacgtctccgccttcctcgccttcgcgctacccgcgtcctccgaagcctacggacgcctcactgccctggtgcccaaggaagatgatactgagatggatgttgatgctgcagctccagcaactcagatttcaatcaaacatggtctccctgagattgaaatatattgctacttgctcgtactgattttccttattgatcataagaaatatgatgaggctaaggcatgcgcaagtgtgagcattgctcgcctgaagaatctaaaccggagaactgttgatgttttggcatcacgactgtacttctattactcttatgtgtatgagcttaccaacagccttgctgaaatccgtgggaatttgcttgctctacacagaatggcaactttgcatcgtgacgagcttggccaggaaacactgctcaatctcctccttcgcaattacctccactacaatttgtatgatcaggcagaaaagcttagatcaaaggcacctcgttttgaagcacactccaatcaacaattctgccgatacttgttctacttgggtaaaatcaggacaatccagttggagtacaccgatgctaaagaaagcctcctgcaagctgctcgtaaggcaccaataacagcctgtggttttcggattcagtgcaacaaatgggctatcatagtgaggctgctgcttggagagattcctgagaggactgttttcatgcagaaaggaatgaagaaagctctgataccttattttgagctcacaaatgctgtcagggttggggaccttgaactgttcagggctgttgcagacaaatttgcaagcacattcagcgcagacaggactcgtaatttgattgtgaggctgcgccataatgtcattcgaactggactgcgcaacatcagcatttcttactcaaggatctcccttgctgacattgctaagaagctaagactagactctgagaaccctattgctgatgcggagagcattgtagccaaggccataagagatggcgccattgacgccaccatagatcatgcaaatggctggatggtatccaaggaaactggtgatgtctactcaacaaatgagccacaaattgcattcaactccaggattgcgttctgcctcaacatgcacaatgaggcggtcaaggcgatgagattcccccctaattctcacaaggaaaaggagagtgctgagaagcgccgagagaggcttcagcaggaggaagaactggctaagcacatggctgaggatgatgacgacgacttctaagttagctgccttttgagcaactacttgcaatgtggagtttgttcgatttgtgaacgcctggttcaaagcaattcccctacctctagttactccagtcatgcaaacactgaagttcatccactgtaatgttgtgtcgatcaggattttgtattaattctatacttgagttttagtccccctgaattgttgaaccagggaatttactcaccattaaacggctttgtttatttctttaatcccagttcggcctcttttgaaaaaaaaaaaaaaaaaaaaaaaagcggccacagaacaagccattgtgattttctttgactgttttgtaaggaatcagtgaaggaggctgaattgtggaatactattgtaatgaacatagtgaagcaggctgagttgttgcgtgcttctggttctggtctcagggagttacttggaaggggtttgtctctccgactctgctactgctttttaggcactgcttttttttgaagcccccattgttgtagctgaaacccccataattttttcaccggttttatttaatctcttgttgcaattataggtgtacccaaaaactaatttttcatttgcttgtattactaaacttaatttcacaatcagccttgtagcactttgagattctgttgtttatttcttgtattagatattcttctgagtactggaataaagtcaatttatcatttttcatcagtaacatcttgagaggctgcttcttacatacaaacctaaagaaccagaggaaattcttgagcctgctcctcttgaagaggaaatggcaccagttgaagatcatgttcttgtaccacctgttaatgaagttgtttcacctcctcccaagactgaggtgtcccgatactggtgacttactggttgggaaaattataatatggtctaaatcttatgtgcttgattctaaaatctgaagttgtgttcctggtgtggaaatagagttgttgggctatttgtgtggggtgtgggttggcatgttcggagctgttcctggttggaaccagtgattttgctactcttttgacggataatttgagtttggagtcgtcgaattttgaaacagaggagtgggtttacatgtaatgttggcaaacgggatctgaattattaataaagcaacactgtttcgctgat

SEQ ID NO: 17301 - DNA, 984 bp, Zea mays
  unsure (1)..(984): unsure at all n locations
  Clone ID: MRT4577_115774C.1
tttttccgattcaagtggagcgggacactacgaagcggtgacgaagaacaagttaacccaacctggaagcgagtaagcgaccttcttgagcgtgaagccaaaggttggacctcaccgatccgccaccacgccacgaaatcatctcctactccagcagttccgctcctcgccgccgccaccggcgccaccgccacgatgccggaagacgtgcagatgaacgactcggagccccagtctgcggccccagctcccgccgccgccgcggcgccggcgctctccacactacaccatctgaaggagatcgcgtccgtgatcgaggctggttctctgtccaaggaggtccgccggatctcccgcgccttccgcctcaccgtcgcgctccgccgccgccttgccgcacgggacgtctccgccttcctcgccttcgcgctacccgcgtcctccgaagcctacggacgcctcatcgccctggtgcccaaggaagatgatactgagatggacgttgatgctgcggctccagcaactcagatttcaatcaaacatggtctccctgagattgaaatatattgctacttgcttgcactgatttttcttattgatcagaagaaatacgatgaggctaaagtatgtgcaagtgtgagcattgctcgcctgaagaatctaaaccggagaactgttgatgtcttggcatctcgtctgtacttttattactcttatgtgtatgagcttaccaacagccttgctgaaatccgcgggaatctgcttgctctacacagaatggcaactttgcatcgtgacgagcttggccaggaaactctgctgaatcttctcctccgcaattacctccactacaacttgtatgatcaggcagaaaagcttagatcaaaggcacctcgttttgaagcacattccaaccaacaattctgccgatacttggtctacttgngcaaattanngacattcagntggagtcactgatgctaa

SEQ ID NO: 17302 - DNA, 570 bp, Zea mays
  unsure (1)..(570): unsure at all n locations
  Clone ID: MRT4577_115775C.1
atgcacgccgtaccgtaagccttggnatcctnctnanaancggccccgccctcttnnttttttnntttttttnnttttttttttttnttttttttttttnttttttttttntttttttttttggcccccggtggtttatttttttccctcccgcctgggaaggggccccccncccaacctcccaaacacccccaagagccagcccattggggtggctgcccgcttgtncccgggcggccgggcggggggccctgggagggtccatcggctgtgcccctggggcccccggccctggggggnttgggtgggcccctngggggtcttgcagccccagntnncgggggggaagtcccggcacccggccttggtggcccccttggcccgggcccccgggccccannncttgccgggggcggcccccctggnggggagggcgncgccgggcccccccccccaccagctggggcnctcgccccccccgccccggttnttcnncnncggccctgcngggcctttggcccccgcccccgggccccaaagggcctgaaaaacctgggtcccccaccgggg

SEQ ID NO: 17303 - DNA, 687 bp, Zea mays
  unsure (1)..(687): unsure at all n locations
  Clone ID: MRT4577_115776C.1
aggtgaaggaggaaaaggggttttctggtaacatgcctaatgaaagcaatgaactagattactttcagtcgcttgaanatctcagtggtcattcgaacccacgcgtcccatctgcttcaaattatatgcattcaggagccccccctactgtttgtattcaagaaggtgtgacatcttctcttcaaccaagtgacagtgttaagagcctagagacttgtaccatgccaagagctaggtcaacaacacagggttcagatatcagcgaagatgatcgccactctggcggagcttttgcatctggctgttctgactttcaggctgacatggtagatcacagctataaaaatcaatctcctcaccctgggcgagtctttcattctgagtggattccgagggagcaagcaggctttctgaaccggctatctaaatctgaagattcgctaaatcctgaacttctaattcgtcaatcacagtctggcgttgcaagtgaacacattgcagaaaatattgattctgcgtttgctgggacggaaaaaccaaatttagctgcccaggctataaatctgaatgatccagctgtcgacgatagtctcatacagtttgagaaagggtttaccaacactgtacagcaagcttctccatttagtgaacatctgcttggtgaaaagaggccctcagatgacacaa

SEQ ID NO: 17304 - DNA, 376 bp, Zea mays
  Clone ID: MRT4577_115777C.1
ctctaattacattttttttttttttttttttttttggttgtttttttggttttttcggtgggagcgaaccgggcaaaaaaacaccaccgcaatagggcacccggacaaattttgaatgcaatgggctagagctcaatcgctttaaaaaaacggcgtactaattaggactgaaaacatgggataacgctttgaacttgggacgactaaccaaaaaaagggtgctcataaggacccacatttccggggcccgacacatcctggggatgtttttagttgcagggcctgagcccaattacctttgtagagctgaaaagaggcaccctaaccttgccccctccaggacgggccggaacactcgggccccctgcccaagggg

SEQ ID NO: 17305 - DNA, 1436 bp, Zea mays
  Clone ID: MRT4577_115778C.1
ggagaagaagacgagtgtcaagtgaacctgaaacttgcggtgtcactggctggtagcctgagtgtgagtgagtgatcgagctagctgagctccgatcctcgctagctaggataccgccataccacaagtcttcttcacaagtttaggagtgacagcaacaagagatcgatggcctctgccaccgtgctcaagtcctccttccttcccaagaagtccgaatggggcgccaccaggcaggccgccgcgccatcctcttcgaggagacgctgtaccagtccgccgtcgacggccgcaagatcgtggacatcctggcggagcagggcatcgtgccggggatcaaggtggacaagggccttgtcccgctcgccggctccaacaacgagtcgtggtgccagggcctggacggcctggcgtcccgcgaggccgcctactaccagcagggcgcgcggttcgccaagtggcgcaccgtcgtcagcatccctaacggcccctccgagctcgccgtcaaggaggccgcgtgggggctcgcacgctacgccgccatctcacaggacaacgggcttgtgccgatcgtggagccggagatcctgctggacggcgagcacggcatcgagcgcacgttcgaggtggcgcagaaggtgtgggccgaaaccttctacgccatggcggagaacaacgtcatgttcgagggcatcctgctgaagccgtccatggtgacgcccggcgcggaggccaaggacagggccaccccggagcaggtggccgcgtacaccctcaagctcctccaccgccggatccccccctccgtgcccgggatcatgttcctctccggcgggcagtcggaggtggaggcgacgcagaacctcaacgccatgaaccaggggcccaacccgtggcacgtgtccttctcctacgcgcgggcgctgcagaacacctgcctcaagacctggggcggccagccggacaaggtcaaggcggcgcaggacgcgctgctgctgcgcgccaaggccaactccctggcgcagctcggcaagtacacctccgacggcgaggccgccgaggccaaggagggaatgttcgtcaagaactacagctactaattaatcgcccggccatcacccgggataccgccgcccctccgagagatacgtgtgtactgatcatggttaagcacgtactccgatccattcccatcccatgaagccatgataatgatgatatgatccatggaccatgcatgcatggtgctctggtcgatgccgtacgtgtgtccctgatacaatactattttagtactgatgctagtcatcatatatatcgatcgagctcgccactgcgaagtctgagataatgcatgtatgcttgacggcgagatctgaggaaaaataatttctatatatgcatgtttcgagaaaaaaaaaaaaaaaaaagcggcc

SEQ ID NO: 17306 - DNA, 533 bp, Zea mays
  Clone ID: MRT4577_115779C.1
acgcccttatacgagaaggatcggacgagaccgccgcctggcttagtccactgcgccaagacgacgacaacgacgatggggcaaaaaaaaaagaaaagaaagaaagaatcgatcgagtgcacatacccagcattgacagagttcacagtacgtttgagccaccgcggacgcgacgacagaggcgtcggcggcgaacctcctgctgtcgccgtcgccggaggccgcgtcgcagtcctgctggcgggccgaggagctccggcggcagtccgagacgggagacttgagcgggtcgcccctcgggtgcaggaaggatgccaggatcatcggcgtccgcgggaggcacctcgcgcgcgacgacgatctgtcgtctgtgtcaccctcttcacgtctcgtgcaatccagagcgtctctggccctgcagattagatcacgtttaagtttcataacaagaaaaatgctagctactgcgttcatagatgaagcgcaccaaaaccaaattctatgtcaaattaagctgcggctctgccagggtt

SEQ ID NO: 17307 - DNA, 689 bp, Zea mays
  unsure (1)..(689): unsure at all n locations
  Clone ID: MRT4577_11577C.1
caggcacatctttgatgagcagcggccaaaattcggcacgaggttcgatcgtttcctgccgctccactaccactagctagtctgccgccgtccgccgtgccgcgcgagctccgactgccggcgccggaggcaggggaggaaggtgctgctgctccccctgccgcccgcgtcctgtgactgagatccatccagctcggaggaggaggaggaggagtcgctcctggtcctggcttctagacgttgtgacccagatcttgacgcagctgcccaagtagtttactcatctagaggagaggaggggttggatccttgacccgatttggtgggggctttgccactgggatagggggacagtttggcctgctggatctttatcgccagttgttggtcctgtcctttccgttgggctgggacgcattcacatgccagtggctgccggtttggtacttactcgacggattggttaagcgctgtctgtggggttgttgtgctgctccttctttcatcttattttgtggtgattggtgggcgaggaggaagagctaggaagattatctctcttattcttcttgcngtcatttttcgggtgcggcagatgaagtatatgaagctttgggatcaaagcctgatgtcctttcagacagagggcagcatatcaaggntttggtgcaacagaactggcacagaca

SEQ ID NO: 17308 - DNA, 476 bp, Zea mays
  Clone ID: MRT4577_115780C.1
aattaattaagggagagccatctcgaaacatgcatatatagaaattatttttcctcagatctcgccgtcaagcatacatgcattatctcagacttcgcagtggcgagctcgatcgatttatatgatgactagcatcagtactaaaatagttttgtttcagggacacacgtacgggatcgaccagagcatgacgttgttctccgccatggcgtaaaaggtttcggcccacaccttctgcgccacctcgaacgtgcgctcgatgccgtgctcgccgtccagcaggatctccggctccacgatcggcacaagcccgttgtcctgtgagatggcggcgtagcgtgcgagcccccacgcggcctccttgacggcgagctcggaggggccgttagggatgctgaccacggtgcgccacttggcgaaccccgcgccctgctggtagtaggcggcctcccgggaccccaggcccttccagccct

SEQ ID NO: 17309 - DNA, 854 bp, Zea mays
  unsure (1)..(854): unsure at all n locations
  Clone ID: MRT4577_115782C.1
actctcttatcctacgcccccgcgcccccccgtctgcgtcgcgtagggttttggcaacttgcacgtacgagagcgtccatggacgacgggagcagcaacaaggtggttgaggacgtcgcggaggaggaccccggccgccgcggcggtccatggaggacggatgaggccgacgccaacgagaaggcgcctcgccccagcaggcgggtcgcttccctcgacgtcttccgcggcctcaccgtcgcgctgatgatactggtggacggcgccggcggcgagtggccggtcatcgggcacgcgccgtggaacggctgcaacctcgcggacttggtgatgcccttcttcctcttcatcgtcggcatggccgttcccctggccctcaaggggatcccggaccgtggccgagccgtgaggagagtggtcgtaaggacgctgaagctgctcttctggggcatcctgttgcaaggttacttactctgttagacacccgcccttcgattttggcaagtctctactcttctacctcgtgctcgtgcggcaaagctgattagcgatttgggaagagtggaatgaatgtgtccaggcggttactcccacgctccggacgaactggcgtatggagtcgacatgaagcacgtgaggtggggcggaatcctccagaggatcgctcttgcgtacctggtggttgcggttctagagatggtgacgaaagacggcgccaaggttcatcaggaccagccgccaggttcttcaggccgcttctcccgtgtattcagaatgtatctctcccagtggatcgtcgcgtgctgcattctggtggtctacctgtcccttgnnctacgngtctacgttcctga

SEQ ID NO: 17310 - DNA, 217 bp, Zea mays
  Clone ID: MRT4577_115784C.1
ttcgcaagccactccgaggccaagtctagggtttgggaatctgtaggaggggagaggggagcgcgctcagggtcagggaggcgaagatgatcgaggtggtgctgaacgaccggctggggaagaaggtgcggctgcagagcgacgaggtctaccccatctacgtccccgaccccctcatcacctcctcataccttacttacctctataagtactacac

SEQ ID NO: 17311 - DNA, 790 bp, Zea mays
  Clone ID: MRT4577_115785C.1
ccggccgggtctctccggccgggcactctcttatccaacgcccccgtgccccgtctgcgtcgcgtagggttttggcaacttgcacgtaccatggacgacgggagcagcaacaaggtggttgaggacgtcgcggaggaggaccccggccgccgcggcggtccatggaggacggatgaggccgacgccaacgagaaggcgcctcgcccgagcaggcgggtcgcttccctcgacgtcttccgcggcctcaccgtcgcgctgatgatactggtggacggcgccggcggcgagtggccggtcatcgggcacgcgccgtggaacggctgcaacctcgcggacttcgtgatgcccttcttcctcttcatcgtcggcatggccgttcccctggccctcaagaggatcccggaccgtggccgagccgtgaggagagtggtcgtaaggacgctgaagctgctcttctggggcatccttttgcaaggcggttactcccacgctccggacgaactggcgtatggagtggacatgaggcacgtgaggtggggcggaatcctccagaggatcgctcttgcgtacctggtggttgcggttctagagatggtgacgaaagacggcgccaaggttcatcaggaccagccgccaagttcttcaggccgcttctcccgtgtattcagaatgtatctctcccagtggatcgtcgcgtgctgcattctggtggtctacctgtcccttgcctacggggtctacgttcctgactgggagttcagagtgcgaaacgctgacagcccagactacg

SEQ ID NO: 17312 - DNA, 402 bp, Zea mays
  Clone ID: MRT4577_115787C.1
ggcgagaaagggaccctcggcgaggccgcggacatggggaccatccataacctgggggagtgaggggacgccgaccggccatatacgatgacctaaccgcctgttgctggtggtggactgcatgtttatcaaaagttatagctcctgctcgcggaaagggagcttgactgttgccaaggtggaagtatccgtctggactgatacatgagtgctcccgacgggtttgctttatgattagttggtcaggcgccaaataacaagatgggctccatctataatgcccagctcatacagatggctgtgtgcacaccactaagatggacatgcgtactttcttgcatgcaacatgcacatgcattaaggcgggcactgttagtgatccacacttactatctcttgcat

SEQ ID NO: 17313 - DNA, 861 bp, Zea mays
  unsure (1)..(861): unsure at all n locations
  Clone ID: MRT4577_115788C.1
ccgggactctcttatcatacgcccccgcgcccccccgtctgcgtcgcgtagggttttggcaacttgcacgtacgagagcgtccatggacgacgggagcagcaacaaggtggttgaggacgtcgcggaggaggaccccggccgccgcggcggtccatggaggacggatgaggccgacgccaacgagaaggcgcctcgccccagcaggcgggtcgcttccctcgacgtcttccgcggcctcaccgtcgcgctgatgatactggtggacggcgccggcggcgagtggccggtcatcgggcacgcgccgtggaacggctgcaacctcgcgggcttggtgatgcccttcttcctcttcatcgtcggcatggccgttcccctggccctcaagaggatcccggaccgtggccgagccgtgaggagagtggtcgtaaggacgctgaagctgctcttctggggcatcctgttgcaaggcggttactcccacgctccggacgaactggcgtatggagtcgacatgaagcacgtgaggtggggcggaatcctccagaggatcgctcttgcgtacctggtggttgcggttctagagatggtgacgaaagacggcgccaaggttcatcaggaccagccgccaggttcttcaggccgcttctcccgtgtattcagaatgtatctctcccagtggatcgtcgcgtgctgcattctggtggtctacctgtcccttgcctacggggtctacgttcctgactgggagttcagagtgcgaaacgcttacagcccagactacggcaaagttctaacggtgaggtgtggtacgaaggggggcgttggaccctcccctgcacgncgtaggctacatcgaccgc

SEQ ID NO: 17314 - DNA, 796 bp, Zea mays
  Clone ID: MRT4577_115790C.1
ttgggaccctcgaggccggccggggaccccgtccgccgcggcggtccatggaggacggatgaggccgacgccaacgagaaggcgcctcgcccgagcaggcgggtcgcttccctcgacgtcttccgcggcctcaccgtcgcgctgatgatactggtggacggcgccggcggcgagtggccggtcatcgggcacgcgccgtggaacggctgcaacctcgcggacttcgtgatgcccttcttcctcttcatcgtcggcatggccgttcccctggccctcaagaggatcccggaccgtggccgagccgtgaggagagtggtcgtaaggacgctgaagctgctcttctggggcatccttttgcaaggttacttactctgtactctgttagacaccggcccgcccttcgattttggcaagtctatactctctacctcgtgctcgtgcggcaaattaaagctgattagcgaatttgggaagtggaatgaatgaatgtgtccaggcggttactcccacgctccggacgaactggcgtatggagtggacatgaggcacgtgaggtggggcggaatcctccagaggatcgctcttgcgtacctggtggttgcggttctagagatggtgacgaaagacggcgccaaggttcatcaggaccagccgccaagttcttcaggccgccttctcccgtgtattcagaatgtatctctcccagtggtacgcaacgcaaagaaacgctcgggtttttcgccctttccagattcccaaagagtgcgaaaccctgacggcccagactacggcaaag

SEQ ID NO: 17315 - DNA, 2274 bp, Zea mays
  Clone ID: MRT4577_115792C.1
ggagcggcccgccggcccggccagtgccgcacgctggcctgccggctgctcgcccgccaccgtaccggccactctcgctcccccttttctgcgtgccgcggcgtctttcgtttctgtcggctttgtctgtttctctacccccccggtgagctctcctttgcccgacgccctcgtctccccgtctgctccctcgttgtgtttgtttttggcaattttacctgccctactcttcctcggtcgccgaatcgggcagtacagcaaccaatactttggttctgcggctgtatgttctatattttgtggtcccctgcctgccgccctcgctcttttcttcggtctttttgagtcacgactcctactagaaacggggcctgctcgccctaccacgcgtgggctgcgcttccacctcgacgtcttccgcgtggctgtccaccgtcgcgctgatggtgataccggcagatggacggcgccgtgcggcgagtggccggtcatcgggcacgcgccgtggaatggctgcaacctctgcggatttcgtgatgcccttcttcctcttcatcgtcggctatggccgttacgctcctggcgcctcaagagtagggttagtcccggacgcgtggcgcgagactcgtgaggagagtgggtcgtaaggacgctgcaaaagcgtagctcttctgcgggcactccattgtgtgcaaggcgggttactcccacgctccggacgaaactggcgtatggagtcgacatgaggcacgtgaggtggggcggaatcctccagaggatcgctcttgcgtacctggtggttgcggttctagagatggtgacgaaagacggcgccaaggttcatcaggaccagccgccaggttcttcaggccgcttctcccgtgtattcagaatgtatctctcccagtggatcgtcgcgtgctgcattctggtggtctacctgtcccttgcctacggggtctacgttcctgactgggagttcagagtgcgaaacgctgacagccgactagactacggcaaagttctaacggtgaggtgtggtacgaggggggcgttggaccctccctgcaacgccgtaggctacatcgaccgcagagtcctgggcatcaaccacatgtaccagaagccggcatggagaaggcacagggcctgcactgatgactccccacacgagggtcctttcagagaggatgccccagcgtggtgtgtcgcgccattcgagcctgaagggatactgagctcactgtctgctgtgctgagtacggtcgtcggtgttcactacgggcatgtgcttgtccacatgaagagccatacggacaggcttaggcagtgggttaccatgggcgtagctcttctcgttctcggaatcattctgcacttctcgcatgcgatcccgctcaacaagcagctctacacgttcagctacatctgcgtcactgccggcgccgctggggtcgtcttctcagcgctctacttcttggtcgacgtcgtgagcctgcgctacgccttcgcgccgctgcggtgggtcggcatgaacgcgatgctggtgtacgtgatggccgcggaaggcgtcttcgagggcttcctcaacgggtggtactacgagagcaccaacaacactctggtttactgggtgaggaagcacgtgttcgtcaaggtgtggcactccaccagggtgggcatcctcctctacgtcctcttcgcgcagatcctcttctgggcgctcgtctccggcgtcctccaccgcgctcgcctctactggaagctctagcgagcgaacggtggcatagcatgcttttgtcttttgaactgcacatgatacacacgacacctcaaactcgaaccccaagttagtttgaagaactcaaatcacgggcaaaatggaattcggcgagcggatcggattcattattatccgaccgcgtggctgcggaagtactcacacagcaagtcaacttaatcggtgtagcaagcatagcgcgcgcctttgcgccgctgtggtgggtcggcaggaacgcgatgctggtgtacgtgtgatgcgcggaaggcgtcttcgagggcttcctcaacgggtggtaatacgagagcaccaacaacactctggtttactgggtgaggaagcacgtgttcgtcaaggtgtggcactccaccagggtgggcatcctcctctacgtcctcttcgcgcagatcctcttctgggcgctcgtctccggcgtcctccaccgcgctcgcctctactggaagctctagcgagcgaaaaaaaaaaaaaaaaaa

SEQ ID NO: 17316 - DNA, 914 bp, Zea mays
  Clone ID: MRT4577_115793C.1
cctgccgggttcctgccggccgctagagagattggcatcgcactgctctctgtgtttggccgctctatgtttggcggagtcgggtactcctctcacgcgtccgccactctctcttatccaaacgcccccgtgccccgtctgcgtcgcgtagggttttggcaacttgcacgtacgagagcgtccatggacgacggcagcagcaacaaggtggttgaggacgtcgcggaggaggaccccggccgccgcggcggtccatggaggacggatgaggccgacgccaacgagaaggcgcctcgcccgagcaggcgggtcgcttccctcgacgtcttccgcggcctcaccgtcgcgctgatgatactggtggacggcgccggcggcgagtggccggtcatcgggcacgcgccgtggaacggctgcaacctcgcggacttcgtgatgcccttcttcctcttcatcgtcggcatggccgttcccctggccctcaagaggatcccggaccgtggccgagccgtgaggagagtggtcgtaaggacgctgaagctgctcttctggggcatcctgttgcaagtggaatgaatgtgtccaggcggttactcccacgctccggacgaactggcgtatggagtcgacatgaggcacgtgaggtggggcggaatcctccagaggatcgctcttgcgtacctggtggttgcggttctagagatggtgacgaaagacggcgccaaggttcatcaggaccagccgccaggttcttcaggccgcttctcccgtgtattcagaatgtatctctcccagtggtacgcaagaaaggctcgggtttttcctttccagtttcgcaaaggttccttccattccatctcgacaacgcattgcatctatctatatgtataaaaggatcgtcgcgtgctgcattc

SEQ ID NO: 17317 - DNA, 326 bp, Zea mays
  unsure (1)..(326): unsure at all n locations
  Clone ID: MRT4577_115794C.1
agaccaacaagcaacaaagaaaggggaanccaggagcaacaagagagcaacaanggcgaccaagaaagggcccaccaaagcaccagcacaacagcagagaagcaaacgcgacaanaaacccacaaggcacacaagcagccaagagcnagccaaacggcccccaaaccaaacaacaanganagcaacagggggggaaaacccagcagaaaaacccaaaaggcagcaacaagcaaagggagaaagcaacagaccggagaacacccnggagggaacaaacgacagcccaaaaaaaaggagcaaagaaaaggaacaaaccaacaggacac

SEQ ID NO: 17318 - DNA, 436 bp, Zea mays
  Clone ID: MRT4577_115795C.1
acgcgtccactgtatagctaggcaggtccaggtagcagcaactgagagacagctaggtagcaccggggcggcggcgggccggaagaatatatcgggaattcgggagagatgccgacggtgcggcggcggaacccggacgtgcacgtgaaggcgctggagggcatcgtgtcggccaacaccttcctcaccgtcgccgtcttcatcggcatcacagggaccatcacggcctcctccacggtgccgcccaactgcgtcgccggggacgacatcgcccgcaacttcttcctcttcgagatcctctccttcggcttctacctgctgtccagcctggtggcgcagggcatgaagctctccgtcacgctgctggccgccggagacgacttctacggcgacggcgagcagaagccggtcatgacggacgactgcgaggagatgc

SEQ ID NO: 17319 - DNA, 403 bp, Zea mays
  Clone ID: MRT4577_115796C.1
cccacgtttctttccacgcgtccgaagatctttctgcaaaataaaaaaagtttacttgtgaagtacttcataatatgaaattgtgcagtgtcatgtttttgttcacatgattattaaactggatgctaaagacatcgcttgagtaaaccgcagagtaggaacgggccttagttgttctctttgaagttgaatagatcaatactgcgcccattgatacgtgagggagattgacccgtaactactcttggtgactgattgatggaaacacgtcaatttgggttgctgataaacctgtaatgtcattcaacgtcagtgtccaaacaacgactaaatcaattaatctattcacatcaaagttgtttgtaagaaacttaggcacacaatcgcttgttgttgacattct

SEQ ID NO: 17320 - DNA, 911 bp, Zea mays
  unsure (1)..(911): unsure at all n locations
  Clone ID: MRT4577_115797C.1
acgagcgcaacattatgcagcttgcacaaggggaagtacgcactcagcttttacccacctagaagagaaaaggcnnnnnnnnnnnnnnnnnnnnnncttnnnnnnnnnnnnnnnnnnnnnnnnnnnnnnnagccaccgacttccttgcttgaacggattagcttggtctggatcagctgctggacacgctagctacaacaggtaataatccatnnnnncggcgtccagcaagctggcgctctggacaggaaggtggaagtgggtgtcgtcgtcgaacagccacgactcgatcgcagacagcggcatcatcagctgggacggcgccagggtttactctatcgatagggnnnnnntatcggaggttggcgataaacaggattatcgggtttatcggatttctatcggcgataagtaaannnnnncggcacaaagttnnnnnnnnnntgccagtttatctagaatatcatgtagattatatctagacatttancaaaataaaatancccattagcacattcataggtcacacattcatagttcacagtttaacacattcatagttcccagtcacacattcatagttcacagtcacacattcatagttcacagtttcacacattcatagtccattcatagttcacacatgaatcaaaagtccaaaataaggcaaagacatgtgctgaaaatatgacaatgaaatcctccatagtcnnnnnnnnnnnnnnnnnnnnnnntcactgttaaagttccttcacagggactttctttagccttgttgatcttggacgaagtggaggatttggagctgcttgctcatgcatagcaccatcccttgatccatcaccactaggtccaacatcacatgctccaccaccactaggtccaacttcacatgctccaccaccacctcg

SEQ ID NO: 17321 - DNA, 1017 bp, Zea mays
  Clone ID: MRT4577_115798C.1
ttcctccacgagcccgccccggccggaccgtagccgcaggtggtgctccacgcaggcctcgtggaagccgagcaggtttgggtttgggtccgcgccggtgaggtagaacggtgcgccggccgccgtcagggaggcgtgctccgtcccggtgctgcagcgcctgcacctggtccatgcctgcgctagtggcagcttgtgagcctcgccgacttggttcaagatgtctgcaacctccgacatggccacctgagccgctgccccatcgtcgttgcatgcctcgggtgctgggcggcggcagatctcggagcccctcaacgccacagcctgaagcgcctcggagagcctgtcgacctcggcggcgaagtggagcctgggcgaggtggtgacgagctcgagcacggcgaggcaggcccccgtggcggggtcaaggatgggcagcgcgagcgcggcctggatgtcgtagatgagcgcgtagctgatgcgcgcgtactcgccggtgccgtagtactgcacgttgggcgtccactcgggctccccggcgtcgaacacccgccccggcaggccccgctccccgggcacggcagcgccgccgacggggaaggcgtgcgcgagcgacaccgtccggtactggaacaggcggtggcaccgcggcggcggcagcacgaatggctggccccgggtggccagcacgcgccggcccccgtcccgcgccggcgcccacacctgcaccagcgccccgccgtcgagccccgccgcgtccttgtagatcctcagcgcccgcgcgatccgctccttcaccgcgccgtcgatgcccgccttgtcctgcgcgccgccgccgctcgcgctcctccgctcgctcccacataggctgtcgtcgccgtggccgtggccgtcgaggaggaggtcgacgtcgaatcgctggagcacgccgtccatgtcggcctctatctccgtcaccgtgtccagcttggctggctccgcatgcgacgacgatccacgacgcggcaagcaaagcac

SEQ ID NO: 17322 - DNA, 284 bp, Zea mays
  Clone ID: MRT4577_115799C.1
cggaagcgaggggccaccagcaaaccagggagggacgccccagccagcaaccataccctgcggggcaggccactgaacgcacccagcacgaccacaagaccaactacagggccgacgacacgacccgcgacaccgacgagcgcgcacactgcggccggcggccggcgcaccggtcaacgccgggggggggaagaacaagctggccgcaagcgggccccctgccggcggcccggagggcgccgcccgcggcgcggcccgcgggcgcgccggcgggggccccggcg

SEQ ID NO: 17323 - DNA, 392 bp, Zea mays
  Clone ID: MRT4577_11579C.1
gatactcgtccggccacgcgtacgaagatctgtcccatactcaaagggtcagtcccatctgcctcccgtggccagaatgcctgctcttgtcagagcgacggtgaaggcgctcgcagtgggcaccccatcccctgccgcggagagcacgccgcgcatcgtcaagcgccggctgacgccaggccgcgccggcgagtggcccaaagacgcattggtacacctaccgtgagggatccactaactccggcaccggaactgattgcactcctaaggtgctctcggcgacgaccaagtcctccaggaagcgtgtctactgtgaccttgacgcatccgagaagcccaagtgtgatctccgagatgccgtgcagattaaggctgccaaggaggcgctgcac

SEQ ID NO: 17324 - DNA, 664 bp, Zea mays
  Clone ID: MRT4577_1157C.1
atcttgtcactctagagtcggcggacttcctctgtcccttctgcctttactcccttcaccgaattccccaaaccccagctcgccgccgcccgcattgcgacgccggcccgggaatacgaggacccgtcgcgtcgtctcagatccagctcggagccttccccgccggggccgccgaccagagcttttccccgcaagaaatggcgccattcgagcgggttcttgggaagatgcttcttcgctaggaccgcagcagggggctgtgatggagagcgcctccaatgaggagacgctgcccccggcgctgcctctggcgacgctgatcggccgcgagctccgcggcggcggctccgagcgcccgctcgtgcggtacggccactccggcttcgccaagcgcggcgaggactacttcctggtcaagcccgactgcctccgcgtccccggcgacccttcctcggccttttccgtcttcgccgtgttcgacggccacaatggcgtgtcggcggcggtgttcagcaaggagcacttgctcgacgacgtgatgagcgccgtgccgcagggtatcagccgcgaggactggctgcaggtgctgccgcgcgcgcttgtggcaggcttcgtcaagacagatattgacttccagcgcaagggggaaatgtcagggacgacg

SEQ ID NO: 17325 - DNA, 396 bp, Zea mays
  unsure (1)..(396): unsure at all n locations
  Clone ID: MRT4577_115800C.1
nnnnnnaatannttnngacncaaaaacacagaanaatgaggttgtttaaataagttcttttcactatcaatatgatagacagggacagctcagtttagctatgtaataatcacgcttcatgctttattattggtttataaaggcactaccgacccaataagattgtggaggacagcaaaaactacgcctacgtagaaattgccacggcaatatgagcacgcccatggctcacattttatccccggtactcctcaatatggaactaacgatgcccgcgggagaactgaccggaccccccacggttctctctcggttatcacttgcgtgggcacaaagaccacttctacggagacttcaaatgataataccagtcttcttgccttaaccattaactct

SEQ ID NO: 17326 - DNA, 477 bp, Zea mays
  Clone ID: MRT4577_115801C.1
tccgggttggacccacccttccgaaacgccgccctttttggtttggacctttcttttccggttaaccttagaagcggaacccggccgacggcaaccagtaaagggctggtccccccaccgccaaagggattaaggggtttacccgtcctccgccacaggcccgggggcttcctgaaaataattatgggttggtggcaaaaggtttacggaggcaactttgaccaattctgggggtcctgaatctgaatggctgtaactggaccagctggttgaagttttgggaaggttaaaaactaacaccgaaccatttttgattttgcaaaagggcttaaaaggggaggattttgaagggcttttcctaagccttgatgagtcgaccaaaaccaagtttgatgaactggtaaagaaggagtaggctttaaaagaaaaaaaagctgaaccttttggtttgtttgcaaaaaaagaggctaaagtttt

SEQ ID NO: 17327 - DNA, 254 bp, Zea mays
  Clone ID: MRT4577_115802C.1
gcgggccaagatccaggacaaggatggcattcctccagaccagcagcgtctgatctctgcggacgagcagctggacgatggccgcgctgtctgggactacatcatacataatgcgagcaccctcaaccatgatatacgccttaggattggtatgcagatcattgcgaagaccctgactggaataaccatagccctggaggatgtcagctcggacactatctacaatgtgtaagctgatatccatgacaaggatg

SEQ ID NO: 17328 - DNA, 608 bp, Zea mays
  unsure (1)..(608): unsure at all n locations
  Clone ID: MRT4577_115803C.1
ccggcgagcngcgcnacccgnccnacccggagagcgacggcaccnggncgcgcccgggcancggcgagcnccagggccacgacaggnncacgccgagnagcncgaaggcggccgcngaggccgngggcaagccggaggggggcaacgcgggnccgggcgacnccggcagcnacaaggacgggccggaggacacgggcnncnnccggcgcgagggcgggnggagcacggagnacggggagggcnncangagcnggnaccccgcagagcnccnggagcacggcgagcgcanccngncggcggcgacgggcgngnncacgggnncccccggcgngaagaacncggngaagggggccggganccacnggcacnacggcacccggncccacgcggcggagcngacggcggggnaccacaacacccggncgcacgacgggnacgcgcccancgcgcgcangcnggcgcgccacggcgccgngcccaacnncacgngcgnggagaagcgcgaccacgagcagccgcaggacgcgcagngccgccccgaggcgcnggngcagcagggggccgccgcggcgcggaaggccggcgngggcccggccggcgagaacgcg

SEQ ID NO: 17329 - DNA, 464 bp, Zea mays
  Clone ID: MRT4577_115804C.1
ggacgtccttgtagcctcggacgaactcggccctggagagccgcacccccggccgcagtctagctgtacaatgttgcaggcagagcagagatggcaccacctctactacctgacatccatggagctggagtgactgacggagctccacgtagcgaatcgacattcacactctacaaatggaatgtaacgcaggagagacgtcaaggccgagatggccacggcaagtggccaagatcccagtccgagggacagggacgcagcagatggtgcactctaggggtcctgcaaaaccttcgcaaacttcttaagaccggatgaacgtccatgtacggtgcgctacaggaaggcgttgagtcaaacgactacagctacacgaatgacttattgcagagaaccatcttgcgacactacgtggggggacggcatgacactggacgactgaatcaactaaggggaggatgagg

SEQ ID NO: 17330 - DNA, 333 bp, Zea mays
  Clone ID: MRT4577_115805C.1
aatttcgggggagacgtacgcgttagacacttacatatgcaaacaatcctatctccaggccataggtatgcacaccgaggggggcgaccatgctaccaagggaaaaaccctgtccgagaacaccagcaccaagaccatactgatcccatacctgctgtccaagcacgacacggtgcgagacatctacaccaaggactcggacatattctaccaaaaggacacaggcacgtgtgttgcctccaaagctggcgcaggcacaccgaaagatgaggccatgattgactacattaacaaagtgaaagcacctccaggaggacgctgtcaacttttaaa

SEQ ID NO: 17331 - DNA, 278 bp, Zea mays
  Clone ID: MRT4577_115806C.1
gagaaacgctaggctgcagctctatatcagggcgcaggtactcacggtacagggcatcgagctctacgcgctggaccccatccatctatacaaagagcctactcggaccatccgagaaccgtggctaggaacatcgtgcggtatcaccaagaggacctttgcgctcgctgccagcacatccgtcatttacttgctagaccagagatcctgaccatgctcaggtgctattgctcaacgtgacgcatacaaacttgatctacaccgtctaacactccaag

SEQ ID NO: 17332 - DNA, 1599 bp, Zea mays
  Clone ID: MRT4577_115807C.1
cgggtatgagtttttcaaaacactttgggaaggaaaatactaggggcaagaccagatattgacagcaattatgcttttctttcttcctttggtactgctgagactattttggaagatatatcaagtatgaagatttccgatggtgaagatgagaacataacctgtcatctttcaaagagcttgggtgataaaaacttatacgttggaatgaatggacatacacatttgagtaattattttccaggagtccgtaacactgcattaagtactggtttaagtacaagagcatcccattttgttcataatgcaccaaaactacattcatcgttttgccatgataacagtcacggtgacagtgaaaaatgttacttgaaccatggaatggagcaggtatctcactacactgctaaagccttctgtatagatgataagacaacaatacagtcacaagtttttgtgagcaacccatcactattgagcacctctgctgctgtcactgcttcagaacttgccaccaaacagaaaaaatggagtactgcctatgtggagaaacaacatttttctccctcaccatcaagaattcggcacgaggcaggggatctggattcacaatttagatgtttgcgtcaagttcagtaccacctcgaatacttgtttgatgggtttttgcagtcagttcagggagcatcttctgctgataagtttcacaaggacccctttcacatttctgcttgcagtatcttgttggacagagatacaggatcgccaaggttgcagttgctttcacctgctcgaagcaatggaagggatccatctcccgtttcttgtagtcagagcacagaatgtgtctctcagcattcacagaatggaagcccatgggatatggcttctcaacggagtgtctctgtgccctctggaatcgatattccaccaaatggagtctcaccgtgttcttcttgtgctgattctgaggtttcttctgtttcatggtttcatggctctggggatagcgctatgatgcatggaagtggaaaagacacatactttacaagaaagagctgttatactcgctgggagcgattggcatcttcaagaaagaatgggaaaatactgccaaatcaatcagtgaaatataaaagcaaccagaagtcagctccaggagcaagatttgtgtctcacaaggagcaggccgcaatagacagtagaaccaaagaaataacaatcgatcaagctttgaagatacatgaatacattgaatcagacatgaaaattgttgaaaaactcagttgtcataatcaaaaggaagtccgtcatgacaatgaagcaagacaattaccaaataacaaccaggatgtttgcttgaataagaactttttgcaaaaccgatatcatgtggagtctacacgagctcccagagcaacacatcagattcctatatatcaaccgtttaaaattcaaaatactacagagtgtgatagagctagcctaagtaagaacatgcccagaaagcacagctgtggcacttggaaagagtatgagatacttgaccggccaacaaagcagagaccaatttgtggcccattgaagctagaaaacaga

SEQ ID NO: 17333 - DNA, 164 bp, Zea mays
  Clone ID: MRT4577_115808C.1
acacccttccaaccttcccttttcctccagcacaattttttataatccacttttaatccacaaccaggagcggtttttttaaaccagaggttggaacccaataaccataatatatttccaaaacatcccttcctataatttatttaactataccaaattcccaa

SEQ ID NO: 17334 - DNA, 920 bp, Zea mays
  unsure (1)..(920): unsure at all n locations
  Clone ID: MRT4577_115809C.1
cccacgcgtccggcgtcgaatctcctccagccaccgcgcacactctactggacgcccggtggaaggagttctccgggatttgagctgtttctgccctcacctccgctgggccggcgtcgagtggagatccaatcgaaaatcgaactgacttcatcttctgttggtcaacaagagagcccgttgaaatcctggacctctcaattgtccttttctctctccccgcccaccttcccctgttctgccgcctccccagtccggcgtgcatcagcagcgacatcagagtcggcgatgggaggcgtcatcgacgttctcgtccccttatgttgatgaagtggtgtgccgtggagattccttgaccgatttcttgccggtaagacggagtctgccatctgcgtggctggtcatcgcggtgagcaaggaacgacgaagtgcgcccctccgcccttcggctcgtcgttgtgccttgcgtcgtcgggtggagttccttcccctgcttcaagctaattcggtttttccctctcatcctgtcagttttctctttgttggcattttcggttctctgctgtgaggttttttaaggtgattttgttcgcatctgtgatttgtgtctctgtgttcatcgtttgatgagggattcgatgccaaattcatttgaatcgattacaggaaatcatgcaaaaaatcaaacacatacctgtagaattgcgttggattggattccaaaaaataatgaaggaaaaaggaaaaacaaatctgatccgattttgtggcctgcatgcttactaacttcgttnttaagaggctccagganaatgtaattttgggtagggtttgtcaagcggtggtgcctgaatgtatcttctcctgtcacctccctcctttacattagagttattgggtctacctttactgggtctact

SEQ ID NO: 17335 - DNA, 235 bp, Zea mays
  Clone ID: MRT4577_11580C.1
tttttgggaggaacagaacctcatattctgtaacgggctcagccggcgtatctgcatccctgggtgcagggcagcctctgccgtacctgatgaagacattggccgttgacctgcgcttctacagacatggacaaggtgacacacactaagaggactggcaatgatgcactgcaggcactatccggataggagagggatgcgcctgcttatggccaagacgaaagagatgccttac

SEQ ID NO: 17336 - DNA, 280 bp, Zea mays
  Clone ID: MRT4577_115810C.1
gtgagagccgtcgccgctgcagtgtccatagccaccgcaggagactgagatggggggttgtgtcaagacccacaagaccaatgcgtacttcaagcgtttccaggtgaagtttcaagaaaaggtcccttggcagaacgacttacaggtcacgattaggctgattaaccaagacaaaaacaagtacaatacacccaaattcagatttggtgggcgatttaccaaccaggaccttacaggacaaattatttttggtaggttagccggggaattgggtcttggt

SEQ ID NO: 17337 - DNA, 2070 bp, Zea mays
  Clone ID: MRT4577_115811C.1
atgatgttcggcctcaagaacacgggagcaacttaccagagagccatccaaacatgcttagtcgatcagtggggcaagcgggtggaagcctacgtcgatgatatggtaatcaaaacagaaaactcagaaaacttcatcgaagatttgcagttggtcttcaatagcctgaggcgctaccggtggaagctcaacccagaaaaaggcacaggaagctctagaggcactaaaaatgttttgaccacaccaccagtgctcaagccgccacgtcgagctacgccgaatcagtcggtggaagatctgctgttatacatctccttcacgactcacatggtaagcaccgcgttagtagtcgagcgggcggaggaagggcatgcatacctagtacagcatccagtctacttcatcagtgaagtcctcgggccctcaaagataaagtatcctcaagtccagaagctgctatacgcggtactcctacccgctcgcaagctctgtcactactttgacgaccacaaagtcatagtagtcacaggatttccaataggagacattctccacaacaaagaagctattggaaggatagccaagtgggcgtgcgagctaggagctcacgacatagagttctggccccgcatgataataaagactcaggcgctggtcgactttgtatcagagtggactgagcaccaggttccagacaacccagaggttaccgaggcgtggagaatgtactttgatggctcgttgaagctgcaaggagcaggtgcagggattctctttattgctcctggagtggtcataagccagataaacaaagactgggattgctcgactgactccatgggaaagtattgcggagttgtgcgaaaattggtggacaaattcgaaggattagagttccaccacgtggaaagatacctcaatgcagcagcagacgcgttgtcgaagctaggatccagccgggccccggctccacctgggatcttcgtccaagaaatatcacaaccgagcatcatctcggatcaggtggaagagtgcaacaccttgagccaaccagagtcggaccccaatgactggagagagcctatcattagatatataaaaaatgaagaagaactggatgacaaggctgcagcggaacgcatcacgaggcagtcggcccactacaccattatagggggcttactatatagaagaggtgcggcaggagtcctcatgaaatgcattcactcggctaccgggaaacaattgttagatgaaatccatgtcgggcagtgcggagtacatgtagcgtcaaggactctggttgggaaggctttcagatctggtttctattggccaacagcaaagagcaatgctgtcgagttagtccagaagtccaaagcggtggagtttataaaaggcataatattcaggttcgggataccaaacagcatcatcactgacctgggatccaacttcaccagctttgaattcttcgatttatgtgagcaacggagtatccagattaagtacgcatcagtggcacacccaagagccaatggccaagtagaaagagccaacggaatgatactggaagcactcagaaagaaagtatttgacaagagtgaaaagcttgcagggaaatggatcagagaattgccgtacgtggtttggagcctgagaactcaacccaatcgggctctgcatggaaataccctgtttttcatggtttatggatcagaggcagtgctgcccgccgacctaatcttcggtgcgccgaggttaacttttgaaagcatagccaaagcagaagcgaccagactagaagatattgatgtactagaggaagaacgattgaacacagtaattcagtcggctaggtaccagcaaaccttgaggcgctaccatgataaagctatgcaacaccgatcctttgcagtgggagacttggtccttcgtcgagttctaacgggggaagggcagcacaagctatcaccactatgggaaggaccattcatcatatcagaggtcacacggccgggatcataccggcttactcagatggatgtcatagaagtggggaactcatga

SEQ ID NO: 17338 - DNA, 514 bp, Zea mays
  unsure (1)..(514): unsure at all n locations
  Clone ID: MRT4577_115812C.1
gaacacaccaagcggagggcacgagcagcgaccaaacaacaagggcgaccaagagaccaacccacagggcgccgcgagccccgcncgcgagcgcaacaaaggcgcacaagacgccacaaggcgcacaggcaccgagggccaagacnccacaggcccgccccccagggacagggaaagggccacaaacacccagccgggcaagccaacaggcgacaacaagcgcacgcggcgagcgaccaacaacaaccaagcgcccaancacaacaacaacccggggcacaacgaaccacacaaaccancgcaacgcaacagcaacaacaaaccgcaccagcaccgagccaacgagcggcggagaacccagnggcccacaggcaacacaagcggcaggcacccaacccacgagcgcgggcaaacacaggagcagaccaacaacaacaacaacngcaacagnncacgaccagcgcccaggcaacaagccaaggagaacccggccgcccacccacaacagcaacaa

SEQ ID NO: 17339 - DNA, 628 bp, Zea mays
  Clone ID: MRT4577_115813C.1
cctcgagccggccggaccatacgtatcttataattacatcgaaaaccagatccgatctcaccgacaccgaggaagaagatatcaacggagcccaacaaaggagtacaaaccaccatgaacacagcaagggagcaccatgacgctccacataaccaaggcccatcaagcctgcaatgtgccggccattgactgcactgccgcctgctgagctgcatgccgagccatctccccactgtccgccgaacactcgcaagaagttcactcacatcctcgtactctcgaatgcgaacctgaactaatcgaaggaacccagcactcgctaccaggtctcacacgatgcccatcttccacttctccaagatacggctacgaagctcaacgaccactcatgacgtggcagaaacgacaaactcctgggccagatctagtaaccatgatgcccctgcgcctgccccggccactgactaaaggatatcatatcacccgctcgactccataaagcacagcacccatgggtgcacatgtttcagctatcagttctgcgttactcatttgcgccagattgacaactaccgacgacgattgcatctatcagaaccgcacgcgatactacaccatggatacttga

SEQ ID NO: 17340 - DNA, 1214 bp, Zea mays
  Clone ID: MRT4577_115814C.1
aaaaaaaggtagtattcaagatgtccagctagaacttacaaatattttaaaaaggtaaataaaagggagaatacatttcatgtaactatcaaactgtaacaaacctacacttctacagaaactttacataagacccatgcattttgttgcatgcctatcaaaggagaagagagaagacgatttaaaagttacaattatatacaactaagtctgaccaattgggccctgttggagacgcccaggattcacagcttttgcagcaacacagactcttttggacaaaccttacaggaagctagctagctgggggatacacacgcaagatttagggtggacaaaggagaacacacacacgagaattttgtgacgacaaatacctccttttgacttttatgtattcaactcacatgaaaaaaaccagagtacatggctttaaatcccagctggcacaccctgttcagcaacaactcggtcgggtctcaagccatgcacacgcaagcatgcatgccatccacttctgttcgagctgcagactcatgcactacaagtcttaaatctacatgaagtgctccaccaaccaacccacactggtcctaaatcatgctcttgcaatgcatgcagctactagcttctcaacatacttggcttattccctgatgattcatagtagcacaaactaacaagctaactctaggtgcatgtgactaacacatccatgcattgatgcacaagctaaccctggccagaacatgaacacagaacgtttccggccacttgctcatgcactaaaaggtgcactttctgttggagttcttgcggaattcttaaatctccgggacgtccttttttcaagtcatttgcagcctgagtcagaagataaacacatatggcggcttgttgcttcctctgatgacactgcaaagtcagcatatgaagtttcttcaaaggagccattttattcagttcatgggagcctatttggagaacctggctcctaacaaatattgctttttcatgtggttgaccatgcacgataagtgctggactgcagattgtcttgctcagcggcatcaccagaaatgcttgttgtgtgatcaggaagaggaaaccatgaaacacctttttcatatggtttgggctgcagaaccttgctccccagccagctgagccatcctttgaagtttggtggtactgatcaaagagcggacgcgtgg

SEQ ID NO: 17341 - DNA, 270 bp, Zea mays
  unsure (1)..(270): unsure at all n locations
  Clone ID: MRT4577_115815C.1
ccggcgacgcgnccaatcccctttccaccgccggcgaagatggcgccctcacccccgcggagaccctcggagagaggcccatccgcatcgcgaccttcgcgaacaaacgcaccagcacgtcagtggaggacctagggcaccacgcgggggattaccggcttcgcagcacccacgaccccaggacaggctacgtacatctacagaggaggggccacaaagacgaccccgaaacgatctggctcacgggcgggcccagccgcagcagcgagc

SEQ ID NO: 17342 - DNA, 436 bp, Zea mays
  unsure (1)..(436): unsure at all n locations
  Clone ID: MRT4577_115816C.1
atcaatgacctgaatcaacattttaaatgaaaagaaaaaatattgttccaaaaaaaaaaaaaaaaaaataataaaaaaaaatttttttttttttttttattttttttttttttttttttttttttatttttttattctggatggtcatttttcttttccctttgaacggcccattaatccctgtgggcgtgggggttacattcaatttgacctttacactcacctgcgccgctatgaaaaaacttctttctctcccttttcttactttttcgccaccttccccctttttccacttcnggctgtgagtaaggggctccctccggggcccctttccaccgttttaccgnccctantgcccaaggtacccccctgtgggagggttttaaccccggcgcttggggcttttccccccggtggccctttcctttccggcccc

SEQ ID NO: 17343 - DNA, 301 bp, Zea mays
  Clone ID: MRT4577_115817C.1
cccacgcgtccgagaattgtgggtgggagaattacttagatattaacctaaattggaaagaggctcttgtaaaataggactaggccactcacaaacgcggcgcggtcattaataggataaaactaacctgtctaacgacggtcaaacccaagctaagcagcctaattgatgctcatactgtcgaagataggcagactgatggttcaaagcaaagggatacgccgaaacacattgtgaaaggcactggtagtcggactcatcgtgtgaacaaacctggaaaggatcgtggtatcacttctga

SEQ ID NO: 17344 - DNA, 403 bp, Zea mays
  unsure (1)..(403): unsure at all n locations
  Clone ID: MRT4577_115818C.1
cataccaaaatactaantctaggatgtaaatactatttacaggcatgtatctaccttcttttacccatataaacatacttcaatatctcatctatttcctatctcccttcacttcaactttcctcatacttattctctactccaacactaccatcattacaaacccatcacatacaacacttaaaccttttaattacaaagacataccttcttatatacaccattctgtgagaggatttaagattatacgatatacgacacttgccgtcaatcttattccagtcatccaccctttgaccattccctgttcaaaaagtcccactttctttgataccattcttcttatacaatgtgttaccaaccatacttaatattacactactttcctcaatatatcataccc

SEQ ID NO: 17345 - DNA, 174 bp, Zea mays
  Clone ID: MRT4577_115819C.1
cccagtctttggtattatcatgctcacatgtcgaaccatcaccctcgaacctagggctgggattgtatgatccacagctattgcctcctcacaggaccctccgtgcaacatttattagctattccaaaagacacacacaccatagcttccttagcatgtcatacatcatttttg

SEQ ID NO: 17346 - DNA, 270 bp, Zea mays
  Clone ID: MRT4577_11581C.1
attcggctcgagtccgaatcgactttttttatgcaaagttctttgttatcaagtcaattggtgaggcagatgtgcacaaatcgataaaatatggtgtatggtcaagttcctccagtggaaacagcaagctagatagcgcattcagggatgctgacaggatatcgaggaggcattctactaagtgtccggttttcttgttctaaaaacaaaggagaaaaaaagaaacaagaataaaaaaaaaaaaaggggcggccgccaactagtgagctc

SEQ ID NO: 17347 - DNA, 660 bp, Zea mays
  Clone ID: MRT4577_115820C.1
ctccccgcccgcacagccactggccgtgacggagcggcccctcccgttcctcatggattcgcgcgcgttcttcctttctgggcgagggcgaccaccggaaggcagcagccggcaaccgcgactgttgacatttgcgttagagatctggggggaaaaaggcgaaagcaacagccgatcaggcgcccaagattcgcgtttccagtgggcacttgtggagggagtggcaggtgcatcgaagagcactacacactcatcttggcagcgcggtctgtggctgattgagcaagcagcaagtggatggaggaggccggcaggataatggcgcggccgggggtggtgtggcccacggctgtgcccggccggggccgtttacttttggcccccttggtgcgtcgggtgatgtgtacgtctgcggaaggaaagcgtctctgtttgccttggccctacggcgcagcgtctctgttcaaggaaaaaaaaagagtggaattttatatctggtcagatttaaaactatcgtagtttaactaaaactttttaaaaactaatatggcatcaaactagtacgctataaaaacaatataatagtacttatttgttatggtaataaatattagtaactgtatttatttatttatttaccttacgagtcttgactttggg

SEQ ID NO: 17348 - DNA, 253 bp, Zea mays
  unsure (1)..(253): unsure at all n locations
  Clone ID: MRT4577_115821C.1
acaaaggaacacagcggagctcgagggccgctttttttttttttaagtggggggggggggnggatttttttttttttttttttttttttttttttttttttcacagaacacaatttttacttaatcaaacattacccaaactgacattttgacaagtgtttcctgtgatgacgacattggaaacaggaatttaggttcaaggtggcgcctttggtggggggcaagggtgtcctttctctatcccaccagacct

SEQ ID NO: 17349 - DNA, 572 bp, Zea mays
  unsure (1)..(572): unsure at all n locations
  Clone ID: MRT4577_115822C.1
tccgctggntcgcggtngacgcccgcngagccttccccggccgcggcggcctccccgcccgcacagccactggccgtgacggagcggcccctcccgttcctcatggattcgcgcgcgttcttcctttctgggcgagggcgaccaccggaaggcagcagccggcaaccgcgactgttgacatttgcgttagagctctacgtgcaaaagtccaacttcgctgtacgaaggcttagctgttatccttctctgggtcgtcatcaaacttcggaagttgccacagaatatctttttccagagcccagattgcagatctggggggaaaaaggcgaaagcaacagccgatcaggcgcccaagattcgcgtttccagtgggcacttgtggagggagtggcaggtgcatcgaagagcactacacactcatcttggcagcaatatattttcgggcctgagctcgcatcgcacatatggaggatatgaacaggataatcgaggataatcttagaaaggctgtgattaacgtcgtggtcaatgtaggcgcggtctgtggctgattgagcaagcaacaagtggat

SEQ ID NO: 17350 - DNA, 792 bp, Zea mays
  Clone ID: MRT4577_115823C.1
cggcggcctccccgcccgcacagcaattcggcacgaggcgcacagcccttggccgtgacggagcggcccctccagttcctcatggattcgcgcgcgttcctggctgggcgagggcgaccaccggaaggcagcaaccggcaaccgcgactgtcatttgatacccgcgactgtcatttgatacccctgacatttgcgttagagctctacgtgcaaaagtccaacttcgctgtacgaaggcttagctgttatccttctctgggtcgtcatcaaacttcggaagttgccacagaatatctttttccggagcccagatctggggggaaaaaaggcgaaagcaacagccgatcaggcgcccaagattcgcgtttccagtgggcacttgtggagggagtggcaggtgcatcgaagagcactacacactcatcttggcagcgcggtctgtggctgattgagcaggcagcaagtggatggaggaggccggcaggataatggcgcggccgggggtggtgtggcccacggctgtgcccggccagggccgtttacttttggcccccttggtgcgtcgggtgatgtgtacgtctgcggaaggaaagcgtctctgtttgccttggccctacggcgcagcgtctctgttcaagccttcaaggaaagcgtctctgtttgccttggccctatcgtagtttaactaaaactttttaaaaactaatatggcatcaaactagtacgctataaaaacatataatatatagtacttatttgttatggtaataaatattagcaattgtatatttt

SEQ ID NO: 17351 - DNA, 232 bp, Zea mays
  Clone ID: MRT4577_115824C.1
tctccacgcgtccgcccacgcgtccggaatagcagaacatcgaatttctctccaatcgcgccatcgccatatgctctccttcacacttgaagttatgcttgattggatgcctgggttcactatggttgcagttctgcttcaagcaatgaccatgagtcgcaatcgtgggctatgatgcaaacaccaggctttgtttattggctaatgtaactatatgatgaattctaaagct

SEQ ID NO: 17352 - DNA, 829 bp, Zea mays
  unsure (1)..(829): unsure at all n locations
  Clone ID: MRT4577_115825C.1
ctaagatcgctatttttcctctcgctcctcctgtgggcggcgccgccgctgcgcacagaacacatcctcgccagcgtagcttctccggcgtccggccaacgcgctcactagcctcccgccttcctccacatctcctcgcctccaccccatccagttcgtgccattcgctgctccaagacaagggcatggcgctcggcggctgcggcaacgaagctgatggtgcacgagccaaccatggaggcagtagcacggggcagcgacaacagcatggagggcgtcctcttgtttgggaaggtaatggaactgcaaataggagtggcagcggcgaccaggatgcaaatggaagtggttcccaaagaccttggaaaggacttaaagacaataacttatatgatccttggaaccatgcatggccgtattatgggggttttgattgcacgtactgcagcctaaagcacaaaggtggaggtgcaacccgtgtcgcggagcaccttggtggtattgtaggtaatgtgaggagctgtcccaatgtgccaagaaatgtgagagatgcaatgagagagtgccgggatgaatcaaggaggaagaaaagagaaaacaaaatagcaggctgagaattgaaagaaaatattatggaagggttgtataaaaaaggaggggtggttaacgtaccagatgatgatgaagaagaaattcagatgaatattagagaagcattgcgtgacccgaatgtctctcgcagaattgaaaggagaatggcaagnggggnggtgggtgatnggccatggttctgttggtaaaagagtatcagcgcctattttgacaggca

SEQ ID NO: 17353 - DNA, 951 bp, Zea mays
  Clone ID: MRT4577_115826C.1
ctcgagggccgcgggtttttttttttttttttctgagaaggtaattgtttcttttatcattaaccattgtttcttttatcataacccagtacacaaaaacattgtcatgtgcaagtttaacggatcctaaaacggaatgaagaatgctttcccgtccacgttggagaaaaagttttccctgtttacatccttgtggggaagaaacttctgcatccctattttctaatgtcgctggaaatctgggatcgagtcccgttgccatctctaagttactccaccgcgatgaaatcaatagtgctttcttgtcttctctttgctttatgtccaaagagatgaagtcttgcagagaagcagtaatattgcagaacgtgtactccgagtaatagagtgcttacattctcctctgtataagctcccaacccttcggtgagaacttaaaatttgataagggcgtagggcagccaccttcgtggcgtaataccctggttaattagcattgtatagacctatatctacaattaacctgatctgaagagctttagaattcatcatatagttacattagccaataaacaaagcctggtgtttgcatcatagcccacgattgcgactcatggtcatgcttgaagcagaactgcaaccatagtgaaccctctcttctggctagattttcctgatgacgcatgcccaacattcgaagcaacccaggcatccaatcaagcataacttcaagtgtgaaggagagcatatggcgttggcgcgattggagagaaattcgatgttctgctattcccttttttccttggggccttccaatgtcgagacactggtcttgagggtgaaggtattggcatcatttgagaatcgggtctagaaactgcttttggaaaatgattgggattaggtaaagggcgaggaggaactacatgggaaggaacccggacgcgtggg

SEQ ID NO: 17354 - DNA, 378 bp, Zea mays
  Clone ID: MRT4577_115827C.1
ctacaaggggctcggcgagaacccaaactgctatcggggcatatacgtcaagaggtccagcgacctggagcccatagagcactccgtcatccctcgcatgatcggcattagtagcatcaagcccgtccactgctggtcgctgcaccaccgatactccaccgagctggagcactcgcggagcttacccatgctcaccggctacccagccctgaacgacgccgacgtcgagaccacgagctaattctccagcccgataaaatacaccgtcatcactagcagcatgacccttcattcagatgccgcggataacgacaactcacacacccactcacataatatccgcgaggtccacagcactgtacaatacggcttctactc

SEQ ID NO: 17355 - DNA, 593 bp, Zea mays
  Clone ID: MRT4577_115828C.1
ccggccgggagccgggttaccttgcagcatgaagcaagtcgcgaccaaatggcgcctctaggagacggcggtgctgctgacgcggaggcagtgcaacaacctgatggcgacagttaggctagatgctgatccgacttcatctcccgacgtgtacgggctgtagatggacaattcggacggcttccacatggttcttgatggatcgcccgtcaacgtggtctgcgccgataacaagttcggtgaatccttcgcattctgcggcaaggtgcgctacgtcgagtactggcacatgctgacgaacatgctgaaacgcaacaatgagaacggggtggggtgtctgtacgacaagcacactcggacggtgctggccttaaggacccttatgcaccacagactacgcgagttaatggtctacaggtaccatagcgcatacatgctgctgacggaggcatgagctgcactgtgggcctgttgcagagcgacatggtgttccactacggattgatataactcatgtccgagccgagccgttcggtgcacatggccgacatgcgcgcaaacaaagccgccggcgagctcagctcctacgaccc

SEQ ID NO: 17356 - DNA, 1556 bp, Zea mays
  Clone ID: MRT4577_115829C.1
ctctacaacctctacggtatgactccgccctgcaatagtgtttcgagcgtcgtggatttcgtccccaactacatcaaggcgaaaatagagcgccacaagctcgccaagaagatcaaggagctcaaggagcgggtgaaagacgtgggcgagaggcgggagcggtacggcgttaccgtcccgcccacacaggccaagaagaggtcggaagccgggactagtgcaggcgacaacctggagacgaagagaaaggaaaggcaagagttcgatcaagccttacgagaggaggaggcgttctttgatgagaagaaggacgaggcggcaggtctctcttcgccttccacgtatatctctaacatggtgaggagatggtggatatctcgtccaccatttgaccaggccatccgcaagcttgcgcctgagcttgcaccttacgctcgcaagatacgtggagccctcctcaagcacaaggctggtggcatgaggaagaatcacgacggtcgacggttccatgtccatgacgacaccgtcgtcgccatctgcatggagatggtcctccgtgctcttcacgcttttcctcaaagccgtgttggcaaggagaaagaggaagagctaaacaaactcatggaggccttgcacgtcgcagaccttcccaatcgggtgatgaccttctgctacagcgagctgaccacggaagagaagagctgcctgcagtacctggctgccttccgactcgaaacaagcatcagcaggacaagcttggtccggcgcattgcagcggaacggctcgtgaaagaggacaaggagcaccagctaagcatggagcagagtgccgagagatgcttcgaggagcttctctttcggggattcatctccgctgatgccaccggcgccgctggcaaagtcaagtgctgccggttcaggagtgaatcggtcaagcaattcatcgtggacatgtgcaaggccgagaactttgtgggtggcggcttgccggttcaccttcgaatccagaatgacattcgttctgcggcgttggaaggcaagcagcagcacgatgatcccgtcaacaagatgctacgagagctggacttgctcccaaaaagctatcgtctcaacgtcatggatctgggaggctccatgggaatactgaagaagagccacctggcaaacatctgcaagttacggacactcaagtacctcagcctccggtatacggatgttcgtagcctacccagtcaactccaggagctccgtctgctggagacgctggacattcggcacaccaatataccacgtggctcccgcaacactcaagcacttcttccacccagcctcaagcatcttctagccggcaacgtcgactctcagggtgacgcccccaacgccacagtgagaatgcctgacagtatccaggaaatgccatgcctggaggttcgtaaccgtacgttctattatattccctctagctagctctgaatataatcttgtggaaatactgtctctgatctgaagctgttactaataattaatagaagaaataaacaaaagaacattattgc

SEQ ID NO: 17357 - DNA, 383 bp, Zea mays
  Clone ID: MRT4577_11582C.1
caggcgtgtaaggtttatgatgagtatcagtcagagttagacaacactagtgctttacagcttgaatcttatgacgagatgtgagatccagctgaagtgatctgaacagtacgttgaaacgaattacgcatgttctactagaaggcagtttgaggagggatgtcggtttataagtttcatgcaaacttacatttgcctaccgaaagacaagtctattatggtgtagcggaacactagatgctggccggccaaaaatattgtatcgactgttaatgcttgttgcataccaaacttattggtgtgtgagctactccccttgtaggcagatgtcatgatatagaataggttcgttatactggacttatttaacagttgaataaact

SEQ ID NO: 17358 - DNA, 835 bp, Zea mays
  unsure (1)..(835): unsure at all n locations
  Clone ID: MRT4577_115830C.1
attgggtacctcgaggccggccgggtagaagtactccaatcccacactccattagactatctccagcagcttacccatccccatacctgtattcaaactctactctgcgaacagtgtagtctacagtgcaaagcaatgcatgtgggtaaattttaggtaatttgctggagtcgacctgatcgaccaacctcattgtgctttatgtgggaatgactgcatgccctttcccttgtcttacatatatatatttttttgttagttgagtctgtaatatggtaaatttattttgtctgaaagtatgcctgtaatacatgaccatattacgaaattgtcccgtaggtgaagttttttatatgaccatagatattaccacattggagattataatcctatatttctccgtaattcaacattcacaaaggtatatacagctcgtaaaactgcacctcacctattaactgtatcatatttgttcattcacaacttgtagctgcaattcctgggatcttgtccgcctcccccattcttccacggttcttccactgccttatctctgttgaataatctacaacttttgcagcctttaattgcataagttcatttttgtgccattaaggcattaattcggctcctttgatggttgtaggttccattttcatgtgaaccagtaccctccagaacattcaggccgtcaattattcagagatatccatatagtctttcaatttgttttatttatacttattgcattttgngtattgtttgatacaacttagcgatattctatgaatcactatccgtttgngtgataaataaatgttccctagtttagacc

SEQ ID NO: 17359 - DNA, 408 bp, Zea mays
  Clone ID: MRT4577_115831C.1
acgcacaaatcttgctgcaagcaacagcaatgtagacgcacaatggactgatccatgggcgggacattctgaccaggagagcctacacagccatgacaacaatgaattataactaaggcttctgacgatgctcgaatgttactggctagaggaggaagatgatgccatgccctctgtcaacaattcatagaatgactacaactaagagaaccagccctatgtgtgaacacatgtactaaccacggtccaaggaccaagacaacatatgccgcgcatattattggacaatggcctagtagctgtggctagtcacatacgagcgaagtgaagctacagctagcaaaacctaggctatgtcccattggtctgtggtcagaagcttgacatgtcatgaccatgaagtatgtg

SEQ ID NO: 17360 - DNA, 346 bp, Zea mays
  Clone ID: MRT4577_115832C.1
cttggaacaccatattagtatgattggccaaaaatacctgcaaacaaaaacctattcattattctttcgtgttgtttcattccgggtgcaaacaaaggggacaacaggggtaccaatacctaatacataggtagtacggtctcttacaatgagactgaagtgatcgggtacacgatactataaattgattagatatcttggtcgtatcccataggggcccacacataagtgattccagtcttacagggcgttaactaactggctactacctccgtggcgcctatcgggttatccgccaccgccttctgggcgccggaactagcgtcacgccgaacgtcaaacgcca

SEQ ID NO: 17361 - DNA, 417 bp, Zea mays
  Clone ID: MRT4577_115833C.1
ggttgcatgatttagtgagaccgatcctacacaccaccgaactagtagcccgcccaagcccagatccttaagaggcaaacggcaaaccgatagcaccgaacgcaaaagcgggggaaaaaaaaaaaagagacacaaaagcgggttcaagagcacccaaaggccggagaacaagaacagaacaactgcctcaatgatcgggacggaaaccaagaggaatggggacaagaaagagaaactggggggggcaaacccaaacatgtaaaaggaagatccagctcgaggggaagcgccatggtggtcgctccacatccgcgggagaggaaaaccagatcctgaagggccgggtaaggatgagcaccaggctgtaaaacgaagggggggcggaccctggtaagggggatcccaaaaacacccaag

SEQ ID NO: 17362 - DNA, 336 bp, Zea mays
  Clone ID: MRT4577_115834C.1
gactgctccaggccggcacgctggcgccatggaggagtacgctcgcgaaccttgcccgtggcgaattgtggatgattgtggcggagcttacaccatgggtgtcattggtggtggagtcttccaggctgtcaagggcttccgcaatgcccctgttggaattcgacaccggttcagaggtcgtatcaatgctgtgaggatccgagcaccccagattggaggtagctttgcagtatggggtggcctgatttccaccatcgactgtggcctggtccggctgcggggcaaagaagacccctggaactccatcaccagtggagcattgaccggagccgtgtt

SEQ ID NO: 17363 - DNA, 306 bp, Zea mays
  Clone ID: MRT4577_115835C.1
cagcattcaaaaacacaccaagcgaagatcactatcaacaacctaacaacaacggctgcgggaatattatttccttcttgcgctttttgccctattagtgagcgcaacaaatgcgttcattattccacagagctcacttgctccaagtgccattatttcacagttactcccacctgttactttaatgggcttagaacatacaaccgtgcaatcgtacattgctactaatagcgcttgctgactgcgtaatagaacaaccacttgctcaattgcatcatcaatcccggtgacttttgtacctacaaa

SEQ ID NO: 17364 - DNA, 297 bp, Zea mays
  Clone ID: MRT4577_115836C.1
gacctggacgactgccgttgagtggtcatcatgttaactttcgttgagtgtgtgaccaatgagaggaggcaaaacagacgattgacaacagttaaactgacgtcttaccatctatgataaaaccacactatgtcggttgtttcacacacaatcactaggctacacttgtacattcttttgccctgcaaaggcaatctgcttgagaaactttatttactgggggggatggtaccagaaacggttgttggcattacaatcgtgcacatggcactagagtttaatacagtggcaccatgc

SEQ ID NO: 17365 - DNA, 288 bp, Zea mays
  Clone ID: MRT4577_115837C.1
aggaaacagatttgcacttttatagaggggggacaaggactatcttgtctttgggacccaactgtaggcattgctcatgttcgcactcccacgcatacataaggtcccacttttccctcctggccggaagggctaactaggatggtaagtctgtccttaacatcggaatcccagggatctttccagggataggggttacggcgccctttttcttggccccgatccacatgccctggccggggttgtggtcaacggggccgacagccctctggtaggagagggttaacc

SEQ ID NO: 17366 - DNA, 295 bp, Zea mays
  unsure (1)..(295): unsure at all n locations
  Clone ID: MRT4577_115838C.1
tcccgggctcgactccacgccgatctcgcgttcgatcccgtcccctggcacgtcntggaagaaggtggtgtggtggaggtcttaccggaccgcgggtagctcgggggcggtgcgccccaactcttgccgataccgannggtgtccgcttcctttatttcattcgnngtccattccgcctctcggaaagagttgagaagaggagtaagggaaggcgaaggacctcggcgccccgcgatgggccggcgaacctgtaccgccctcgaacttcgacnggcgtctttgtgcgacaagctg

SEQ ID NO: 17367 - DNA, 421 bp, Zea mays
  Clone ID: MRT4577_115839C.1
ggaaaacagaacgaaataatgccttgctttatgtgtcaaaatctggattaatcggtgtgaatgaacgaaataattaggggagaaaatgtaccggtgactgaatcgaacgcaggcaaaaaagggacaaaataatgtgatccctctacacttagtgttcttctctgaaccattatgggaaatagagaaatcaaatgcaacatggcaaggaggagactccaatcaccttcgatggcttggatcggcgacctttgacagaatcgaagacgaagagtacgaacacgatggactttacttccttttctcagcaccgcctgcgaggggggaagggcccaaccgtttggcgacatcaaacttggaacgatggcattgggaagtgctcctcaagctggcttggctcgtgacgacctttgtttggacctgt

SEQ ID NO: 17368 - DNA, 278 bp, Zea mays
  Clone ID: MRT4577_11583C.1
gaacaggccgacaacatggaacgcacgcacccgggggaaaaaagaggcacaacgctaagcggaaacacggcctccttgaagaggccagccccacagagaccccgggaacccacaaggggaacccgccaacagtggacccccactgccgacactggtaacggacgaccgcacacaacaaacggccaccgaagaaacaaaagcatgccagccagattccaaaccaccaaaggaggggaccaaacccaacggcgtaggaacggaaaaggattgcatagggc

SEQ ID NO: 17369 - DNA, 406 bp, Zea mays
  Clone ID: MRT4577_115840C.1
ctcttatctaagaaaccttcattcaaatggatttcatgtgtggataacgcggaactgtatttcagacataaagaaacattcgattatcaccaaagtctcttgggtctatttatacttgcaccttataccaattatttaccgtggtttatacatgccctatgcacttagttaaaacagccagcataactgcaagcccgccagcccttgaccgggccgcttgtttcgggcctggtggccgggaaccttatccagaccatgacgcccccatttttgggccccttttgcaccttgggcagcaaaacgtagtaaagggatttgagggataccttaacggggggcggcccgcggtcccggactccctttctgggcggggtcaaccccacctaaaggtggcttttgggggacc

SEQ ID NO: 17370 - DNA, 376 bp, Zea mays
  Clone ID: MRT4577_115841C.1
tttttatttttttttggaggctacttaaggaactggaccgtatattcctaaagcttatccaaactagcaggaaatacaagattattgcaaataaagtagatgctcttatgtataagacacacacaaacgcgactccaaatgcaccaactgacataaacaatgccgcaaagcaagtattactagcagccacgacagtagaaggtagggatttaggaatatgtcgccggcaggcaagggaacccaaccgcaactacgcggatccaaacttgtcagtacacaagcggggatggcaacatctgaacgacgcctctgcagctctgctcttcgtctagttttgtccttagccttcgtgtagtcgctagctatcaacgttgga

SEQ ID NO: 17371 - DNA, 856 bp, Zea mays
  Clone ID: MRT4577_115842C.1
ccggcgtcagaaaggtggctagggttagctgccccacatcgctcgccgctcacgccgctctactccctgctcgcggcatcgctttgctccccgctcgcgacatcgctctgctccctactcgcggcatctctctgcatcgccgacggctccctattcctggccgactactcacgccgctctgctccctgttcctggccgacggcggcatcgacgatgacgaggttctaacctagagggtgtgaagaaccaaaagttgttttgggatttgccgcctcaagtttcatctagctacctccaacaaatccttcaatctccatggctacatcggtgcgtatgagggcttcagcaacattactttcttggggcatgacatcaatcgaacgcgcaaggatctattacgacagataatggatctcctagagtgcacatatatgtctccaggtgagacctacactgaacccttcgtactacaagcctttagaggtaaaaaaaacatgtaggcagagcatatttttctgaagcgatgggaaatttactccctattgcttttacagtatactactataaaagtgatatcttatcgctcgggtgagaagtctcatgtatacacacctgctggatagaatgtgtgtgaaaagtgtaatgtccccattacaaaggaaaatattagctctcgcaacacgacctttgatatgccctacaatatcattaatggtttgttgtcactattggatgcgggtgcaagtcatgcaacaacaagctcaaacattatagcagcatgaatagggatgagtacgtggagaggaataaggaagcagacagatatagacataatgttgagaacatatggatccac

SEQ ID NO: 17372 - DNA, 584 bp, Zea mays
  unsure (1)..(584): unsure at all n locations
  Clone ID: MRT4577_115843C.1
aattcggcacgagggacagagagagcaggataggcgtgaaccagntcgtctgtggcaggccctggtactcctggcggctgggagcgtgctgaggctggcgcgcgcggtcatgacgcaatagaactgcgtgaagaacaagcaacgggaccagagcatgaaccatgtgcatgcatgatccgactgtcacgctggatccgctggccaacagacctgcggtgatcgcgcgggcacctacacgctgcacccgagcacccaccccgaggtctccggctgctgaaggacggtgtgcctgcacgcgcccgacaccgaccgaatgtagctgcaagctcttgtccacggcggattcttctacctggacctcaacgaggaggcggagcagggggtgctggtatgcggcagccctcatggctggccgatgcatggccgctgcctcggctgcggctgcaccatgcagagccattggtctgtgcaccaggtggctagcgaggactgcagtagactccaggagaagaacatcatctactcgaacccgcacaagtgatgcgatgcggacatggggtcggctcgccatctcgccacctgtg

SEQ ID NO: 17373 - DNA, 252 bp, Zea mays
  unsure (1)..(252): unsure at all n locations
  Clone ID: MRT4577_115844C.1
ttccctgccaaccacccccacaccgccagggggggagacacagaaagagggggaggcaagcagaccacgagaaacaggcggagcggaccaccacacgaacgggcgcaggcgacccggaacgcgacgcccggaaagccaaccagcgccagccgggacagangcaccaccaccgccgcgaggagaaggcgcacgacgcgagaaacacacnggcggaccaactgcgcccaaaggtagcagaccaccagcgggccc

SEQ ID NO: 17374 - DNA, 657 bp, Zea mays
  Clone ID: MRT4577_115845C.1
gcggcgggccgggagtcaacacgccaagcgcgcctcccgtgaccccagcggcccgtcaagtcaaagcatggacgtgccgctcccgctgctgctcggctccgtggccgtttccctcgtcgtgtggtgccttctgctccgccgcggcggggccgggaaggggaagcggccgctgccgcccggtccccggggctggccggtgctgggcaacctgccgcaggccggcgccaagccgcaccacaccatgagagctctggcgcgggagtacggcccgctgttccggatccagctgctcagcgccgatgtggtggccaagacacctctacgtatgaaagataaagaatttttttttcccccccccccccctcagatgatttgattgaagggattattgatgaagctatgaaaaaaaaaaaataccagaagggtttcattcttgatgtctttcctagaactgagactcaagcacataagcttgatgagatgttggaaaagaaaggtgccaatgatgacaaaatactaaactttacaattgatgatgatgcatagaaagaacggattactgaaaataagatacactccagcaaaggaaagacttaccaataaaaatttgccccaccaaaagctccacaaaataatgatgaaactgcaaaaacattg

SEQ ID NO: 17375 - DNA, 725 bp, Zea mays
  unsure (1)..(725): unsure at all n locations
  Clone ID: MRT4577_115846C.1
ggtaccctcggagcggccagcagaaataaaggcacagccggagctagctagcaggcagaggagcaggacgtacggctgctgctgtgctacgtacgtactcatctgctagctagctactgcagatccaagagtaacaagagccagcagattagctatatatacgtagcatagcatagcagctatcatcatcagcaaggatccccaagcattaatttggtgtggtaaaacatacactacatacatatatatatatagagtacatggcgccaataaaagagatcatggctggtgaccatggcggcggcgaagggaaggaagtagtggtgcttgtgggagactacgactacgagctagaggaggaagacgaagacatgctccccgggttccggttccaccccaccgacgaggagctggtcaccttctacctccgccggaaggtggccgggaaacgccttaccatcgagatcatcaaggacttgaacatctacaagcacgacccatgggaccttccaaagtcgagctcgacgatctcgggagagacgaaggagtggtacttcttctgcctgcggggnaggaagtacaggaacagcatcaggcccaacagggtcaccggctccggcttctgggaggccacgggcttcgacaggcccatccattcggccgcgtccggccgcgccggcgaccccatcggcttcaaaaagtcgctcgtcttctacccgcggcag

SEQ ID NO: 17376 - DNA, 1981 bp, Zea mays
  Clone ID: MRT4577_115847C.1
gggtaccctcggggccggccggggaaaaaaaaaaaaaaaaaaaaaaaaaccacgcgtccggggcgggaaaggacccaagctgaaagcatcacactcgcagttgcagagttccgcttcatcagtcccacactctccccttcctccccccagtcctgagcttcgccgaggcatacggacaataccggcaccggcagcgagcagtcgggagccatggctccgcggctcctgctcttcctcctcctcctcctcccgctcctcgccgccggacaccagcacccgtcctcctacggctcctccgcgctttccgagtggcgccccgccaaggcatcctactacgccgccgaccccgaagacgccatcggtggggcgtgcgggttcggggatctggggaagcacgggtacgggatggcgacggtggggctgagcacggcgctgttcgagcgcggcgcggcgtgcggcggctgctacgaggtcaagtgcgtcgaggatctcaagtactgcctccccggcacctccatagtcgtcacggccaccaacttctgcgccccgaactacggccttcccgccgacgccggcggccactgcaacccgcccaaccatcatttcctcctccccatccagtcgtttgagaagattgcgctctggaaggccggcatcatgccaatccagtaccgccgtgttaagtgcctccgtgaaggtggtgtcaggttctctgtcaacggtcggcacttcttctttacagtcctaatcagcaacgttggtggcgcgggtgatgttagatctgtgaagatcaaaggaacagagttgggatggctcccgatgggccgcaactggggccaggtgtggcacatcaactgtgacatgaggggacaacctctatcgtttgagctcagctcgagcgatggcaagacgctgaccagtttcaacgtcgtccccaaggattgggagtatggcaagacatacacggggaagcaatttcttctgtagagaatgagcgccacaagatcagcttacagtttctcattttttgttctgatcctacgagttgggctgtggtgtacattctctgcacttctgcagaacaagtaatatcattattaggagaaaattacttagtgcaaggcctcagatagttgctcttggtcataaatggttttccatgtccccttcatagttgtactaaagaggcttgatgtatcattcaaaatagaagcctccgttgtattacaatattttacctagcaagcaatgataatgtatttctgcatttctgtattagtaacaagggcagcaactagaactttgatttcctgtttctttttgtttaccaccaacaatgtcagcttatgctaaactctgacgctggtcttcagctgcaggatgtagaatacatgaaacatattccaatttgtagcatccattctcttcacacatcgaataatctagcagatcattttcttagggtctgtcacgcaatgtaatagaaaagtgcatcaagggaaatgggtatgagacccatgtgaaatctactctagtggtaacctgctctatgtgatcggagatcccgtgaagtagagtggagaaacaagctaggagtagattgtgaggaaagatcccttctttaactcatttctgatgcacatctttcctatctgtaaggcaggttggtttttaccttaatgtattccaagagtcttttaaaggtgagatgttgtcctacagaacatcttttgaggaatacacctatatgagttagactgctggtcacagtctatgggactagggtaatccctaaatactcatgaaaggcactaaagtgtgacttatatgcttctaaaaagcgggaatacccttttgcagcctagtatcagcaaaggatttaagtgaatcttatttcgcacaaaactgtcaattcaaggcatagtccattgttcagttgtgaatgagtgaaactcttattctaaagtcgacccgcaggcag

SEQ ID NO: 17377 - DNA, 662 bp, Zea mays
  Clone ID: MRT4577_115848C.1
tgctccttttgttgctgaattcccccctccaccgatattgatgccagtacctggtgctggtcccctaggaccatttgttcctgcacctccagagatagcgatgcatatgctgagagagcaagggccacctcctccgtttgaaccaaatggcgcaccacatggcagcacaggaatgctcgggccaatgctgggtggttcagcaccgattatagctatgcctccgaatttccgccatgaccctcgcggtctgagaagttataacgacctcgatgcccctgatgaggaagttactgtccttgactacagaagcttgtagggtccagcatccattggagatttgggctgtttcctctttatatgaaggggaaaaaaggaaggttatggacaagtaaatgaatttttttggtcgcctgtgtatcctgttagattctgttgtaacttgaatagccggaatttctatttgctctcgcgttcgtcgaaccatactccctgaatgcgctgccgttgctacagttgttggccaactttctttgacacaacgctgtagtactccctgtcccaaaaaaataggacagatattttttttgagatgtcttttgaagcgaaactttgacgataatttatttttaaaatatgatatcaacaaatgcaaattaagcatc

SEQ ID NO: 17378 - DNA, 2564 bp, Zea mays
  Clone ID: MRT4577_115849C.1
cctcgaggccggccgggccgggcaaagacccaagctgaaaggaccacacttgcagagttccgcctctcactccggaacctcctcactccttcctctcccagtccccagcttcaccgaggcatacggcataccataccggcaccggcagcgagcagtcgggagccatggctccgccgctcctgctcttcttcctcctcctcctccccctcctcacggccctcgctgacggacaccagcacctgtcctcctacggctcctccgcgctctccgattggcgccccgccaaggcatcctactacgccgccgaccccgaagacgccatcggtggggcgtgcgggttcggggatctggggaaacacggctacgggatggcgacggtggggctgagcacggcgctgtttgagcgcggcgcggcgtgcggcggctgctacgaggtcaagtgcgtcgaggacctcaagtactgcctccccggcacctccatcgtcatcacggcaaccaacttctgcgccccaaactacggccttcccgccgacgccggcggccactgcaacccgcccaaccaccatttcctcctccccatccagtcgtttgagaagatcgcgctctggaaggccggcatcatgcccatccagtaccgccgtggtggggtaactttgttacaatcccattatgtggaaaaggtattgagtcgctttggctttagtgactgtgatcctgctccaacaccttatgaccccagtgtgctattaagaaagaatcggagaatcgcaagggatcaatcgacatactcccagatcattggctcgctcatgtaccttgcaagtgcagcaaccccagacatcccttatcctctgatccacctcagccggtttgtgtccaacccaggagatgatcaccggcgtgctcctgacggagtgttggggtattccgaaggtactatgacatacggtattcattataccggaaacccaaaagtgctggaaggctattgtgatgccaactggatttctgatgctgatgagctttatgccacaagcggatatgtgtttctgtttggaggtggcgctgtttcctggaagtcttgcaagcagactatcttaacgaagtctacaatggaagcagaactcgcagcattagacactgctggggctgaggccgagtggcttcgtgatttcctattggacttaccggtagttgaaaaaccgataccggctatttccatgaactgtgacaaccaaacggtgattacaaaggttaacagttctaggaataacatgaagtctacaaggcatgttaagaggagattgaaatctgtcagaaagttgaaaaactccggagttataactgtggattatgtccacacatcaaataatctggcagatcaattcactaagggtctatcacgcaatgtgatagaaagtgcatcgagggaaatgggtatgagacccatgtgagatctactccagtggtaacctgctctatgtgatcggagatcccgtgaagtagagtggagaaacaagctaggagtagattcggaggaaagatccctgcttaaactcatttctgatgcaatctttcctatctgtaaggcaggatggtttttacattaatgtattccaagaatcatataagcctgagattttgtctaacagtacacattctgaggaatacacctataagaggcagactgctagtcacagtctacaggttttgagtaatccttatatcctcattaaaggcactgtacttagtcttatatgcttgttagctgcgggaatacacatatgcagccagtttcggcataggatgtgagtaaaattaattttcataaatctttcaatacagagcatagtcctttgttcagttgtgaataagtgaaactcttattctagatggatgttcaacttaacagtctccatcgaaacactggtatatcaaaggattgtgattctgatattaagtgcctccgcgaaggtggtgtcaggttctctgtcaacggtcggcacttcttcttcacagtcctaatcagcaacgttggtggcgcgggtgatgttaggtctgtgaagatcaaaggaacggagctaggatggctccctatgggccgcaactggggccaggtgtggcacatcaactgtgacatgaggggacagcctctatcgtttgagctcagctcaagcgatagcaagacgctgaccagtttcaacgtcgtgcccaaggattgggagttcggcaagacatacacggggaagcagtttcttctgtagagaatggagtgccgcaagatcagcttacagttcctcatttttcttctgatcctacgagttgggctgtggtgtatgtatattcctctgcagaagaagcaatatcgttattaggagaaaatcacttagtgcagggctcagatagttactatggctcataacgccttttcatgtacccttcatagttgtctaaagaggcttgatgtatcattcaaaataggaggccggattcgggtatgtccggtgtattacaatatattttttttcctggcaagcaatgataaaatgtctctccatttctgt

SEQ ID NO: 17379 - DNA, 166 bp, Zea mays
  unsure (1)..(166): unsure at all n locations
  Clone ID: MRT4577_11584C.1
acgaagctggagtcctctnatttttcccacgcgtcctcgacacccgcgtcaacatcaccttctggaagatgcttttaaataggagcgggggccccttaaatcccctcctacatgtctctcaacctccttatttcaacgatccatctaagaacaaccttactacatt

SEQ ID NO: 17380 - DNA, 129 bp, Zea mays
  Clone ID: MRT4577_115850C.1
acgcgtcaacctaaacgtccggatccgccgtgactcacatgacttcctccatagtctcccaagtcatgcactctcagtgaccactatgttaaacctatctcggtcatccccaccgggatgcagttcctc

SEQ ID NO: 17381 - DNA, 283 bp, Zea mays
  Clone ID: MRT4577_115851C.1
tttgggtggtttttttggaacttttttgggcctacattcattggcaacaacaaacgaaggatggggaatgaacagtccataccgcgctcgcatagaatgaaaatgaacggactagccctagatagcaaaaactgacgtgaagagtgagttagtttaaacagccggccactcgatccgggctgaacaaggcctgtccctagggaggacagtggtgttcaagaaactggcgccggagaacacgactcacaatttgatcttggtagaggcacctgtcgcccccctt

SEQ ID NO: 17382 - DNA, 164 bp, Zea mays
  Clone ID: MRT4577_115852C.1
tttcttggacgcgagggcggaaatgagagcgggggggacgacaaggaaaaaggggggcgacaaactatctacaacgagcttttagcagcacccgaggagcacccagagttgcacacagaggctcccttgaacccaaaggccaacacggagaaaacgaccccaac

SEQ ID NO: 17383 - DNA, 1053 bp, Zea mays
  Clone ID: MRT4577_115853C.1
atagctgctggtcatcagagttcatcgattcgccatcagcagctcttgaaaggtcagctgcagcctggatctgatacgagacaagccgattactttgcaggaaggtctgctccagttcatcaagcatcccaggaaattggtgtatatggaagagttgatgctgataaccacaacatgtccattcttgggactactccatatggaagacagcaatcagcctcattgttggaaggagctccaaggacaaacatcgacagcctctatggacaaggatcgtcaggcactggttttggtgcaggtcttcctcctggacgtgattatgcctcagtgaaaggcctgccccatccatcttcagaccctgatcaccgagatagcatcttaccccgtgtacatccagccgtctcaatggttgatgatcgtagagttgatcgaattggttatcgtcgtgaactggatctaagagatgaggaacgcagaagggacctaatactggaaagagagaaggaacttgaacgggaacgggaacgagaacgggaacgtgagttacgggactttcgagatcgtgaaagggaaagagaacgtgaaagggaaagggatcatgaaagactactaagagaacgtgaaagagaaagggaacgcgaacgcgaacgtgaaagagagcgcgaaagagaacgccttcgtgagcgccgggagaaggagagagagcgggataggaagcacagaactgatccaaggcgggagcacactccacctagaggccctggtgatcggcggcggtcttcttctgttagatctgagaagcctgtacggcgaatttcccctcgacgtgatgctgtgcataggcatcgttcacctgttaaagaaataaagagagaatatatttgcaaggtttttccatttcgcttcgtggatgatgagagggattatctgtgcttgacaaaacggtatcccagacttgcagttactccagaatttttctaagattgtcttgaactgggcttaagaaaaactaaatcttcctctcgatacaccagtgagtttggagcatgatat

SEQ ID NO: 17384 - DNA, 470 bp, Zea mays
  Clone ID: MRT4577_115854C.1
attctctactcttcttccccagtcctccctactcagtacttacctcagcacgccactgctcgaaggcggagcgcctccaaaatccatcccaatcccaaatcctctgaattcggacgccgctcgccccacgcagatggatgcccgcccctcgattcgcccgcgctgagcatccgaacccggttcccgccgcctcggctcattccggcgctgaaagattcagctccgcgcttccggccgccggagctcggtaatggcggggttctagcgcggcggacttaaagatctagcctcctcttttcctttccattttctctctttcgctgctaccccctcacacccccacggcgatggtcacggagatggcggcgcgcggcggcgaggcggcggcgtttggcgcggagaccgaccgcggcgacttcgaggtgtttcgcagtggctccgcgccgcccactgtcgagggagccctgggc

SEQ ID NO: 17385 - DNA, 878 bp, Zea mays
  Clone ID: MRT4577_115855C.1
ctagcgaattcaaacgaacaaattgctggatatatattaatcagaccgtcaccaaaaccatgccatgccgattggcaattaagcggaaatcagtccagtgtcatttgcgtacgcgtacaaagcacggcagccgcagtcgcagctgccgctacgaacagcgacgacacgacggcgacgatgatccaaacctccgtcgtcttcgcctttcgctgctgccgagagcttggcttcccctcacggcggccgtctcgccgcggctggcgttgccggcgggcgacgcgcgtcccggcgtccctcatcctcacgacgaccttgctgccgaccagcacggagttggtgacaccttgcacgttgttgttcacgtagacgttgacgcagcagcagtggcggtgcccaccgccgccgcagctgctgctgcatcggcagcccgacgacaccgccggcgcgctgtgcgcggcgacggacatggtcgcccccgtgctcgtgcagccctcggcggccaggcgccggcccccgcttgccggagagctgtcggcggcgccggcagccccaagacccatcctggacggatgaaacagcgaagggaaatggctagcccgacgcaacgtgacaccatctcgtctccgcgagaccgctcgcgccatgcgaggacatttataggggtcggcgggccggaaactaaacgcactgtattgctgtatttgtgcgctgctggatgcgaggtcaagcaaagcattggatttagttaagaatcatccctatgccttgtaggtgtagtgcacgcaaggtataggattggtttctctcgcagaactccaccaccagatcaacaaaaacaatctcttttctctgccgtacaggcgtacatgagcccccga

SEQ ID NO: 17386 - DNA, 581 bp, Zea mays
  Clone ID: MRT4577_115856C.1
ggccggccgggaaaaaaaataaaaaaaaaaaaaaaaaaagaacacaacaccacctccaatccaaccattctagcgctgcgcagcagctggctagctatttgtgatatctctgatctagttgattgatccttggagtagggtaggaggagccgaggaggacgacatgacgaatctcaacgccaccgtcgctactgtgctcgtgatgctcgccttcctcgccgggcagtcggttgccgggcgctactactacgacaaagtgcaggacaaggtgaggaaggaagtggagaaggccatggcgaaaaaccccagcgtcggccccgcccttgttcgcttggtgttccatgactgctgggtctatggttgtgatggctccgtgctcctagacagcacgcctactgacggcaccaacaccgagaagaaggcggcgaacaacatcggcctcgctggcttcgaggtgatcgacgccaccaagcagaaggtcggcactgacgcctcctgcgcagacatcgtcgccttcgcggcgcgcgacgcggccgacatcctcagcggcggcaagatcttctacaccatccccggcggcc

SEQ ID NO: 17387 - DNA, 660 bp, Zea mays
  Clone ID: MRT4577_115858C.1
aattcggcacgaggacatccaaatcgaagaacacgtcgctgacacaccacctctccctcgccgcattctccactctctggtcttcgccgtggtcggtgccttccaaatccaaaaaaccccaagccctagctgtagccgtcccccaaggtcgccgagatgtcttcgtggctgcgcagcgcggtgagccgggcagtggaggccggcggccgcagcggcgtcgcccgcgcggtcaaggggtacgccgataccgtcgcgcaccacgccggtcaggccgtcgcggacatcctccacgaccgcatgggcgttcagaactataaaagtttcaagaagacagtagcacgattggaagaggctgctgtatcatgccgtgggggtgaaagagttgaattgttgaaacgttggttaggagcattgcaagatgttgatgctgaaaatggaagttcagatttaaaggtgtctgaagctaatgacccttctggtgaaatggacactttgaaagcacaaactgctttgttctatgatgctgatattgatggtgcacctatgaatttttgtgatgtattcttgtacagccaagcacttgaaggtattacattgtccatgcttctgccttactggagggaaagaagtgagcatggaagttctgagggatgtacaaga

SEQ ID NO: 17388 - DNA, 244 bp, Zea mays
  Clone ID: MRT4577_115859C.1
ggaccaaatactagtaagcatgtttggatcatcctacgttgtgcagagttaatcaagcattccaaaacctaattaaatttccctcaggctaaacaattgaatcatctgaagaagagataaaacaaaaaagttggtgctctcagtttttgtggacccccctccaaggctccatgagcaactcttccatgctagtacctggtatcctagcactaacttaattctggagacaagaagaaccgtgggg

SEQ ID NO: 17389 - DNA, 344 bp, Zea mays
  Clone ID: MRT4577_11585C.1
gaaagaaaaaaaaagagacgccactgttctgagacaagatccaaccaccaccaccacactctccgttgttccttgttcgttcgtttatcctggacctggatcccgctcggagatctccaccaccaacagcagcaagtagcaagcgttacaaaccgtcagatttgccattgcatgatcacatccttttctctatctgtaatgtgaaccgtgaagtgtaaagctactagctagtatatatgctttcatggatgaagctacatcacttgcgttacacattcctttctcttttacaatggttacttcttttgtgaaggaggcaatcatattaccagggttgctcttac

SEQ ID NO: 17390 - DNA, 339 bp, Zea mays
  Clone ID: MRT4577_115860C.1
atacttttttatgtcttttagacggccggttattttttttgttgtctgggataggtcctatctaccgacaccttaaaaactgaagtcagagccccaaatattttgccaaccatcttggcggaaaaaaaaaatttcaagaacggagtgctctccttctacccatctcttactcacatgaaatcccctcacgttacaggattttcaacaattgggacgagcgtgtcttctacatggtctccttttggcatcaaaccaccaataatgacaaccgcaaccatactttacaccaaattgaaaaccattttttgggaccccaaaactgaggctgccactcccaaa

SEQ ID NO: 17391 - DNA, 223 bp, Zea mays
  Clone ID: MRT4577_115861C.1
gcaggatgtcgcaccgtaagttcgagcacccgaggcacggctccctcggcttccttcccaggaagcgctctcccgcaccgggcaaggtgagtcattcccagggatgaccaagaaccttgcatctcagtgctccttgtaaagctggcatgactcacattgccggagttaaaccaggtcaactcataaaagaactttgagtgtacacatgaacctctctgcatgt

SEQ ID NO: 17392 - DNA, 606 bp, Zea mays
  Clone ID: MRT4577_115862C.1
gccggccggttcggaacgtctgccatctcctccaaattggttcgtgaaacaccccccgactcccacaaacccaccggccaccgctttggcttcatccttaccactcgatcaacactaacgctggtgcccaatggatccgacactcctccggagcaatggccgcctcctgtccttgttccttctcctgcttgccgcctccgatttcacggcggtgcagggccaggggcagcagcctggaccagctgggggggcatactactcgcaaagcttcagcccgtccatggccatcgtcatcgtcgtgctcatcgccgccttcttcttcctcggcttcttctccatctacgtccgccggctgaggcgccaagtcagtggaacaggacgaccacgcgtgcgctcctggacaacgtgtttgaccggttctctctgtcctggtcaatcggtggctgctaggaaactcttggtgctttcgtcgccatcgtggtggaaaaaattttggcacttgaatttaggagagaacgtgcttggtcgcggccctcgcctcctccttcagtccttctggaagcgtgctgtattcatttgttattattatacgaaaaacgtgtcctc

SEQ ID NO: 17393 - DNA, 184 bp, Zea mays
  unsure (1)..(184): unsure at all n locations
  Clone ID: MRT4577_115863C.1
ctcaaccaccgcagctaattccgngccagcagtacagaaccagcaccggggggggtatttttttcatcatttttgtccttttttctctattaattacttaatcaaattctacaattttttcatatatctcacattgctctattccttattacattcatatcaccatcagttctataataatttt

SEQ ID NO: 17394 - DNA, 231 bp, Zea mays
  unsure (1)..(231): unsure at all n locations
  Clone ID: MRT4577_115864C.1
acctcgagccggccggcgcgagtcgcccctgatgcgcggtggcggggcggggacaccgctgtcccgagggccccgcatcgacgcggcggacgtggccggcgacgcgctcggatgcctgtgcgcgtttctctacccagacggncatcttccaccgtgccacctgactccgccatacattgagccgcgacgggctgaatcagatgcctgtgacacatctcgggaagctgccaa

SEQ ID NO: 17395 - DNA, 332 bp, Zea mays
  Clone ID: MRT4577_115865C.1
cccacgcgtccggcgtcaaatgaatatagtagaccagactaatggccgaggtcatgtggctgtcagccaagggtctgtagctgaaactgaatcggcaaaagcaagcagaaacaagagtagtgaaaatgctgatgggaagccctttttacagatagggagcaatatagtaccagtgattgctggaaatgagactagagaaactagtcagccagtacaacagtttgttgtgtatattggatttgagcatgagtgtccctatggtcatcgcttcttactgtcagagaaacatatgaaggagatcgagtcttcctgtttgcagtatcaaagacctc

SEQ ID NO: 17396 - DNA, 2349 bp, Zea mays
  Clone ID: MRT4577_115866C.1
cgggaattcgagagcccaaacactggtgcacaaacagttaaactggaaggcaccacacgcagtgctccacaagggtcacctggtgcctcttctggaattttagctaataacatatgttcaggggcaaaaactgcacctcaatcagccattaacgagtctgagaagatctggctgtacatggatccttctaataaaatccaaggtcctttctcaatcatacagctgcggaaatggaacagcaatggctacttccctcctagtttgaaaatatggaaagctagtgagaagcaggacgattccattctattgactgatgctttggcagggaagtttgagaaagaccttcctccatgggaaccgccacatgttagtttgtttcaaattaacaaaacccctcttgagcaaagcacaatagctggtgaacaaactccaaaatcagtagttgcaaagtctttctcaagtagtaatcaaagacatggttatagttcaacaaaccttggaacaaccatgatccattctggcacacaaggttattatggaatgcaaaattcccatgcagcatacacaagccaacattctcttactggaagttggaatgccacgtcaagtcagtttggggttgcggtaaatcctgtgacacctactcagcctgccatggggagcttttcaggacaaaacatagtgtctgcagaaaatatgggtcatctaactcctggaacggctcctgcagctgcaaatgcagaaatggttaattcagatttgacctcccagaagcaaatatcgtatttaccgcaaacagacggcatattagctgatgacattgaatccaaatcaggagaagatgtttcacatggaaaagtgagctcttcagccaaagcaattggaccactgggtgcacagcttggacaaggacaactgaacactcagcaacatgaagcagacacaaaaaaccagatgtcatcaactgatgtctccaactcgacgatgccatcgcagatgatgtcagcaccatccgctgcatcagtacaaccttcattgacaaccattgctcgcagtgataatcaaagcagtgggtgggctgtacctgcacaaatggtgaacacacctggccagtctcagataactggaaatctaacctggggaaatacacctcagggtgacgcaagcttaggttggggaatggtgggacagagcaatatgaatatgccttgggtagcatcagctcaaggtgcttcaggctacaacatgggtgtagccatgccaacccagccaaatgcagttccaaacatgggctggttaccctcctgtgcagggaaatccaggaaaggcaaataagaacatgatctgggccgcaccatatggtaatcctaattggaataatcaacagagatgcaaggagtcgcagtggccccttgcactggtgttgcagcaggaagtgcaaattcttatcctgcctggggaaaccaacaagttggaaacatgaaccaaaacgttggatggagtgctcctgtgcagggaaacccgagtcaggaaaataacaacatgaactggaatgcaccaaatggtaatcctaataattggaataatcagcagagagagaatgagggcaggcactctggacaccgtggtgcttttagtgctggcgactcaggcagaaagtcatggaagccacgctctggtgccgatggggggtcatgggggacatagaggagtctgctatacatttcttgaacgcggggactgctttaaagttgactgcaaattctcccattcaacaaacacagagggatatccatccatccaggattcgggcaacgagaggcgatatgagaatcacaatgagagaaatgatcgacagtttgataggcagccttcggataatgaaaggcatcatgttaggcctgatgacaggcatggtggcagggatgacgataggcaggctgataggtctcagtcaagagagccgcgttagaactggtttctgtttcgtaccttccctttgttgtatgtgcagtagcaaactagcataatagcttccgtgcatgttttgaactttatgccctgtagcaagctgcaaacatgtgcaaatcgtgtacagcagttgtagtttaatgctgtgtgcgtcctagccccatatttaataatttacttgaataaatcgtagttgtctgatatctgatgtatagcaggggctacacacccaggtcctttatggtgatgactattgagtgttttcttataagcctcatgattgtaagtgaaggtgtttttggaaatcctatgacctaatgtccgatctgtgttcatcgttgaaaaaaaaaaaaaaaaaaaaaaaaaactcgagggggg

SEQ ID NO: 17397 - DNA, 320 bp, Zea mays
  Clone ID: MRT4577_115867C.1
atgcctgggcaggactgacggtgaggcaatggaagggaattccatcatatggccacgcagcttgcttgttcgctttatggcgaagagcaatacaacaccattttcatgcccagtttattaacgcaagtgccaacaggggcattaatgaccttatcaggtgcataagactggggcccattagcccaccaaaaacgtaacaactgagacgacagctagatgaagatgactggctttctgtgggggaaccaccacagccagggtcatcatgaccagcatagatgctaccattgccctttggggtacaggctacggtcagacat

SEQ ID NO: 17398 - DNA, 352 bp, Zea mays
  Clone ID: MRT4577_115868C.1
acaagctttttttttctttgttcttactttttggaatcatggaaatgcaactacttattcttcgctgggacccatccattatccaaaaaacttttttattgattctcaactaatcagcaatttataacagggcaccaccaatgttgagttgaccctaggaggctgttgggtttgccaaagtaagctggacaaagggcaacaattgttgtctctgtaaaagggctgcggggttacaccgaaaactgctggtcgaaaggcaccaactgttgctttgtcaagaaggaagcacggctcccttcaactagctggcttaaagggagtcatatttgctttttgaaataagcaacggggg

SEQ ID NO: 17399 - DNA, 325 bp, Zea mays
  Clone ID: MRT4577_115869C.1
gcaagggggacgaaaactggttcagcggtggaatttaatggaagggggactgcacctacagacagattgctagggaaataaaaaacatactgcatccttttgggtacagacacacttattcacacagattatgatatatttcattgaccggggcatggctgagacatgggaccctacagagtggcacccggacattgttaaataacttccaagcagcttactgagattcttgtaaaggctcaaacgcgaaaaggttggatcgtaacgatccacaacacataccttcttgtggaacaacaatgcggaaaaggtgcacttgatgctg

SEQ ID NO: 17400 - DNA, 534 bp, Zea mays
  Clone ID: MRT4577_11586C.1
aaaaaaaaaaaaaaaaaaaaaaaaaaaaaaaaaaaaaaaaaaaaaaaaaaaaaaaaaaaacctaggccgaaaaccaccctaagggaaaaattttaaaaaatccccttgcccctgcccccccttttggggaattttttcgtaaatgcccctcaccctgggcgggtggggtggggcctttctcttttaagggcccctttcttcctttatggggggtgcctttaaaaatccctggggccgccctttataaacggcgtggcggggaaaacccttttggtccccctgtttaatccctttgaaggccttccccttttgcccttcctgacattttcgcaaaagggcctggccaatgccccttctcctaaagggggccattatgggggggggatggggggctccctgtcagggggccttataccctggggggggggtttttcccccctctttacccttttttttttccatttccttaacgcccggtctttttttttttttcctttcttttttggggccttcctcggggtttccccttaaggg

SEQ ID NO: 17401 - DNA, 384 bp, Zea mays
  Clone ID: MRT4577_115870C.1
gacaggccagcccatgggagtggacattgacctgccgccgcccaagacccgcagcaaccgggacggccagtggcaggcgaagtacgtggctcgaggcgggcggcacaccctggctattgtggtgtgggcagagaccacagactgatcacgttgtgatcaacttcctgaatcctaatctgggtgcaaatctgagtttgacaatcctgctagacaattatagtgttagtgaaataagcataagttatgcgacattaggcatcataaaattttatgtatgtgcttaatctggcaaggaacaaaaatagtcgggaagaggactttgtgcagggatagatgggagagcttcagtatttcagcaatatttttcgatgggcaattttgtgc

SEQ ID NO: 17402 - DNA, 843 bp, Zea mays
  Clone ID: MRT4577_115871C.1
ggaacctacgaatcaaagttgccctgggagcagccaagggccttgcgttcttgcacagcgacaaggccagagttatctaccgagatttcaagacatccaacgtgctcctggattcgaactacaacgccaagctgtctgacttcggtttggcaaaggacgggccaaccggcgaccagagccacgtgtccaccagagtcatgggcacctacggatatgctgctccggaatatctcgcaacaggtcatctcacgccgaagagcgacgtctacagcttcggcgtcgtgctgctggagatgctgtcgggccgccgcgccatggacaagaaccgcccggccaccgagcacaacctcgtcgactgggcgcgcccctacctcagcagcaagcgccgcgtctcccgcatcctggacgaccgcctggccggccactacccgctgccggccgtccaaagggcggcagcgctggcgctgcagtgcctctccgaggactccaggaagaggccaaccatggaccaggtcgtcgcgtcgctgcagcaactcacagccgcccaggaccacgacgatgcccaccggtcgtcgcgcaggtacccaaaagatcaccgtcaggccgcggcgctcaacaaccggaatctgaacgctcatcgccgcctgtccgccttgcctctacccgagtgactaccatattcatattcgatcatcttttgtatcttcacgaaagtagtatgtaaatccgtggtgaagacctgggtaattagtgataaaaacacaacttgactgttgattagatgtaaatggtggcttcaacttaaccggtttatgcaaaaaaaaaaaaaaaaaaggggcggcc

SEQ ID NO: 17403 - DNA, 222 bp, Zea mays
  unsure (1)..(222): unsure at all n locations
  Clone ID: MRT4577_115872C.1
acggccgggcgggcgggcacaagactatgtattggaccgttggctagctacctactcgtagtttctcatttacggcgatgagtaacgtgggcaccctgccctggtccgctgcgccgctttgctggttgccttcgctctccggggggggggggggttctcccntctcttttcttcccccgctccgtgcggctgtccgtgcccgggcggccgcccggcgggggc

SEQ ID NO: 17404 - DNA, 368 bp, Zea mays
  Clone ID: MRT4577_115873C.1
aaaaaaaaaaaaaaaaaaaaaaaaacaaaaaaaaaaaaaacaaaattacaaacaaaaaaggggcaaaaaaaataaaaaaaaaaaaaacctccaaccttaaaaaaaaacaaaacgtggcccgccccttttaaaaagctccggggtttccgttttacgtgcttccaccttcataccttttctttggggccccttaatttttttttagtggcccctaatttacaccgaccggcctgggaaacccctggcgtaccccaacttactccccttggccccattcccttttctccagctgcgttttcttttaaaaggctggccccattcccctttgccaacagttgcccctccttaatagcaattggaccccccct

SEQ ID NO: 17405 - DNA, 230 bp, Zea mays
  Clone ID: MRT4577_115874C.1
ggtctggcgacccgtctgcctccccgcagcactaccggtagttgcggtagacgggagtgtacatgcaggtctgtgcatatttgaccagggcggctggggcggaggcgaggacgcggagcgaggccgcgcacggcggcggcgaggggaatggcgggggggagctccgtgggcccgccgggcgggccggggtcgggggcgataccagggcccgatctccggtgcgcccccgg

SEQ ID NO: 17406 - DNA, 1235 bp, Zea mays
  Clone ID: MRT4577_115875C.1
gccattgggtacctcgaggccggccggggttcctttcagcattatctccgtttgctgtcccgcccacgcagggaccattcccatccgctgaaaatctctccaccccggccccggccccggccgcggccatggcggcctccgctcccatccacctcctcctctcgccctcccgctctacatggccgccacaagatccgagcctgaggcccataccgcccctccacgcgtggccggcgcgccaacgccatctccgcgctgcccgctgcgcgttgtcgccgcctacgccgtcgctcgacctcccgctcctcccgttccagcctgcggaggtgttgataccatctgaatcgaagactctacacttgtatgaagcaagatatatagcattgcttgaggaggccttgtacaagagggaaaaatcttttgttcactttgtgcttgatccagttgtagatagctctactaaagcttcatttgctgtaagatatggctgcttggtccacatagaaagtgttcaaaagctggagattggagcgttgttatcaattagaggagtgtgccgtgtaaacatttcgaatcttttggatatggagccctatttccgtggtacagtttctccaatgatggatgggccttatgacgctattgaattagagacaagaatttccaagctaaaagaatccatgtgcaatttacacagcctacaaatgaagttgaaggtacctgaggatgaaccactgcaaactaacatcagggcatctctactgtggtccgagaaagaaagttttgaagagtataatgagtcttttatccctggacgcccagaacgtctctcatttgctgcgtaccaaacagtttcaggcatgtcagatgaagaacttctcactgtgcaaaactacaagatacaagcaatggattcgacagacacccttgaaaggctgaacactggtatcaagtttgtagaacataacatcggaatgatagccgcaaggcttgccattcaaaatatatgatcctcattggcagtgtttagttcatatgctaaatgatgtccgtgatgctaactccatctggtcgtaaaaaagaactcagcttttcaagtttcaactgtaaacgtggaaggtctgatctggtacattcggataacttctgacataactttgatatacattcagagaacagtacgaagatgaagaacacaatatgaagttaaaaaaaaaaaagcggccacacaacat

SEQ ID NO: 17407 - DNA, 475 bp, Zea mays
  unsure (1)..(475): unsure at all n locations
  Clone ID: MRT4577_115876C.1
atgctnccggccgncatggccgtgggattatcgtggtcgcggccgaagtacatgaagaatttttccttccaggggaagtgattatggaacagggtagcgatggcagatcaactgtattttgtctgtcatggtaaagtggaagaagttagaaaaccagaagaaaatgaaactgaagaatctctcctggatcttcacacttacaactctgttggtgaaatttctgttctttgtaacatcccagtcccttatacagttcaagtttatgagttatctagactgctacgcattgataaacaagctctggtggagattctggggatatacttctctgacgggcgtgtgatcatcaataatctacttgagggaagagagtcaagccttcgaagcaagatattagattcagacataacactgaatattgcgaaacatgaatctgagctcacgatgaggttgaactgtgcagctcacgatggag

SEQ ID NO: 17408 - DNA, 228 bp, Zea mays
  Clone ID: MRT4577_115877C.1
tgtgcagccgctggtcggcgcgcagaggggcgtcaagatccacatcgggggagaccacgacatgaaggagcgcctctgcctcgaggccgagcgcctcggtctgtccgtgatgatcatgggcagccggtgattcggtgcctcgcgcagggacgggaaagggaggctcgtgagcgttagtgactactgcgtgcaccactgtgtctgccctgttgtggttgtgcgctaccc

SEQ ID NO: 17409 - DNA, 382 bp, Zea mays
  Clone ID: MRT4577_115878C.1
gctcgccctttttttttttttttataaatgacatatggtgtgggtttttttttaatttgagtttggtcttttatttttatttgtttgtaacagacagagaaatagaaaaaggcgcatgccaaaagagcggaagatgattctaaccgaaaaaaggggaggcggggaaaaaaaaaaaaagccaaatgggcggaggggcgcaggacagagaaaacaccacggcaaggacaaataaagcgcacttggggcaagaaaggaagcaccggagggacccggaaaacaaaacggcccaggaaagcccaaggaaacagggggggccacccaaaaaaaaatggacccgacccagggaggaaacaaaaaaaaggacgggggggcccgggggaaa

SEQ ID NO: 17410 - DNA, 374 bp, Zea mays
  Clone ID: MRT4577_115879C.1
ggcattgctcagttttcagccccaatttctccaccatagtctgactgacaaaagtaggggaggtaccataatctaccaggatgagcatcacctgattctgaatcagagctcttactctcatgcaacactcatggtctgttccactgatggcatttaacgacagattgtgggactcctctcggttctggtcctcctggtccagatcatacaacacctcatccgacaacatctgccccatatcttccacagttaaactatgtaactgaggacctgttctcttggaacatttggcctgatgtccaggttcatacttctctccacacccaaaacataacccattcatcctcctaaaatccctcaactgcctcttcttc

SEQ ID NO: 17411 - DNA, 140 bp, Zea mays
  unsure (1)..(140): unsure at all n locations
  Clone ID: MRT4577_11587C.1
tcctattgtttggtggagcgggcanaaaactgatcaatattcaccagagtgacagcatactctaactgaaagcaggttcaccctcacccccaccgccatcgtgggtaatcactcaagagaacaaagcgatcccgatagat

SEQ ID NO: 17412 - DNA, 214 bp, Zea mays
  Clone ID: MRT4577_115880C.1
cccacgcgtccgcccacgcgtccgctgtttgttccttggagccgcccccggcgtccgcggcaccggtcggccctggggcggcccctttcggcgcggtcgggaacggccccgaacccagacctggccgaagctttcggttcctctggagaaccacaaagctttggcgcgcgccgggaagcgaaaaccaagagagccaacctagacctggggaaag

SEQ ID NO: 17413 - DNA, 610 bp, Zea mays
  Clone ID: MRT4577_115881C.1
actccatagggcgattgggactctcgaggccggccgggaaacgccgataccgccatgagttgttacatcctccctacccatcgcacgctgcagttgacgaggaactctgcctttgcggactataaacggagctcgtaccccccctttttcctggccatcttcacagagtctgcagatggaggaatcgggccgccattggggtattccacttccacccacgctgctggaacccgctcgaaggctctggggttcacgcaagtccactgaaaggcagacaaggcagaatctgcacgcgaagatgacatgtgcttcatgaatccctcatcgacggagatccgccgccgtgggaccgctatggcgtgtggatggatactgccatcccaaatcaaggtcaagaacaggtaccacaggatgaggcgcgtggaggatgccgtgatgagttcgtgagtggtctaggccgtcgtctcccagtcaactttgggtcgctggaccgttgtctccttataatgtaattatttatttattttgtatagaactcctattatgtagtaaagatgtgacattcgatcctatgccatgatccaaaaaaaaaaaaaaaaaatttgcggcc

SEQ ID NO: 17414 - DNA, 212 bp, Zea mays
  Clone ID: MRT4577_115882C.1
ccaaaagggagggcccaaatttcggcttctctttccggggcaacaatttaaaaagggggccccccagtttgttttctcaatccccaaatttcaagggggggcccattgggcgggaccccccttgcccctccaagccggtttttaaaccaccactggtttttcccagacccttgggcggccccctgggcggacccctgggttccccccggaat

SEQ ID NO: 17415 - DNA, 351 bp, Zea mays
  unsure (1)..(351): unsure at all n locations
  Clone ID: MRT4577_115883C.1
cgccgattccgcccgcacgtccttggtgctaccggaagggcctccgggcctccaggcctgcctcgcggggctaatcctccgcctccccttcgggatccaggaccaggacgcctctccggctcccggcacacgcctactcgctcccttcgcccgccgcattntcctcgccttcaatgctcccgtgcggctcctncccaaacgcaggtgcgcggtctacgggaaccccatccgcatgtccatcctcaagtgcagagcatccaagactgaggccctggcgcgcttcttcccgagagcggngttattgggcgaacacgaggcccaggtcgtgctcgtgcttgggggagccggagg

SEQ ID NO: 17416 - DNA, 3484 bp, Zea mays
  Clone ID: MRT4577_115884C.1
gtattgccagaacgtgctgctgccttgtttggggcaggagtgggaagtgcgcaaatcacacggcaatttcattgctgcagtggttctatgacccacatgtacgccacaactactataggcgtggacatacgcaagttccagcttagcgtggttaaggcagcaaatgggcctggacagccaagaaccggccttgtttaacgacacgataagggcaaacattactctggcgccttcctggtcctccagaaggggctcaccgccgcctgggtcagctacgggatccttgccggccgcactgccgctcgggcgctggctctgcccgccccggccatcagagcgcgctccaccgggcagcccgcagcacgtcggcccttggtgacggtcgccacagtgccttcgcgccaccctgcgcgctacctctgggcgttagcgttcaggatgcttcatccaacaaactgtgcggcgagatgccacaggaagtgcctctcagccgccccgcctctcttaacatgtctgaggacccggtcctcgtgccaggtgacgttgtcccgatcatcagcggagttttcttcccgatcgccgcggcgctcctcttggatttgtaaaagaagaactgtgaaggtcccctacgaacaggaagcaggacagggttcagaagttgcatcggttttggagtttcctctttcttgctgtttggggtctatgcagcttgcttctctgccgctctacgacgtgacatcgacttccagcccgcctgccccaaggattccaccgggcctgttgctcctgcaatcccggacattcgcctgacgcgatcaagtgccaagaccgttgcgcttgttggggagagtgggagtggcaaatcaacggcaatttcattgctccagaggttctatgacccagatgtaggccacatactactagatggcgtggacatacgcaagttccagcttcggtggttaaggcagcaaatgggcctggtcagtcaaggagcggccttgtttaacgacacgagaagggcaaacattgcctatggaaaagatggacaggcaacagaatgggaaggttgattgccgcgctcgtccaggcaaacaaatatcaataaacaagtcagctagcaggaggtcgtcccgtgataacagtgcgtggagctcagcttcagtcccattcggtatgcctcatgggattgacattcaggatggttcatctaacaaactgtgtgatgagatgccacaggaagtgcctctcagccggcttgcatctctcaacaagccagagatcccggtccttatactaggctccattgcctcagtcatcagtggagttatcttcccgatctttgcgatactcctgtcaaatgtgataaaagcgttctatgagcctccacatctcctaaggagggattcacagttctgggcttccatgttcttggtgtttggtgcagtgtacttcttgtcactccctgtcagttcgtaccttttctccatagcagggtgcaggttgattagaaggatccgactgatgacatttgagaaggtggtaaatatggaggtcgagtggtttgatcacccagaaaactcaagtggagcaataggtgcaaggttgtcagctgatgcagcaaaagttagaggccttgtgggggatgcgcttcaattggttgtacaaaactcttcgacactagttgctggtttggttattgcatttgtgtcaaactgggagctatccctcatcatcttagctttaataccactcattggcctaaatggatggatccagatgaagtttattcacggtttcagtgcagacgcaaagatgatgtatgaagaggcaagccaggtggctaatgatgcagtaggcagcataagaacagtggcctcattctcagctgaagagaaggtcatggatttgtacaagaagaaatgtgaaggtcctctaagaacaggaatcaggacagggattataagtggaatcggttttggagtttcctttttcttgctatttggggtatatgcagctagcttttatgctggtgctcggcttgttgaggacaggaagacaacctttcctaaagttttcagggttttcctagctcttgcaatggcggcaattggagtgtcgcaatcaagtacccttacatcagattcttccaaagcaaaatcagctgcatcttctatatttgcaattgtagatcgaaaatcaaggatagacccaagtgaggatgcaggggtaactgttgaggcactacaaggaaacatcgtattccagcatgttagcttcaagtatcctaccaggccagatgttcagatattccgggacctttgcttgacaattcatgctggaaagactgttgcactcgttggagagagtggtagtggcaaatcaacggcaatttcattgctccagaggttctatgacccagatgtaggccatatactactagatggcgtggacatacagaagttccagcttaggtggttaaggcaacaaatgggcctggttagtcaagaaccagctttgtttaatgacacaataagggcaaacattgcctatggaaaagatggacaagcaacagaatctgagatcatatctgctgcagaattggcaaatgctcacaagtttatcagttcggcgctgcagggatatgacacagtggttggagagcgtggagcccagttgtcaggagggcagaagcagcgagtggcgatcgcccgtgcaattgtgaaggaccctaggatcctgcttctggacgaagcgactagtgcgctggatgctgagtccgagcggatcgtccaggacgcactggacagggtgatggtgaaccggacaacagtgatcgtcgctcaccgtctgtcaacaatacaaaatgcagatttgattgcggtcgtgaggaatggggttatcatcgagaagggaaagcacgatgccttgatcaacatcaaggatggcgcctatgcgtccctcgtcgcccttcactcggcagcctcttcatagcaggtgatggtatgggatcctgcatacgtctgctaagacatatatgaacagagcgagctggcacaacctgtgtagcaatccaggtgctagtctctgttcctctatttgatggcatacataattgcttatacctaagcggagaaatgttacaaatagcaaggaccagatgtaaatgcaaggagctggtccttaagataactttttataatctataaatcttaatatgtatatgtagcttcgaacatagaaaccaaatagatgatggttatgctataaaaaaaaaaaaaaaaaaaaaaaaaaaaaacctcgactcataaacatgaacagaaaactacctaaaattacaaaaccttaaaaaaggggggcgccgttttaaaggacccatccttacgccccctgcattgcaagctaaaaatttttttttagggcccccaaaatgaaatccccgggccgcggtttaaaagccgggaaattggaaaacccctggggtacc

SEQ ID NO: 17417 - DNA, 963 bp, Zea mays
  unsure (1)..(963): unsure at all n locations
  Clone ID: MRT4577_115885C.1
caactgatgacatttgaaaaggtggtaaatatggaggtcgagtggtttgatcacccataaaactcaagtggagcaataggtgcaaggttgtcagctgatgcagcaaaagttagaggccttgtgggggatgcgcttcaattggttgtacaaaactcttcgacactagttgctggtttggttattgcatttgtgtcaaactgggagctatccctcatcatcttagctttaataccactcattggcctaaatggatggatccagatgaagtttattcacggtttcagtgcagacgcaaaggtctgttctcttgtactgaactgcctttccttaaatttattgtctatcgcatcagacttcatccagttatttgtgaatgcagatgatgtatgaagaggcaagccaggtggctaatgatgcagtaggagcataagaacagtggcctcattctcagctgaagagaaggtcatggatttgtacaagaagaaatgtgaaggtcctctaagaacaggaatcaggacagggattataagtggaatcggttttggagtttcctttttcttgctatttggggtatatgcagctagcttttatgctggggctcggcttgtcgaggacaggaagacaacctttcctaaagttttcagggtttttcttgctcttgcaatggcggcgattggagtgtcgcaatcaagtacccttacatcggattcttccaaagcaaaatcagccgcgtcctctatatttgcaatcgtagaccgaaaataaggatagacccaagtgaggatgcaggggtgactgctgagacactacgaggaaatatcgaattccagcacgttagcttcaggtatcctaccaggccagatgtccagatcttccgggacctttgcctgacaattcatgctggnaagactgttgcgcttgtttgggagagtgggagtggcaaataaccgcaatttcattgct
